United States Patent Application Publication US 2018/0126003 A1 - sequence listing, part 168

SEQ ID NO: 295186 - protein, 5033 aa, Artificial Sequence
  derived and/or modified sequence
MGDAEGEDEVQFLRTDDEVVLQCSATVLKEQLKLCLAAEGFGNRLCFLEPTSNAQNVPPDLAICCFVLEQSLSVRALQEMLANTVEAGVESSQGGGHRTLLYGHAILLRHAHSRMYLSCLTTSRSMTDKLAFDVGLQEDATGEACWWTMHPASKQRSEGEKVRVGDDIILVSVSSERYLHLSTASGELQVDASFMQTLWNMNPICSRCEEGFVTGGHVLRLFHGHMDECLTISPADSDDQRRLVYYEGGAVCTHARSLWRLEPLRISWSGSHLRWGQPLRVRHVTTGQYLALTEDQGLVVVDASKAHTKATSFCFRISKEKLDVAPKRDVEGMGPPEIKYGESLCFVQHVASGLWLTYAAPDPKALRLGVLKKKAMLHQEGHMDDALSLTRCQQEESQAARMIHSTNGLYNQFIKSLDSFSGKPRGSGPPAGTALPIEGVILSLQDLIIYFEPPSEDLQHEEKQSKLRSLRNRQSLFQEEGMLSMVLNCIDRLNVYTTAAHFAEFAGEEAAESWKEIVNLLYELLASLIRGNRSNCALFSTNLDWLVSKLDRLEASSGILEVLYCVLIESPEVLNIIQENHIKSIISLLDKHGRNHKVLDVLCSLCVCNGVAVRSNQDLITENLLPGRELLLQTNLINYVTSIRPNIFVGRAEGTTQYSKWYFEVMVDEVTPFLTAQATHLRVGWALTEGYTPYPGAGEGWGGNGVGDDLYSYGFDGLHLWTGHVARPVTSPGQHLLAPEDVISCCLDLSVPSISFRINGCPVQGVFESFNLDGLFFPVVSFSAGVKVRFLLGGRHGEFKFLPPPGYAPCHEAVLPRERLHLEPIKEYRREGPRGPHLVGPSRCLSHTDFVPCPVDTVQIVLPPHLERIREKLAENIHELWALTRIEQGWTYGPVRDDNKRLHPCLVDFHSLPEPERNYNLQMSGETLKTLLALGCHVGMADEKAEDNLKKTKLPKTYMMSNGYKPAPLDLSHVRLTPAQTTLVDRLAENGHNVWARDRVGQGWSYSAVQDIPARRNPRLVPYRLLDEATKRSNRDSLCQAVRTLLGYGYNIEPPDQEPSQVENQSRCDRVRIFRAEKSYTVQSGRWYFEFEAVTTGEMRVGWARPELRPDVELGADELAYVFNGHRGQRWHLGSEPFGRPWQPGDVVGCMIDLTENTIIFTLNGEVLMSDSGSETAFREIEIGDGFLPVCSLGPGQVGHLNLGQDVSSLRFFAICGLQEGFEPFAINMQRPVTTWFSKGLPQFEPVPLEHPHYEVSRVDGTVDTPPCLRLTHRTWGSQNSLVEMLFLRLSLPVQFHQHFRCTAGATPLAPPGLQPPAEDEARAAEPDPDYENLRRSAGGWSEAENGKEGTAKEGAPGGTPQAGGEAQPARAENEKDATTEKNKKRGFLFKAKKVAMMTQPPATPTLPRLPHDVVPADNRDDPEIILNTTTYYYSVRVFAGQEPSCVWAGWVTPDYHQHDMSFDLSKVRVVTVTMGDEQGNVHSSLKCSNCYMVWGGDFVSPGQQGRISHTDLVIGCLVDLATGLMTFTANGKESNTFFQVEPNTKLFPAVFVLPTHQNVIQFELGKQKNIMPLSAAMFQSERKNPAPQCPPRLEMQMLMPVSWSRMPNHFLQVETRRAGERLGWAVQCQEPLTMMALHIPEENRCMDILELSERLDLQRFHSHTLRLYRAVCALGNNRVAHALCSHVDQAQLLHALEDAHLPGPLRAGYYDLLISIHLESACRSRRSMLSEYIVPLTPETRAITLFPPGRSTENGHPRHGLPGVGVTTSLRPPHHFSPPCFVAALPAAGAAEAPARLSPAIPLEALRDKALRMLGEAVRDGGQHARDPVGGSVEFQFVPVLKLVSTLLVMGIFGDEDVKQILKMIEPEVFTEEEEEEDEEEEGEEEDEEEKEEDEEETAQEKEDEEKEEEEAAEGEKEEGLEEGLLQMKLPESVKLQMCHLLEYFCDQELQHRVESLAAFAERYVDKLQANQRSRYGLLIKAFSMTAAETARRTREFRSPPQEQINMLLQFKDGTDEEDCPLPEEIRQDLLDFHQDLLAHCGIQLDGEEEEPEEETTLGSRLMSLLEKVRLVKKKEEKPEEERSAEESKPRSLQELVSHMVVRWAQEDFVQSPELVRAMFSLLHRQYDGLGELLRALPRAYTISPSSVEDTMSLLECLGQIRSLLIVQMGPQEENLMIQSIGNIMNNKVFYQHPNLMRALGMHETVMEVMVNVLGGGESKEIRFPKMVTSCCRFLCYFCRISRQNQRSMFDHLSYLLENSGIGLGMQGSTPLDVAAASVIDNNELALALQEQDLEKVVSYLAGCGLQSCPMLVAKGYPDIGWNPCGGERYLDFLRFAVFVNGESVEENANVVVRLLIRKPECFGPALRGEGGSGLLAAIEEAIRISEDPARDGPGIRRDRRREHFGEEPPEENRVHLGHAIMSFYAALIDLLGRCAPEMHLIQAGKGEALRIRAILRSLVPLEDLVGIISLPLQIPTLGKDGALVQPKMSASFVPDHKASMVLFLDRVYGIENQDFLLHVLDVGFLPDMRAAASLDTATFSTTEMALALNRYLCLAVLPLITKCAPLFAGTEHRAIMVDSMLHTVYRLSRGRSLTKAQRDVIEDCLMSLCRYIRPSMLQHLLRRLVFDVPILNEFAKMPLKLLTNHYERCWKYYCLPTGWANFGVTSEEELHLTRKLFWGIFDSLAHKKYDPELYRMAMPCLCAIAGALPPDYVDASYSSKAEKKATVDAEGNFDPRPVETLNVIIPEKLDSFINKFAEYTHEKWAFDKIQNNWSYGENIDEELKTHPMLRPYKTFSEKDKEIYRWPIKESLKAMIAWEWTIEKAREGEEEKTEKKKTRKISQSAQTYDPREGYNPQPPDLSAVTLSRELQAMAEQLAENYHNTWGRKKKQELEAKGGGTHPLLVPYDTLTAKEKARDREKAQELLKFLQMNGYAVTRGLKDMELDSSSIEKRFAFGFLQQLLRWMDISQEFIAHLEAVVSSGRVEKSPHEQEIKFFAKILLPLINQYFTNHCLYFLSTPAKVLGSGGHASNKEKEMITSLFCKLAALVRHRVSLFGTDAPAVVNCLHILARSLDARTVMKSGPEIVKAGLRSFFESASEDIEKMVENLRLGKVSQARTQVKGVGQNLTYTTVALLPVLTTLFQHIAQHQFGDDVILDDVQVSCYRTLCSIYSLGTTKNTYVEKLRPALGECLARLAAAMPVAFLEPQLNEYNACSVYTTKSPRERAILGLPNSVEEMCPDIPVLERLMADIGGLAESGARYTEMPHVIEITLPMLCSYLPRWWERGPEAPPSALPAGAPPPCTAVTSDHLNSLLGNILRIIVNNLGIDEASWMKRLAVFAQPIVSRARPELLQSHFIPTIGRLRKRAGKVVSEEEQLRLEAKAEAQEGELLVRDEFSVLCRDLYALYPLLIRYVDNNRAQWLTEPNPSAEELFRMVGEIFIYWSKSHNFKREEQNFVVQNEINNMSFLTADNKSKMAKAGDIQSGGSDQERTKKKRRGDRYSVQTSLIVATLKKMLPIGLNMCAPTDQDLITLAKTRYALKDTDEEVREFLHNNLHLQGKVEGSPSLRWQMALYRGVPGREEDADDPEKIVRRVQEVSAVLYYLDQTEHPYKSKKAVWHKLLSKQRRRAVVACFRMTPLYNLPTHRACNMFLESYKAAWILTEDHSFEDRMIDDLSKAGEQEEEEEEVEEKKPDPLHQLVLHFSRTALTEKSKLDEDYLYMAYADIMAKSCHLEEGGENGEAEEEVEVSFEEKQMEKQRLLYQQARLHTRGAAEMVLQMISACKGETGAMVSSTLKLGISILNGGNAEVQQKMLDYLKDKKEVGFFQSIQALMQTCSVLDLNAFERQNKAEGLGMVNEDGTVGEKVMADDEFTQDLFRFLQLLCEGHNNDFQNYLRTQTGNTTTINIIICTVDYLLRLQESISDFYWYYSGKDVIEEQGKRNFSKAMSVAKQVFNSLTEYIQGPCTGNQQSLAHSRLWDAVVGFLHVFAHMMMKLAQDSSQIELLKELLDLQKDMVVMLLSLLEGNVVNGMIARQMVDMLVESSSNVEMILKFFDMFLKLKDIVGSEAFQDYVTDPRGLISKKDFQKAMDSQKQFSGPEIQFLLSCSEADENEMINCEEFANRFQEPARDIGFNVAVLLTNLSEHVPHDPRLHNFLELAESILEYFRPYLGRIEIMGASRRIERIYFEISETNRAQWEMPQVKESKRQFIFDVVNEGGEAEKMELFVSFCEDTIFEMQIAAQISEPEGEPETDEDEGAGAAEAGAEGAEEGAAGLEGTAATAAAGATARVVAAAGRALRGLSYRSLRRRVRRLRRLTAREAATAVAALLWAAVTRAGAAGAGAAAGALGLLWGSLFGGGLVEGAKKVTVTELLAGMPDPTSDEVHGEQPAGPGGDADGEGASEGAGDAAEGAGDEEEAVHEAGPGGADGAVAVTDGGPFRPEGAGGLGDMGDTTPAEPPTPEGSPILKRKLGVDGVEEELPPEPEPEPEPELEPEKADAENGEKEEVPEPTPEPPKKQAPPSPPPKKEEAGGEFWGELEVQRVKFLNYLSRNFYTLRFLALFLAFAINFILLFYKVSDSPPGEDDMEGSAAGDVSGAGSGGSSGWGLGAGEEAEGDEDENMVYYFLEESTGYMEPALRCLSLLHTLVAFLCIIGYNCLKVPLVIFKREKELARKLEFDGLYITEQPEDDDVKGQWDRLVLNTPSFPSNYWDKFVKRKVLDKHGDIYGRERIAELLGMDLATLEITAHNERKPNPPPGLLTWLMSIDVKYQIWKFGVIFTDNSFLYLGWYMVMSLLGHYNNFFFAAHLLDIAMGVKTLRTILSSVTHNGKQLVMTVGLLAVVVYLYTVVAFNFFRKFYNKSEDEDEPDMKCDDMMTCYLFHMYVGVRAGGGIGDEIEDPAGDEYELYRVVFDITFFFFVIVILLAIIQGLIIDAFGELRDQQEQVKEDMETKCFICGIGSDYFDTTPHGFETHTLEEHNLANYMFFLMYLINKDETEHTGQESYVWKMYQERCWDFFPAGDCFRKQYEDQLS

SEQ ID NO: 295187 - protein, 1237 aa, Artificial Sequence
  derived and/or modified sequence
MPEGAQGLSLSKPSPSLGCGRRGEVCDCGTVCETRTGSARPSRLERVAREIVETERAYVRDLRSIVEDYLGPLLDGGVLGLSVEQVGTLFANIEDIYEFSSELLEDLENSSSAGGIAECFVQRSEDFDIYTLYCMNYPSSLALLRELSLSPPAALWLQERQAQLRHSLPLQSFLLKPVQRILKYHLLLQELGKHWAEGPGTGGREMVEEAIVSMTAVAWYINDMKRKQEHAARLQEVQRRLGGWTGPELSAFGELVLEGAFRGGGGGGPRLRGGERLLFLFSRMLLVAKRRGLEYTYKGHIFCCNLSVSESPRDPLGFKVSDLTIPKHRHLLQAKNQEEKRLWIHCLQRLFFENHPASIPAKAKQVLLENSLHCAPKSKPVLEPLTPPLGSPRPRDARSFTPGRRNTAPSPGPSVIRRGRRQSEPVKDPYVMFPQNAKPGFKHAGSEGELYPPESQPPVSGSAPPEDLEDAGPPTLDPSGTSITEEILELLNQRGLRDPGPSTHDIPKFPGDSQVPGDSETLTFQALPSRDSSEEEEEEEEGLEMDERGPSPLHVLEGLESSIAAEMPSIPCLTKIPDVPNLPEIPSRCEIPEGSRLPSLSDISDVFEMPCLPAIPSVPNTPSLSSTPTLSCDSWLQGPLQEPAEAPATRRELFSGSNPGKLGEPPSGGKAGPEEDEEGVSFTDFQPQDVTQHQGFPDELAFRSCSEIRSAWQALEQGQLARPGFPEPLLILEDSDLGGDSGSGKAGAPSSERTASRVRELARLYSERIQQMQRAETRASANAPRRRPRVLAQPQPSPCLPQEQAEPGLLPAFGHVLVCELAFPLTCAQESVPLGPAVWVQAAIPLSKQGGSPDGQGLHVSNLPKQDLPGIHVSAATLLPEQGGSRHVQAPAATPLPKQEGPLHLQVPALTTFSDQGHPEIQVPATTPLPEHRSHMVIPAPSTAFCPEQGHCADIHVPTTPALPKEICSDFTVSVTTPVPKQEGHLDSESPTNIPLTKQGGSRDVQGPDPVCSQPIQPLSWHGSSLDPQGPGDTLPPLPCHLPDLQIPGTSPLPAHGSHLDHRIPANAPLSLSQELPDTQVPATTPLPLPQVLTDIWVQALPTSPKQGSLPDIQGPAAAPPLPEPSLTDTQVQKLTPSLEQKSLIDAHVPAATPLPERGGSLDIQGLSPTPVQTTMVLSKPGGSLASHVARNLWAFTGPRGLLMPPSTCEPGHEASLKQGFQPDAIDPQNLTWKSRH

SEQ ID NO: 295188 - DNA, 3714 bp, Artificial Sequence
  derived and/or modified sequence
atgcccgagggcgcccagggcctgagcctgagcaagcccagccccagcctgggctgcggcagaagaggcgaggtgtgcgactgcggcaccgtgtgcgagaccagaaccggcagcgccagacccagcagactggagagagtggccagagagatcgtggagaccgagagagcctacgtgagagacctgagaagcatcgtggaggactacctgggccccctgctggacggcggcgtgctgggcctgagcgtggagcaggtgggcaccctgttcgccaacatcgaggacatctacgagttcagcagcgagctgctggaggacctggagaacagcagcagcgccggcggcatcgccgagtgcttcgtgcagagaagcgaggacttcgacatctacaccctgtactgcatgaactaccccagcagcctggccctgctgagagagctgagcctgagcccccccgccgccctgtggctgcaggagagacaggcccagctgagacacagcctgcccctgcagagcttcctgctgaagcccgtgcagagaatcctgaagtaccacctgctgctgcaggagctgggcaagcactgggccgagggccccggcaccggcggcagagagatggtggaggaggccatcgtgagcatgaccgccgtggcctggtacatcaacgacatgaagagaaagcaggagcacgccgccagactgcaggaggtgcagagaagactgggcggctggaccggccccgagctgagcgccttcggcgagctggtgctggagggcgccttcagaggcggcggcggcggcggccccagactgagaggcggcgagagactgctgttcctgttcagcagaatgctgctggtggccaagagaagaggcctggagtacacctacaagggccacatcttctgctgcaacctgagcgtgagcgagagccccagagaccccctgggcttcaaggtgagcgacctgaccatccccaagcacagacacctgctgcaggccaagaaccaggaggagaagagactgtggatccactgcctgcagagactgttcttcgagaaccaccccgccagcatccccgccaaggccaagcaggtgctgctggagaacagcctgcactgcgcccccaagagcaagcccgtgctggagcccctgaccccccccctgggcagccccagacccagagacgccagaagcttcacccccggcagaagaaacaccgcccccagccccggccccagcgtgatcagaagaggcagaagacagagcgagcccgtgaaggacccctacgtgatgttcccccagaacgccaagcccggcttcaagcacgccggcagcgagggcgagctgtacccccccgagagccagccccccgtgagcggcagcgccccccccgaggacctggaggacgccggcccccccaccctggaccccagcggcaccagcatcaccgaggagatcctggagctgctgaaccagagaggcctgagagaccccggccccagcacccacgacatccccaagttccccggcgacagccaggtgcccggcgacagcgagaccctgaccttccaggccctgcccagcagagacagcagcgaggaggaggaggaggaggaggagggcctggagatggacgagagaggccccagccccctgcacgtgctggagggcctggagagcagcatcgccgccgagatgcccagcatcccctgcctgaccaagatccccgacgtgcccaacctgcccgagatccccagcagatgcgagatccccgagggcagcagactgcccagcctgagcgacatcagcgacgtgttcgagatgccctgcctgcccgccatccccagcgtgcccaacacccccagcctgagcagcacccccaccctgagctgcgacagctggctgcagggccccctgcaggagcccgccgaggcccccgccaccagaagagagctgttcagcggcagcaaccccggcaagctgggcgagccccccagcggcggcaaggccggccccgaggaggacgaggagggcgtgagcttcaccgacttccagccccaggacgtgacccagcaccagggcttccccgacgagctggccttcagaagctgcagcgagatcagaagcgcctggcaggccctggagcagggccagctggccagacccggcttccccgagcccctgctgatcctggaggacagcgacctgggcggcgacagcggcagcggcaaggccggcgcccccagcagcgagagaaccgccagcagagtgagagagctggccagactgtacagcgagagaatccagcagatgcagagagccgagaccagagccagcgccaacgcccccagaagaagacccagagtgctggcccagccccagcccagcccctgcctgccccaggagcaggccgagcccggcctgctgcccgccttcggccacgtgctggtgtgcgagctggccttccccctgacctgcgcccaggagagcgtgcccctgggccccgccgtgtgggtgcaggccgccatccccctgagcaagcagggcggcagccccgacggccagggcctgcacgtgagcaacctgcccaagcaggacctgcccggcatccacgtgagcgccgccaccctgctgcccgagcagggcggcagcagacacgtgcaggcccccgccgccacccccctgcccaagcaggagggccccctgcacctgcaggtgcccgccctgaccaccttcagcgaccagggccaccccgagatccaggtgcccgccaccacccccctgcccgagcacagaagccacatggtgatccccgcccccagcaccgccttctgccccgagcagggccactgcgccgacatccacgtgcccaccacccccgccctgcccaaggagatctgcagcgacttcaccgtgagcgtgaccacccccgtgcccaagcaggagggccacctggacagcgagagccccaccaacatccccctgaccaagcagggcggcagcagagacgtgcagggccccgaccccgtgtgcagccagcccatccagcccctgagctggcacggcagcagcctggacccccagggccccggcgacaccctgccccccctgccctgccacctgcccgacctgcagatccccggcaccagccccctgcccgcccacggcagccacctggaccacagaatccccgccaacgcccccctgagcctgagccaggagctgcccgacacccaggtgcccgccaccacccccctgcccctgccccaggtgctgaccgacatctgggtgcaggccctgcccaccagccccaagcagggcagcctgcccgacatccagggccccgccgccgccccccccctgcccgagcccagcctgaccgacacccaggtgcagaagctgacccccagcctggagcagaagagcctgatcgacgcccacgtgcccgccgccacccccctgcccgagagaggcggcagcctggacatccagggcctgagccccacccccgtgcagaccaccatggtgctgagcaagcccggcggcagcctggccagccacgtggccagaaacctgtgggccttcaccggccccagaggcctgctgatgccccccagcacctgcgagcccggccacgaggccagcctgaagcagggcttccagcccgacgccatcgacccccagaacctgacctggaagagcagacactag

SEQ ID NO: 295189 - DNA, 3714 bp, Artificial Sequence
  derived and/or modified sequence
atgccggagggggcacaaggcctgagtcttagcaaaccaagtccatctctcggatgtggaagaagaggtgaggtttgcgattgcggtaccgtgtgtgaaaccagaactgggagcgccagacctagccggttagaaagggtggcgagggagatagtagaaactgagagagcttatgtgagggatcttcggtccatcgtcgaagactacctgggtccactgctggatgggggcgtcctcggcctcagcgtcgaacaagttggcacgctcttcgccaatatagaagacatttatgaatttagtagtgaactgttagaggatctggagaactcatcatcagctggtggcattgctgaatgctttgtgcagagaagtgaggattttgatatatacaccttgtattgtatgaattacccatctagcctggcgttgttgcgagagctaagtctgtcccccccagcagcattgtggcttcaggaacggcaggcccagttgaggcacagtctaccgttgcaatcttttctgctgaagcctgtccagcggattctgaaataccaccttcttcttcaggaactaggaaaacattgggcagaggggcccggaaccggaggacgcgaaatggtggaagaggccattgtgtcgatgactgctgtcgcttggtatatcaacgatatgaaacggaagcaagaacacgcggcccggcttcaggaggtgcagcggaggttgggcggctggacgggcccagaactgagcgccttcggggaactggtgctggagggcgcttttagaggtgggggtgggggagggcccaggcttcgtggcggggagagactgctgtttctgttctctcgaatgctccttgtggctaaacggaggggcttggaatacacatataaaggacacatattttgctgcaatctgagcgtctctgagtccccgagagacccactgggattcaaggtctcagatctgaccatccctaagcacaggcatctgctccaggccaagaatcaggaggagaaacgcttgtggatacattgccttcagagactgttttttgaaaaccacccagcctccatccccgccaaagcaaagcaggtgctgctcgaaaatagccttcactgtgctccaaaaagcaaaccagtcctggaaccactgaccccacctctgggcagtcctcggccgcgggacgccagatcatttactcccggacgccggaacacggcccccagccccggcccatcagtgatacgtcggggcaggagacagtccgaacctgtgaaggacccctatgtgatgttcccacaaaatgcaaagcctggcttcaaacatgccgggtctgagggcgaattatacccgcctgaatctcaacctcctgtatcaggtagtgccccaccagaggacttagaggatgccggaccccccacactggacccttctggtacctctatcacagaagagatcctcgaactgctgaaccagcgtggtttgagggacccaggtccaagcactcacgatatccctaaattcccaggagacagccaggtgccgggcgactctgagaccttgacgtttcaggcgctgccaagcagggattcatccgaggaagaggaggaggaggaagaggggctggaaatggatgagagaggtccatctccgctgcatgtcttggagggcctggagtcatcaatcgctgccgagatgccctctatcccctgcttgaccaagattcccgacgtgccaaatttgcctgagattccttctcgctgtgagatccctgaaggctcacgactaccatccttgtctgatatcagcgatgttttcgaaatgccttgcttaccagctattccaagcgttcctaatactccttcactctcatctacgcctacacttagttgcgacagttggctccagggccccctccaggaacctgcggaagcacccgctacccggcgggaacttttcagtggatccaatcctgggaaactcggggagccgccctcaggcggaaaagccggccctgaggaagatgaagagggtgtgtccttcacggactttcagccacaagacgtcacgcagcaccagggctttcccgatgagctggcgtttcggagctgctccgaaatccgctctgcttggcaagcacttgagcagggccagctggcgcgtccaggctttccagaacccctattaattcttgaagacagtgatcttggcggagactccgggagcggcaaggccggcgctccttcaagcgagcgtactgcttcccgggtgagggagctcgcaagactgtattctgagaggatccaacagatgcagcgagcagagacccgggcaagtgctaacgctccacgcaggcgtcctagggtcctcgcacagccacagccttccccttgtcttcctcaggaacaggctgagccgggcctactccctgcatttggtcacgtgttagtgtgcgaactggcgttccctttaacatgtgctcaggaatccgttccattgggtccagccgtctgggtgcaggcagcaatccccttatccaagcaaggcgggagtccagatggacaggggctccatgtgtcaaacctccctaagcaggacctgccaggtattcatgtatcagccgcgaccttgttaccagagcagggaggctctcgccatgtacaagcacccgccgccactccgttgcccaagcaggaagggccactgcacttacaggtgcctgctttgactacattcagcgatcaggggcacccagaaatacaggtcccagcgactactccactccccgagcatcggagccacatggtgattcctgcaccctctacagcattctgccccgagcagggacactgtgctgacatacatgttccgaccactcctgccctcccaaaggaaatttgcagcgacttcactgtttctgtgactaccccggttcctaagcaagaagggcacctggattctgagtcacccactaatattccacttactaaacagggaggctccagagatgtacagggccccgaccctgtctgcagccaaccgattcagcccctgagctggcacgggtcttcactcgacccccagggcccgggggataccctgcctcctttgccctgccacctgccggacctgcagattccagggacttctcctctgccggcccatggcagtcaccttgatcatcggattccggctaatgctcccttgtcgttgtcacaggaactgcctgatacgcaggtgccagccactacccctctccctttgccccaggtcttgactgatatttgggtccaggccctccccactagcccgaagcagggaagcctgcccgacatccagggtcctgccgccgccccaccactccctgagcccagtttgacagacacccaggttcagaaactcacaccctctctggagcagaaaagtctgatagacgcccacgtccccgccgcaacgcctctgccagagagggggggctctttggacatccaaggactgtctcccacgcctgtgcagacaacgatggtgttgtccaaaccaggtggctcgctggcctctcacgtggcccgcaatttatgggcttttaccgggcctcgaggattgctgatgcccccttctacgtgtgagcccgggcatgaagcctctctaaagcagggtttccagccagacgccatcgacccccaaaacctgacatggaagtcacgccactag

SEQ ID NO: 295190 - DNA, 3714 bp, Artificial Sequence
  derived and/or modified sequence
atgcctgagggcgcccagggcctgagcctgagcaagcccagccccagcctgggctgcggcagaagaggagaggtgtgtgactgtggcaccgtgtgtgagaccaggacaggcagcgcccggcccagccggctggagcgggtggcccgggagatcgtggagacagagcgggcctacgtgcgggacctgcggagcatcgtggaggactacctgggccccctgctggatggaggagtgctgggcctgtctgtggagcaggtgggcaccctgtttgccaacatcgaggacatctatgagttcagcagcgagctgctggaggacctggagaacagcagcagcgctgggggcattgctgagtgctttgtgcagaggagtgaagattttgacatctacaccctgtactgcatgaactaccccagcagcctggccctgctgcgggagctgagcctgagccccccagctgccctgtggctgcaggagcggcaggcccagctgcggcacagcctgcccctgcagagcttcctgctgaagcctgtgcagaggatcctgaagtaccacctgctgctgcaggagctgggcaagcactgggccgagggccctggcactggaggccgggagatggtggaggaggccatcgtgtccatgacagctgtggcctggtacatcaatgacatgaagaggaagcaggagcacgccgcccggctgcaggaggtgcagaggcggctgggcggctggacaggccctgagctgagcgccttcggggagctggtgctggagggcgccttccggggcggcggcggcggcggcccccggctgcggggcggggagcggctgctcttcctgttcagcaggatgctgctggtggccaagaggcggggcctggagtacacctacaagggccacatcttctgctgcaacctgtctgtgtctgagagcccccgggaccccctgggcttcaaggtgtctgacctgaccatccccaagcaccgccacctgctgcaggccaagaaccaggaggagaagaggctgtggatccactgcctgcagaggctcttctttgagaaccacccagccagcatcccagccaaggccaagcaggtgctgctggagaacagcctgcactgtgcccccaagagcaagcctgtgctggagcccctgaccccacccctgggcagcccccggcccagagatgcccgctccttcaccccaggaagaagaaacacagcccccagccctggccccagcgtcatcagaagaggccggcggcagagcgagcctgtgaaggacccctacgtgatgttcccccagaatgccaagccaggcttcaagcacgccggcagcgagggggagctgtacccacctgagagccagccccctgtgtctggcagcgcccctcctgaggacctggaggatgctggcccccccaccctggaccccagcggcaccagcatcacagaggagatcctggagctgctgaaccagaggggcctgcgggaccccggccccagcacccatgacatccccaagtttcctggggacagccaggtgcctggggacagcgagaccctgaccttccaggccctgcccagccgggacagcagcgaggaggaggaggaggaggaggagggcctggagatggatgagcggggccccagccccctgcacgtgctggagggcctggagagcagcattgctgctgagatgcccagcatcccctgcctgaccaagatcccagatgtgcccaacctgcctgagatccccagccgctgtgagatccctgagggcagccggctgcccagcctgagtgacatcagtgatgtgtttgagatgccctgcctgcctgccatccccagcgtgcccaacacccccagcctgagcagcacccccaccctgagctgtgacagctggctgcagggccccctgcaggagcctgctgaggccccagccacccggcgggagctgttcagcggcagcaaccctgggaagctgggggagcccccatctgggggcaaggccggcccagaagaagatgaggagggcgtgtccttcacagacttccagccccaggatgtgacccagcaccagggcttcccagatgagctggccttccgcagctgcagcgagatccgcagcgcctggcaggccctggagcagggccagctggcccggcccggcttccctgagcccctgctgatcctggaggacagcgacctgggcggggacagcggcagcggcaaggccggggcccccagcagcgagaggacagccagccgggtgcgggagctggcccggctgtacagcgagcgcatccagcagatgcagagagctgagacccgggccagcgccaatgccccccggcggcggccccgggtgctggcccagccccagcccagcccctgcctgccccaggagcaggccgagcccggcctgctgcctgcctttggacatgtgctggtgtgtgagctggccttccccctgacctgtgcccaggagagcgtgcccctgggccctgctgtgtgggtgcaggccgccatccccctgagcaagcagggcggcagcccagatggccagggcctgcacgtgagcaacctgcccaagcaggacctgcccggcatccacgtgtctgctgccaccctgctgcctgagcagggcggcagcagacatgtgcaggccccagctgccacccccctgcccaagcaggagggccccctgcacctgcaggtgcctgccctgaccaccttcagtgaccagggccaccctgagatccaggtgcctgccaccacccccctgcctgagcacaggagccacatggtgatcccagcccccagcacagccttctgcccagagcagggccactgtgccgacatccacgtgcccaccaccccagccctgcccaaggagatctgcagcgacttcaccgtgtctgtgaccacccctgtgcccaagcaggagggccacctggacagcgagagccccaccaacatccccctgaccaagcagggcggcagcagagatgtgcagggccctgaccctgtgtgcagccagcccatccagcccctgtcctggcacggcagcagcctggacccccagggccctggggacaccctgccccccctgccctgccacctgcctgacctgcagatccctggcaccagccccctgcctgcccacggcagccacctggaccaccgcatcccagccaatgcccccctgagcctgagccaggagctgcctgacacccaggtgcctgccaccacccccctgcccctgccccaggtgctgacagacatctgggtgcaggccctgcccaccagccccaagcagggcagcctgcctgacatccagggccctgctgctgccccacccctgcctgagcccagcctgacagacacccaggtgcagaagctgacccccagcctggagcagaagagcctgattgatgcccacgtgcctgctgccacccccctgcctgagcggggcggcagcctggacatccagggcctgagccccacccctgtgcagaccaccatggtgctgagcaagccaggcggcagcctggccagccacgtggccaggaacctgtgggccttcaccggcccccggggcctgctgatgccacccagcacctgtgagcccggccacgaggccagcctgaagcagggcttccagccagatgccatcgacccccagaacctgacctggaagagccgccactag

SEQ ID NO: 295191 - DNA, 3714 bp, Artificial Sequence
  derived and/or modified sequence
atgcccgagggcgcccagggcctgagcctgagcaagcccagccccagcctgggctgcgggcgtcgcggggaagtctgcgactgtggcactgtctgcgagacccggaccggctctgcccgcccctccagactagagcgcgttgcccgggagatcgtggaaaccgagagggcatacgtgagggacctgagatctatcgtcgaggactacctcggcccactgctggacggaggagtattgggcctgagcgttgaacaggtgggcaccctgttcgcgaacatagaggatatttatgagttctcctccgagctcttggaggacctggagaacagttcgtcagccggaggcatcgcagaatgcttcgtacagcgatcagaagactttgacatctacacactgtattgcatgaactaccctagctccctcgccctgcttcgcgaactctccctctcaccacctgccgctctgtggcttcaagaacgccaggcacaactgcgccattctctccctttgcagagctttctgctgaagcccgtacaaaggattctgaagtaccacctgctgctgcaggagcttggtaaacactgggccgaggggccaggcactggtggccgggaaatggtcgaggaagccattgtgagtatgaccgccgtggcatggtacatcaacgacatgaaacgtaagcaggagcatgcagcacgactgcaggaagtccagcgtaggctggggggatggactgggcctgagttaagtgcgtttggcgagctcgtcctggagggagctttccggggcggcgggggaggaggacccaggctgcgtgggggagagagacttttgttcctattttcacgtatgctgttagtggcaaagcggcgcggactcgaatacacctacaaggggcacattttctgttgtaacctcagcgtatcagaatcccccagggaccccctggggttcaaggttagcgacctgaccatacccaagcacagacacttactgcaggctaagaatcaagaggagaagcgtctctggatccattgcctgcagcggctgttttttgagaaccatcctgcctctattcccgcgaaagcaaaacaagtgttgctggagaacagcttgcattgtgctcctaagagtaagcctgttttagagccactcacacctcccctcggctctccacgtccacgcgatgctcgaagcttcacaccaggaaggcgaaatactgctccatctcccggtccttccgtcatccgtagaggtagacgccagtccgaaccagtaaaggacccttacgtgatgtttccacagaacgctaagccgggttttaaacatgcgggcagtgaaggcgagctctatccaccagagagccagccccccgtgagcggctccgcccctccagaagacctcgaggacgccgggccccctaccctcgacccgtctggcactagtataactgaggaaatcctcgagctgctcaatcagaggggcctcagggatcctggcccaagcacccacgacatacccaaatttccaggcgactctcaggtcccgggagatagcgaaacgctgacatttcaggcgctcccgagtagggattctagcgaagaggaggaggaggaggaggagggcctcgagatggacgaacggggaccatcacccctgcacgtcctagaagggctggagagtagcattgctgctgagatgccgtccataccatgcctgaccaagattccggatgtccccaatctcccagaaatacctagtcgctgcgagatccctgaaggttcccgcctgccatcactgagcgacattagcgacgtctttgaaatgccatgcctgccggccatcccaagcgtgcctaataccccatccctgtcatccacaccaactctctcatgtgattcttggttgcaggggccgcttcaggagccggctgaggcccccgctacccggagagagctcttttctggctctaaccccggcaagctgggggaacctcccagtggagggaaagcgggccccgaagaggatgaggaaggcgtctcttttacggactttcagccccaagatgtcactcaacatcagggctttcctgacgaattggcatttcgctcttgctctgagatccggtcggcctggcaagctttagagcagggacaactagctagaccaggctttccagagcctcttttgatcctggaggactccgacctgggtggcgatagcggaagtggcaaggcaggcgccccgtcaagtgaacgtacagcttctagagtgagggaactggctagactgtactccgagaggattcagcaaatgcagcgcgctgagacaagagccagcgcgaatgctccacggaggcgccccagggttctggcccagcctcagccatccccttgtctgcctcaggaacaagctgagcctgggcttctgccagcgttcgggcacgtgctggtttgtgaactggccttccctctgacctgtgcccaggaatctgtgcctcttgggccagctgtgtgggtgcaagcagctatcccccttagcaagcaaggtgggtcgcccgatggccagggactacatgtttccaatctccccaagcaagatcttcctggtatccatgtctcagcggccaccctcctgccagagcagggcggtagccgccacgtgcaggccccggcagctacccctctcccaaagcaggaggggcctctgcacctccaggtccccgcccttaccacattctcagaccagggccatccggagatccaggtacccgcaaccacaccccttcctgagcatcggtcccacatggtgattcccgccccctccactgcattctgccccgaacaggggcactgtgctgacatccacgttcctactactccagctctgccaaaggagatatgcagtgatttcacagtttccgtcacgacccctgtcccaaaacaggaaggccaccttgatagcgaatccccaactaacatccctctcacgaagcagggaggaagtcgggacgttcagggacccgatcctgtgtgctctcagccaattcaacccctgtcgtggcatgggtccagtttggacccacaagggcctggagacaccttaccaccgctgccttgccatctcccagacttgcagatacctggaacatccccactgcccgcccatggctcccatttagatcatagaatcccagccaacgcccctctctctctgagccaggagctccccgacactcaagtgcccgcgactaccccgttgcccctcccacaggtgctgaccgatatctgggtgcaggcactgcctacctcgccgaagcagggcagtctccccgatattcagggaccagccgcagcgccccccctccccgaacccagtcttaccgacacacaggtccagaagctaaccccaagtctggaacagaagtcactgattgatgcacatgtccctgctgccactcccctaccagagcgcggcggaagcctggacatccaggggctaagtcccacgcccgtgcagacaaccatggtcttgagcaaaccaggcggttctctcgcttcccacgttgcgcgcaatctgtgggcttttaccggcccgcgtgggctcctcatgccacccagcacatgtgagcccggtcacgaggcaagcctgaaacaaggctttcagccagacgcaatcgacccacagaaccttacatggaagtcaaggcactag

SEQ ID NO: 295192 - DNA, 3714 bp, Artificial Sequence
  derived and/or modified sequence
atgcccgaaggcgcacagggcctgtctttgtccaagccaagtccctccctgggatgtggaagacggggtgaagtctgcgactgcggtacagtttgcgagacaaggactggcagtgctagacccagcaggctggagagggttgcccgtgagatcgtggagaccgagcgagcctacgtgagggacttaagatctatcgtggaagactacctgggccctctgctggacggaggggtgctgggattatctgttgaacaagtcggtacactgtttgctaatatagaggatatatacgagttcagttcagagttgctggaggaccttgagaactctagctccgcagggggaatcgctgaatgtttcgtgcagcgatcagaggactttgatatctacacactgtactgcatgaactacccaagctcactggccttgctgagggaattgagtctgtcccctcccgctgccctttggttgcaggaacgccaggcgcagctaaggcatagcctgccccttcagtcttttttgctcaagccggtccagcggatcctgaagtaccatctcctgttgcaggagctagggaagcactgggctgaaggcccaggtacagggggaagggagatggtggaagaggcaattgtctcaatgacagcagtggcctggtatatcaacgacatgaagcgaaaacaggaacacgctgctcgcctgcaggaagtccagagacggttaggtggctggactgggcctgaactatcagcctttggggaactggtgctggaaggcgcttttaggggaggcggaggaggaggacctagacttcgaggcggtgagaggctgcttttcctattctctagaatgctgctagtggctaaacgccgagggctggaatatacctacaagggtcacattttttgctgcaatctgtctgtgtctgaaagtccaagggatccgctgggctttaaggtaagcgacctaaccataccaaaacatcggcatttactgcaagccaaaaatcaggaggagaagagactgtggatccactgcctgcaacgcctattcttcgaaaatcatccagccagcatccctgctaaggcaaagcaagtcttgttagaaaactccctgcactgcgcacctaaatccaaacccgtgcttgagccactgacacccccactgggctctccaagaccccgagacgcccgttcctttacacctggcaggcggaatacagccccaagccctggcccttcagtgattaggagaggcaggagacaaagcgagccagtgaaggatccctatgtcatgtttccgcaaaatgctaaacctggcttcaagcatgctggatccgaaggagaactgtatccccctgagtcccagccgccagtgtcaggctcagccccacccgaggacctagaggacgccggtccaccgaccctcgacccatccggcacttcaatcacggaggagatcctagaactccttaatcagagaggcctccgggaccctggcccaagcacgcacgacatacccaaattccccggagattctcaggtaccaggagatagtgaaaccttgacctttcaggccctgccgagtagggacagttcggaggaggaagaggaagaggaagaggggctggagatggatgaacgcggaccttcacctctccacgtactcgaaggcttagagtccagcatcgcagccgagatgccatctatcccctgcctgacaaaaattcccgacgtgcctaatctccctgagatccccagtcggtgcgagatccccgaaggaagccgactcccaagtctgtctgacatatcagatgtgtttgaaatgccctgcctgcctgccattccttccgttcctaatactccttctctatcgtcaactccaacactctcctgcgatagttggcttcagggaccactgcaggaacctgcagaggcccctgccacccgtcgcgaactgtttagtggtagcaatcccggtaagctgggagaacccccaagtgggggtaaagcagggccagaggaggatgaggaaggagtcagcttcaccgattttcagccacaggatgtgacccagcaccagggtttccccgacgagctcgcgttccgctcttgcagcgagatcagatctgcctggcaggcactggaacagggccaactcgcgaggcccggatttcccgaaccgctcctcatcctggaggattccgaccttggcggagactcaggaagtggcaaggctggtgcaccctcttccgaacgcaccgcctcaagggtgcgtgagttggcgaggctgtattccgaaagaatccagcaaatgcaacgggctgaaacacgcgctagcgcaaatgctccccgacggagacccagggtcttggcacagccccagccatcaccatgcttgccccaggagcaagctgagccaggactcttacctgcctttggccacgtgctggtctgcgagttggcattccctctgacttgtgcccaggagtcagtacccctcgggccagcagtatgggtgcaggccgctatccctctgagcaagcaaggcggatcacccgacggacagggccttcatgtgtctaacctaccgaagcaggacctacccggaatacacgtctcggccgcaacactgcttccagagcaaggagggtctagacatgtgcaggctcctgccgcaactccactacccaagcaggagggtcctttacacctgcaggttcccgcactgaccaccttttctgatcagggtcaccctgagattcaggttcctgccactacccctcttcccgagcatcgcagccacatggtgattcctgccccaagcactgccttttgccctgagcagggccactgtgctgatattcatgttccaaccacacccgcactgcccaaagaaatttgctctgatttcactgtctctgtgactacccccgttcccaagcaagagggtcacttggatagcgagtctccaaccaatatcccgcttactaagcaaggagggtctagagacgtgcagggcccagacccagtgtgctcccaacctatacagcctctgtcttggcatggttcatctctcgatccacagggtcccggagacactttgccccctctgccttgtcacctcccagacctgcagattcctggtactagcccgctgcctgcacatggaagccacttggatcatcgaatcccagccaatgctcctctctcactctctcaggagctgccagatacacaggtcccagccacaacaccccttcctctgcctcaagtgttgaccgacatttgggtccaggcactgcccacttctccaaaacagggaagccttcctgacatccagggcccagcagctgccccaccgcttccagaacctagcctgacagatacccaggtgcaaaagctgactccgtccctcgagcagaaatccctgattgatgcccatgtcccggcagccactcctctgccagagaggggtggctctctggatatccaagggttgagccctacgcctgttcagacgaccatggttctgtcaaaaccagggggttcactcgcatcccatgtggctcgtaatctatgggctttcacagggcctagaggcctgctaatgccaccttcaacttgtgagcctggccatgaggcgtctcttaagcaggggttccagcccgatgccatcgatccacagaacctgacttggaagagcaggcattag

SEQ ID NO: 295193 - DNA, 3898 bp, Artificial Sequence
  derived and/or modified sequence
gaagttcacgcccctgagtctgggctccgcacctccctggggaccgcgtcggggtcgcgcaggagccgggctgcctcgagccggggctggaggctccccgggaggactctgctgggccgctcagccatgcctgagggagcccaaggactgagcctctccaaacctagcccaagcctcgggtgtggccgaagaggtgaagtgtgtgactgtggcaccgtgtgtgagactcggacaggttcagccagaccctcaaggctggagcgtgtggcccgggagatcgtggagacagaacgggcctatgtcagggacctccgcagcatcgtggaggactacctgggccctctgctggacggcggggtcctggggctgagcgtggagcaggtgggcacgctgtttgccaacattgaggacatctacgagttcagcagcgagctcctggaggacttggagaacagcagcagcgccgggggtattgccgagtgcttcgtgcagaggagcgaggattttgacatctacacattgtactgcatgaactacccgagctccctggccctgctccgggagctgtcgttgtctccgccagcagccctgtggctgcaggagcgccaggcccagcttcgccactcgctgcccctgcagagcttcctgctgaaacctgtccagcgcattctcaagtaccatctgctgctgcaggaactagggaagcactgggcggagggcccaggcactgggggtcgcgagatggtggaggaagctattgtgtccatgacagcggttgcctggtacatcaacgacatgaagcgcaagcaggagcatgcagcgcgcctccaggaagtgcagcggcggctgggtggctggaccggaccagagctcagtgcttttggggaactggtgttggagggcgcgttccgaggaggcggagggggtggcccccggctacgagggggtgagcggctgctcttcctgttctctcggatgctgctggtggccaagcgcagggggctggagtacacctacaaaggccacatcttctgctgcaacctgagcgtgagcgagagtccccgagaccctctagggttcaaggtgtctgatctgaccattcccaagcacagacacctgctccaggccaagaaccaagaagagaagaggctgtggattcactgtctccagcgcctcttctttgagaaccaccctgcctccatccctgccaaggcaaagcaagttctccttgaaaacagcctgcattgtgcccccaaaagtaagcctgtcctagagcccctgacacccccacttgggtctcctcgacctcgagatgctagaagttttacccctgggcgaaggaacacagctccatctcctgggccctctgtgattcgccgaggccgcaggcagtctgagccggtgaaggacccttatgtcatgttcccacagaacgctaagcctggattcaagcacgctggcagcgaaggggaactctaccctccagaatctcagccaccagtttcaggctctgcaccccctgaggacctggaggatgctggacccccaacactggacccctctgggacctcaatcactgaagaaatcctggaactgctgaatcagcgaggccttcgagatccagggccgtccacccatgacattcccaagttccccggagactcccaggtgcctggcgacagcgaaaccctcacattccaagccctgcccagccgggactcttcagaagaggaggaggaggaagaggaagggctggagatggatgaacgggggccttccccactccacgtcctggaagggctcgaaagttccattgcagctgaaatgcccagcattccctgccttaccaaaattcctgacgtgcccaaccttcctgaaattcccagccgctgtgaaattcccgaaggttctcgccttcctagtctctctgacatttccgatgtttttgagatgccctgccttccagccatacctagtgtccccaacacccccagtctgtctagcactcccaccctctcctgtgactcctggctccaagggcctctgcaggaaccagctgaggctccagccaccaggagagaactgttttctgggagcaatcctgggaaactgggagagccgccttcaggaggcaaggcagggccagaggaggatgaagaaggggtatcattcacagacttccagccccaggatgtcacccaacatcagggattcccagatgagctggcattccgctcttgctcagaaatccggagcgcctggcaggcattggaacagggacagctggcccggccaggcttcccagagccactgctgatcctggaggattcggatctgggtggagacagcgggagcgggaaggcaggagccccgagttcagaaaggacggcgtcccgagtgcgagagctggcccggctttacagcgagcggatccagcagatgcagcgggcggagactcgggcatcagccaatgccccgcgccgccggcctcgggttctggcccaaccccagccatccccctgtctgccccaggagcaggcagagccagggctcctgcctgcctttggacacgtgctggtatgtgagctggccttcccactgacatgtgcccaggagtctgtccccctgggtcctgctgtctgggttcaagctgccatacctttgtcaaagcagggaggcagcccggatggccagggtctacatgtttccaatttgcctaagcaagaccttccgggcatccacgtttcagctgctacccttttgcctgagcaaggaggttcccggcatgtccaggctccagccgccacacctttgcccaagcaagaaggccccctgcacctccaggtgccggctcttacaactttctctgatcaaggccacccagaaatccaagttccagccaccactcctttgcctgagcatagaagtcacatggttataccagctccatccaccgccttttgtcctgagcagggacactgtgcggacatccacgttcccaccactccagctttgcccaaggagatttgttctgatttcacagtttcagtcaccacccctgtgcccaagcaagaaggtcacctagacagcgagagcccaaccaatatcccactgacaaagcaaggaggttccagggatgttcagggcccagaccctgtctgcagtcaacccatccagcctttgtcttggcatggaagcagcctggatccccagggcccaggcgacaccctaccacccttgccatgtcacctcccagaccttcagattccaggtacctcacctttgcctgcacatggaagccacctggaccatcggatcccagccaacgccccactgtctttgtcccaggagctcccagacactcaggttccagctaccacacctttgcccctgccacaagtcctcacagacatctgggtccaagccctcccaacttcacccaagcagggaagcctcccagacatccagggtccagcggctgcacctccacttccggagccaagccttacagatacacaggtccaaaaactcacaccttcgttggagcagaagagcctcatagatgcccatgttccagctgccacacctttacctgagagaggaggctctctagacattcagggcctctcacccaccccagttcagaccaccatggttttgtccaaaccaggaggctccttagcctctcacgttgccaggaatctatgggccttcacagggcccagggggctcctgatgcccccttccacatgtgagccaggacatgaggcttccctgaagcaaggatttcagccagatgccatagaccctcagaacttgacctggaagtccagacactgaacgcaggcctcaaaactgctgcggccttccaactcctggtatctgcatcggcgaatgg

SEQ ID NO: 295194 - DNA, 582 bp, Artificial Sequence
  derived and/or modified sequence
atgaacatctttatgaccttcgtgatcaatgttttgcgcaagaaccttttccatggattcatggtgatcacccaggcaccggttaggattctcccatcccaggaaaggattcgcaccccctgccactcccccgcaattctgttgtccagttgccgcgtcttgagcggtaacaattgtatcatggcagcgcttaccagtgtgattaagcggaatcttttgttcttccgtctggacctgttcccactgtggttaatcttcttatacatcgtaaagatgggggatttcccatctgcaccaactcacctgaacaccgcagccatatgtacttgcctgctgcccatacctctcggaacccacagtgatctcttatctgtgtcatgcagctggttccatctgttcgaaaagggcccacctctctcctataagcacctcgtgagacaagtgcatccgctcatgaacgccgatacagctgcaggagggtttgtctatacatgtaaagacaagctgagatctcttcttttcggcgaagtcaaagaggatggtaacgggtgctttatctgcatgtccctggaacagtgctag

SEQ ID NO: 295195 - DNA, 501 bp, Artificial Sequence
  derived and/or modified sequence
atgaacacctacaccagaagcgccagcttcacccccaagaccttcaccttccccctggcccagaacagaaccagccaccccaccaccaccagcaagctgaagtacctgggcagacccagccccagaagagacgccctgcaggccaacggcgagggccccgaggtgggccccggcaccgaggagcccgcccacagactgcccgtgggcagcggcagcgccggcgaggccgccgccagcctgggcaccgccagagtgagaagcggcagagccgagtgcaccgccaagctggccggcgacggccacgccagactggccagcgccttcctgcacagaagagccgccctgcccccccccctgggcacctgcagacccagactgggcgagggcggcagcgcccccgccctgggccccagccccagaagaggcagaagagtgagcgagggcctgagagacagcctgccccccctgggcagcctgaccctgggcaagagccccaagtag

SEQ ID NO: 295196 - DNA, 501 bp, Artificial Sequence
  derived and/or modified sequence
atgaatacatatacgcgaagtgcatcgtttactccaaagacctttactttccctctggcccaaaatcgtactagtcatccaactacaacctctaagttaaagtacctgggccgcccttcacctagacgagatgccttgcaggccaatggcgagggccccgaagtcggccccggcaccgaggagcctgcccaccggcttccggttggctccggaagtgctggagaggccgcagcctccctgggaacagcgcgggttcggtctggccgtgcagagtgcacggccaaattagcaggagatggacacgcgcgcttagccagcgctttcctgcatagaagagctgcattacctccacccctgggcacatgccggcctaggctgggagagggcggttccgctcccgcactgggccccagcccccgacggggcagaagagtgagtgagggtcttcgcgactccctaccccctcttggcagcctgaccctgggcaaaagtccgaagtag

SEQ ID NO: 295197 - DNA, 501 bp, Artificial Sequence
  derived and/or modified sequence
atgaacacctacacccggagcgccagcttcacccccaagaccttcacattcccacttgcacagaacaggacttctcaccccactaccacatctaagcttaaatatctgggtcggcccagtccgaggcgagatgctcttcaggcaaacggagagggacccgaggtggggcctggaacagaggaacccgcgcatcggctgcccgtcggatctggatcagccggggaggccgccgcaagtctaggaacagcaagggtacggagtggtagggccgagtgcaccgccaagctggctggggacggtcacgcccgtctggcctcagcgttcctgcacaggagggctgctctgccacctccccttggcacttgtcggcctcggctgggcgagggcgggtccgcccctgcactgggtccctcccccagacggggacgcagagtttccgaaggactgcgcgacagcctgccccccctcgggtcccttacgctgggcaagtctccaaagtag

SEQ ID NO: 295198 - protein, 192 aa, Artificial Sequence
  derived and/or modified sequence
MEKDLLELQTLIDVHFEQRKKEEEELVALKERIERRRSERAEQQRFRTEKERERQAKLAEEKMRKEEEEAKKRAEDDAKKKKVLSNMGAHFGGYLVKAEQKRGKRQTGREMKVRILSERKKPLDIDYMGEEQLREKAQELSDWIHQLESEKFDLMAKLKQQKYEINVLYNRISHAQKFRKGAGKGRVGGRWK

SEQ ID NO: 295199 - protein, 734 aa, Artificial Sequence
  derived and/or modified sequence
MRPAVLGSPDRAPPEDEGPVMVKLEDSEEEGEAALWDPGPEAARLRFRCFRYEEATGPQEALAQLRELCRQWLRPEVRSKEQMLELLVLEQFLGALPPEIQARVQGQRPGSPEEAAALVDGLRREPGGPRRWVTVQVQGQEVLSEKMEPSSFQPLPETEPPTPEPGPKTPPRTMQESPLGLQVKEESEVTEDSDFLESGPLAATQESVPTLLPEEAQRCGTVLDQIFPHSKTGPEGPSWREHPRALWHEEAGGIFSPGFALQLGSISAGPGSVSPHLHVPWDLGMAGLSGQIQSPSREGGFAHALLLPSDLRSEQDPTDEDPCRGVGPALITTRWRSPRGRSRGRPSTGGGVVRGGRCDVCGKVFSQRSNLLRHQKIHTGERPFVCSECGRSFSRSSHLLRHQLTHTEERPFVCGDCGQGFVRSARLEEHRRVHTGEQPFRCAECGQSFRQRSNLLQHQRIHGDPPGPGAKPPAPPGAPEPPGPFPCSECRESFARRAVLLEHQAVHTGDKSFGCVECGERFGRRSVLLQHRRVHSGERPFACAECGQSFRQRSNLTQHRRIHTGERPFACAECGKAFRQRPTLTQHLRVHTGEKPFACPECGQRFSQRLKLTRHQRTHTGEKPYHCGECGLGFTQVSRLTEHQRIHTGERPFACPECGQSFRQHANLTQHRRIHTGERPYACPECGKAFRQRPTLTQHLRTHRREKPFACQDCGRRFHQSTKLIQHQRVHSAE

SEQ ID NO: 295200 - DNA, 2205 bp, Artificial Sequence
  derived and/or modified sequence
atgagacccgccgtgctgggcagccccgacagagccccccccgaggacgagggccccgtgatggtgaagctggaggacagcgaggaggagggcgaggccgccctgtgggaccccggccccgaggccgccagactgagattcagatgcttcagatacgaggaggccaccggcccccaggaggccctggcccagctgagagagctgtgcagacagtggctgagacccgaggtgagaagcaaggagcagatgctggagctgctggtgctggagcagttcctgggcgccctgccccccgagatccaggccagagtgcagggccagagacccggcagccccgaggaggccgccgccctggtggacggcctgagaagagagcccggcggccccagaagatgggtgaccgtgcaggtgcagggccaggaggtgctgagcgagaagatggagcccagcagcttccagcccctgcccgagaccgagccccccacccccgagcccggccccaagaccccccccagaaccatgcaggagagccccctgggcctgcaggtgaaggaggagagcgaggtgaccgaggacagcgacttcctggagagcggccccctggccgccacccaggagagcgtgcccaccctgctgcccgaggaggcccagagatgcggcaccgtgctggaccagatcttcccccacagcaagaccggccccgagggccccagctggagagagcaccccagagccctgtggcacgaggaggccggcggcatcttcagccccggcttcgccctgcagctgggcagcatcagcgccggccccggcagcgtgagcccccacctgcacgtgccctgggacctgggcatggccggcctgagcggccagatccagagccccagcagagagggcggcttcgcccacgccctgctgctgcccagcgacctgagaagcgagcaggaccccaccgacgaggacccctgcagaggcgtgggccccgccctgatcaccaccagatggagaagccccagaggcagaagcagaggcagacccagcaccggcggcggcgtggtgagaggcggcagatgcgacgtgtgcggcaaggtgttcagccagagaagcaacctgctgagacaccagaagatccacaccggcgagagacccttcgtgtgcagcgagtgcggcagaagcttcagcagaagcagccacctgctgagacaccagctgacccacaccgaggagagacccttcgtgtgcggcgactgcggccagggcttcgtgagaagcgccagactggaggagcacagaagagtgcacaccggcgagcagcccttcagatgcgccgagtgcggccagagcttcagacagagaagcaacctgctgcagcaccagagaatccacggcgacccccccggccccggcgccaagccccccgccccccccggcgcccccgagccccccggccccttcccctgcagcgagtgcagagagagcttcgccagaagagccgtgctgctggagcaccaggccgtgcacaccggcgacaagagcttcggctgcgtggagtgcggcgagagattcggcagaagaagcgtgctgctgcagcacagaagagtgcacagcggcgagagacccttcgcctgcgccgagtgcggccagagcttcagacagagaagcaacctgacccagcacagaagaatccacaccggcgagagacccttcgcctgcgccgagtgcggcaaggccttcagacagagacccaccctgacccagcacctgagagtgcacaccggcgagaagcccttcgcctgccccgagtgcggccagagattcagccagagactgaagctgaccagacaccagagaacccacaccggcgagaagccctaccactgcggcgagtgcggcctgggcttcacccaggtgagcagactgaccgagcaccagagaatccacaccggcgagagacccttcgcctgccccgagtgcggccagagcttcagacagcacgccaacctgacccagcacagaagaatccacaccggcgagagaccctacgcctgccccgagtgcggcaaggccttcagacagagacccaccctgacccagcacctgagaacccacagaagagagaagcccttcgcctgccaggactgcggcagaagattccaccagagcaccaagctgatccagcaccagagagtgcacagcgccgagtag

SEQ ID NO: 295201 - DNA, 2205 bp, Artificial Sequence
  derived and/or modified sequence
atgagaccagcggtgttgggctctcccgatcgcgccccacccgaggacgaaggccccgttatggttaagttggaagattccgaagaggaaggagaggccgccctgtgggacccgggacctgaggcagctcgtctgcgctttcgctgcttccggtacgaagaggcgaccggaccccaggaggcattggcccagctgcgtgagctgtgccgacagtggctgagacccgaggtgcgttctaaggaacaaatgctggaactccttgtcctggaacagttcctgggtgccctgccccctgagatacaggctcgagtacagggtcaacggcctgggtcgccggaggaagccgccgcactcgtggacgggctacggagagagcccggcgggccaagacggtgggttacagtccaggtgcagggccaggaagtactcagcgaaaaaatggaacccagttcctttcagcccttgcctgagactgagccaccaacccccgagcctggtcccaagactccgccccgcactatgcaggaaagccctctggggctccaggttaaggaggagagcgaagttacagaagatagtgacttcctggagagcggaccattagctgccactcaagaatcagtgccaacactcctaccagaggaagcccagcgctgtgggaccgtgttggatcagatttttccccactccaagacaggacctgagggaccctcgtggagagaacaccccagggccctctggcacgaggaagcagggggaatctttagccctggttttgcactgcagctggggagcattagtgccggaccaggctccgtgagtccccacctgcacgtgccttgggatctgggaatggccggactaagcggtcagattcagtcccccagccgagaggggggatttgcgcacgccctgctgctccccagcgacttgagatctgagcaggatccgaccgacgaagacccatgccgcggagtgggccccgcactgattacaacacgatggagaagtcccagggggcgcagccggggccgcccgagtactggggggggagttgtccgcggtggcaggtgcgatgtatgcggcaaagtgttcagccagcgaagtaacttactcaggcaccagaaaattcatacaggcgagcgcccgttcgtttgtagcgagtgtggacgtagctttagtcggtcgtcacacctgctgcgacatcaactgacccataccgaagagcggcctttcgtgtgtggggactgtgggcaaggcttcgtgaggagcgctagactcgaggaacaccgccgcgtgcatactggcgagcaacccttccgctgcgccgaatgtgggcagtccttccgccaaagaagcaatctgctccaacaccagagaatccacggagatccacctgggcccggagcaaagcctcctgcgccgcctggagcccccgagccccccggtcccttcccatgttccgaatgtcgcgaatcctttgcccggcgggctgttttgcttgaacaccaagcagttcatactggggacaaaagcttcggatgcgtggagtgcggggaacgattcggccgcagatcagtccttctccagcaccggagggttcacagcggtgaacgacctttcgcatgtgctgaatgtggccaatcatttagacagcggtctaatcttactcagcacaggagaattcatacgggggagcggcctttcgcgtgcgcggagtgcggaaaggcgttccggcagcggcctactttaacacaacacttgagggtacatacgggcgagaagcccttcgcctgccctgagtgcggacaaagattttcccagcgactgaaactgacacgccaccagaggacgcacacaggggaaaagccatatcactgcggggaatgtggtctgggctttactcaggtcagcaggttgactgaacatcagcgcatacacacaggagaaagaccatttgcatgcccggaatgtgggcaaagcttccggcagcacgctaaccttacccagcatcgtaggatacatactggtgagagaccttatgcatgcccagagtgcggcaaggcattcaggcaacggcccacccttacacaacatctccgcactcacaggcgcgaaaagccattcgcctgccaagactgtgggaggagatttcaccaaagtacaaaattgattcaacatcagagggtccatagcgcagagtag

SEQ ID NO: 295202 - DNA, 2205 bp, Artificial Sequence
  derived and/or modified sequence
atgaggcctgctgtgctgggcagcccagaccgggcccccccagaagatgagggccctgtgatggtgaagctggaggacagcgaggaggagggggaggccgccctgtgggaccccggccctgaggccgcccggctgcgcttccgctgcttccgctatgaggaggccaccggcccccaggaggccctggcccagctgcgggagctgtgccggcagtggctgcggcctgaggtgcgcagcaaggagcagatgctggagctgctggtgctggagcagttcctgggcgccctgcccccagagatccaggcccgggtgcagggccagaggcctggcagccctgaggaggccgccgccctggtggatggcctgcggcgggagcccggcggcccccggcgctgggtgacagtgcaggtgcagggccaggaggtgctgtctgagaagatggagcccagcagcttccagcccctgcctgagacagagccccccaccccagagcccggccccaagaccccacccaggaccatgcaggagagccccctgggcctgcaggtgaaggaggagagcgaggtgacagaagattctgacttcctggagagcggccccctggccgccacccaggagagcgtgcccaccctgctgcctgaggaggcccagagatgtggcaccgtgctggaccagatcttcccccacagcaagacaggccctgagggccccagctggagggagcacccccgggccctgtggcatgaggaggccggcggcatcttcagccctggctttgccctgcagctgggcagcatctctgctggccctggctctgtgagcccccacctgcacgtgccctgggacctgggcatggccggcctgagcggccagatccagagccccagccgggagggcggctttgcccacgccctgctgctgcccagcgacctgcggtctgagcaggaccccacagatgaggacccctgccggggcgtgggccctgccctgatcaccacccgctggaggagcccccggggccgcagccggggccggcccagcactggaggaggagtggtgcggggcggccgctgtgatgtgtgtgggaaggtgttcagccagaggagcaacctgctgcggcaccagaagatccacactggagagcggccctttgtgtgcagtgaatgtggccgctccttcagccgcagcagccacctgctgcggcaccagctgacccacacagaggagcggccctttgtgtgtggggactgtggccagggctttgtgcgcagcgcccggctggaggagcacagaagagtgcacactggagagcagcccttccgctgtgccgagtgtggccagagcttccggcagaggagcaacctgctgcagcaccagaggatccacggggaccccccaggccctggggccaagcccccagcccctcctggggcccctgagcccccaggccccttcccctgcagtgaatgtcgggagagctttgcccggcgggctgtgctgctggagcaccaggccgtgcacactggagacaagagctttggctgtgtggagtgtggggagcgcttcggccgccgctctgtgctgctgcagcaccggcgggtgcacagcggggagcggccctttgcctgtgctgaatgtggccagagcttccggcagaggagcaacctgacccagcaccggcgcatccacactggagagcggccctttgcctgtgctgaatgtgggaaggccttccggcagaggcccaccctgacccagcacctgcgggtgcacactggagagaagccctttgcctgcccagaatgtggccagcgcttcagccagaggctgaagctgaccaggcaccagaggacccacactggagagaagccctaccactgtggagaatgtggcctgggcttcacccaggtgtcccggctgacagagcaccagaggatccacactggagagcggccctttgcctgcccagaatgtggccagagcttccggcagcacgccaacctgacccagcaccggcgcatccacactggagagcggccctatgcctgcccagaatgtgggaaggccttccggcagaggcccaccctgacccagcacctgcggacccaccggcgggagaagccctttgcctgccaggactgtggccgccgcttccaccagagcaccaagctgatccagcaccagagggtgcacagcgctgagtag

SEQ ID NO: 295203 - DNA, 2205 bp, Artificial Sequence
  derived and/or modified sequence
atgcggcccgccgtgctgggcagccccgaccgggccccccccgaggacgagggccctgtcatggtgaagttggaggattccgaggaggaaggtgaggccgccctgtgggatccaggtcctgaggctgctagactacgttttagatgcttccggtatgaggaagccacaggccctcaggaagctctggcccaactgagagagctttgtagacagtggctgagacctgaggttcgtagcaaggagcagatgctggagttgctggtgctcgaacagtttttgggcgccctcccgccagagatccaggctcgggttcagggccaacgacctgggagccccgaggaagcagccgctctcgtcgacggcctccggcgcgagcctggcggcccacgccggtgggtgacagtccaggtgcagggtcaggaggtcctgtccgaaaagatggagccctcctccttccaaccccttccggaaaccgaacctcctacaccagaacctggaccaaagacgcctccacggactatgcaagagtctcccctcggtctgcaagtgaaggaggaatcggaggtgaccgaggatagtgacttcctcgaaagtggcccattggcggccacacaggagtccgtgccaacgctccttcctgaagaggctcagagatgtggcaccgtgctcgatcagatctttcctcattctaaaaccggaccagagggaccaagttggcgcgagcatcctagggccctctggcatgaggaggcagggggcattttctcccccggctttgcactccagctggggtctatctccgctggccctggaagtgtatctccgcacctccacgtgccttgggacttgggtatggccggactctccgggcagatccaatccccatcacgggaaggtgggttcgcccacgcgttgcttctgccttccgatcttagaagcgaacaggaccccaccgatgaggatccatgccggggagtaggacctgccctgatcaccaccagatggcggagtcctaggggccgttcacgcggaagaccatcaactggagggggggtggtacggggtggtcggtgcgacgtctgtggaaaagtgttcagccagcggagcaatcttttgcgccaccagaagatccacaccggtgagcgacccttcgtgtgtagcgagtgcggacggtctttttctaggagtagtcatctgctgagacatcagttgacccataccgaagaacgcccattcgtgtgcggagattgcggacagggatttgttcggtctgccaggctagaggagcacaggagagtgcacacaggggaacaaccttttcgatgtgccgagtgcggacagtcattcaggcagcggagcaatctgctgcagcatcaacgcattcacggtgatccccccggcccaggagctaagccgcctgccccaccaggcgcacccgagccaccaggaccctttccctgttcagagtgtcgcgagtccttcgcccggagagccgtcctgttagaacaccaggctgttcatactggggacaagtcttttggctgcgtggaatgcggagaaagatttggtcgaagatcagtgttgctgcagcaccgccgggtgcattcaggcgagaggccttttgcctgcgcagagtgtggccaatcttttaggcagagatcaaacctgacacagcatcggaggattcacactggggaacggcccttcgcctgtgctgaatgcgggaaggcatttcggcagaggccaacactgacccaacaccttcgggtccacactggcgagaagcccttcgcttgcccagagtgcggacagcggttctctcagaggctgaagctcactaggcatcaacgaacccacaccggggagaaaccttatcactgcggcgagtgcgggctcggcttcacacaagtttctagattgacagagcaccagcggatacacactggcgagagacccttcgcctgtcccgagtgtggccagagtttccgacagcatgccaacttgacccagcataggaggatccataccggcgaacggccatatgcttgtcccgaatgcggcaaggcattccggcagcgccctaccctgacccagcacctgcgcactcacagacgagaaaaaccgtttgcgtgtcaggattgtggtaggaggtttcaccagtctactaagctcatacagcatcagagggtccattcggccgagtag

SEQ ID NO: 295204 - DNA, 2205 bp, Artificial Sequence
  derived and/or modified sequence
atgcgacccgcagtgctaggctcccccgatagagccccaccagaagatgaagggccagttatggtgaaactggaagattctgaagaggaaggggaggccgctctgtgggatccgggaccagaggcagcacgcctcagatttagatgtttcaggtacgaggaggcaactggacctcaagaagctcttgctcagctgcgagaactgtgtaggcagtggcttagacccgaggtacgaagtaaagaacagatgctggagctcctggtactggagcaatttcttggcgcattgccacctgagatacaggccagggtgcaaggccaaaggccgggttccccagaggaagcggctgctcttgtcgatggattgagacgcgaaccaggtggcccaaggcgttgggtcaccgtccaggttcaggggcaggaagttttgagtgagaaaatggagccttcttccttccagcctctgcccgagactgaaccacccacccccgagcctggccctaaaactccccctagaactatgcaggaaagccctcttggtctgcaggtgaaagaagaatcagaagttacagaagactcagattttctcgaaagtggtcctttagctgctacccaagaatcggttcctacgctgctgcccgaggaggcccagcggtgcggcacggtcctcgaccagatattcccgcactcaaagacagggccagaagggcctagctggcgcgagcatcctagagccctctggcacgaggaagcaggaggcatattttcaccaggttttgccctgcagttaggcagcatcagcgctggaccaggttccgtttccccccatttgcacgtgccttgggatctaggaatggctggccttagtggccagatccagtccccttcacgcgaggggggttttgctcacgctctcttgttgcccagcgacttgcgatcagaacaggatcctactgacgaggatccctgcagaggcgtgggtccggcattgattaccactaggtggagatccccaagaggcaggtcccgcggtagaccctctaccggtggaggcgtggtgaggggcggtcgctgtgacgtctgtgggaaagtcttttctcagcggtctaacttgttgagacaccagaaaatccatacaggcgaaagaccttttgtgtgttcagagtgcggcaggtcattttctcgatccagccatctgctcagacatcaactgacgcacaccgaagagcgtcccttcgtatgtggtgattgtggtcaggggttcgtacggtccgccaggttagaagaacatcgccgagtacatactggagagcagccctttagatgcgccgagtgtggacagagcttccggcagcgctccaacctcctgcagcaccagaggatacacggcgacccaccaggtccaggtgctaaaccacctgctcccccaggggcacctgaacctcccggaccttttccttgtagcgaatgtagagagagcttcgctcgaagggcagtgctcctcgagcatcaagccgtccacaccggagataagtccttcggatgtgtagagtgcggcgagcgttttggtcgacgctctgtcctcctccaacaccggagagtgcacagcggggagcggccattcgcctgcgctgagtgtggtcagtcatttcgacagcgctcaaatctcactcagcatcggagaattcacactggagagaggccgttcgcctgcgctgaatgcggcaaagcttttaggcagcggccaactttgacgcaacatctcagggtgcacaccggagaaaaaccattcgcctgtcccgagtgtggtcagagattcagtcagaggctcaaactgacacggcaccagagaactcataccggtgagaaaccataccactgcggggaatgtggccttggtttcacacaggtaagtcgattgacagaacatcagcgaatacacactggcgaacgtccattcgcgtgtcctgaatgtggtcaatctttccggcagcacgctaatctcacccaacaccgacgaatccatacaggcgaacgaccgtacgcatgccctgagtgcggtaaggccttccgccagaggcccaccttaactcaacacctgcggacacacaggcgcgagaaaccattcgcctgccaggattgcggtaggaggtttcaccagtcaactaaactgatccagcaccaaagagtgcacagcgcagaatag

SEQ ID NO: 295205 - DNA, 2205 bp, Artificial Sequence
  derived and/or modified sequence
atgaggccggccgtgctgggctcccctgacagggcaccacctgaggatgagggtcctgtgatggtgaagctggaggatagcgaggaggagggcgaggccgctttatgggacccgggtccagaggctgctcggcttcgttttagatgctttagatacgaggaagccaccgggccccaagaggcactcgcccagctccgggaattgtgccgacaatggcttcgccccgaggtccggtcgaaagagcagatgttggagctcttggtgctagagcaattccttggcgctctgcctccagagatccaggctagggtgcagggacagcgtcccggctctcccgaggaggcagccgccttggtcgatggtctgcggcgggagccagggggccctcgtaggtgggttacagtgcaggtccagggacaggaggtgttgagcgaaaagatggaaccctcaagcttccagcctttgcccgaaaccgaacctccaacgcccgagcccggcccaaagactcctccacgcactatgcaagagtctcctctcgggctgcaggtcaaagaagagagcgaggtcactgaggatagtgattttctggaatccggccctttagccgctacccaggagtcagtccctactttgctgcctgaagaagcccagcggtgcggcacagtccttgatcagatttttccccacagcaaaaccggacctgagggccctagttggagggaacatcctcgggccttgtggcacgaggaagctggaggaatcttttcacctggattcgccctgcagctggggagcatttcagcaggtcccggctctgtatcaccgcacctgcacgtgccatgggacctgggcatggccggactgagtggacagatccagtctccaagccgcgagggtggttttgcacacgcactccttttaccatctgatctccgctcagagcaagatcccactgacgaggatccctgccggggggtggggccagccttgatcaccactcgctggcgaagcccacggggtcggtccaggggcaggcccagtaccggcggcggagtggttcgtgggggacggtgtgacgtgtgcgggaaggtgttttcccaacggtcgaatctcctgcgccaccagaagatccacaccggcgagagacctttcgtgtgcagcgagtgcggacggagcttttcccggtcctcccacctgctacggcatcaattgactcacacggaggagagaccatttgtgtgcggagactgtgggcagggatttgtgagatccgcacgacttgaggaacacaggagggttcataccggcgagcaaccttttcggtgcgctgagtgtggacagtctttccggcagcgatctaatcttttacaacaccaaaggatacatggcgatcctcccgggccgggcgctaagccacccgcgcctcccggagcacctgaaccacctggacccttcccctgtagtgagtgccgagaaagttttgcacgaagagccgtacttttggaacaccaagccgtgcatacaggcgataagagctttggctgtgtcgagtgcggcgaacgatttggtaggcgctctgtgctattgcagcatcggagggtacattccggagagaggccattcgcttgcgcagaatgtggacagtcctttagacagaggagtaaccttacacagcaccggcgtatccatacaggcgaaaggccattcgcttgtgctgagtgcggcaaagcctttcgccagaggcctacattgacccaacacttgagagtgcacacaggagagaaaccttttgcttgccccgagtgtggtcaaaggttcagtcagagacttaaactgacccgccatcagcgcactcacaccggagagaaaccatatcactgcggcgagtgcggtctcggcttcacccaggtgtctagactgactgaacaccagaggattcacaccggtgaaagaccctttgcttgcccggagtgtgggcagagcttcaggcagcacgccaatttaacgcagcacagaaggatacacaccggggagcggccttatgcctgccccgaatgtggcaaagcctttcgacagcgacccactctgacacagcacttgcggacccacaggagggagaaaccgtttgcttgtcaggactgtgggaggagatttcaccagtccactaagctcatccagcaccaacgtgtgcactccgccgagtag

SEQ ID NO: 295206 - DNA, 2205 bp, Artificial Sequence
  derived and/or modified sequence
atgcggcccgccgtgctgggcagccccgaccgggccccccccgaggacgaagggccagtgatggtaaagctcgaagattcagaggaagagggtgaagctgctctgtgggatcccgggccagaagctgcacggcttcgattccggtgttttaggtatgaagaggctactggccctcaagaggccctggcgcagcttcgcgaactatgccgccagtggctgcggcccgaagtccggtcaaaagagcagatgctcgagctcctcgtgctggagcagtttctgggagctttacctccagagattcaggcacgcgtacagggacaacgtcctggatcaccagaagaggccgcagccttggtggacggccttagacgtgaaccaggtggaccgagaagatgggtaaccgtgcaggtccaaggccaagaagtactctcagaaaagatggagccgtcatctttccagcctctaccagaaaccgaacctcctacccctgaaccaggtccaaaaaccccaccacgcacaatgcaggaatcccccctgggcctgcaagtgaaagaggagtctgaggttacagaagactcagattttttagagagcgggcctctggctgccacgcaggagagtgttccaaccctactccccgaagaagcccagcgctgtggtacagttctagaccaaatctttccacatagtaaaactgggcctgaggggccctcctggagagaacacccacgtgccctctggcatgaggaagctggaggtatcttctcgcccggatttgcccttcagctgggaagcatcagcgctgggcccggcagcgtctctccgcacctgcatgttccatgggacctcggaatggcgggattatctggtcagattcagtcacctagtagagagggggggttcgctcacgcacttcttctgccgtccgacctgaggagcgagcaggaccctactgacgaagacccctgcagaggggtcggccccgccctgattactacgcgctggcggtctcccaggggtcgatcaaggggcagacccagtacaggcgggggcgtagtgagaggtggccgctgcgacgtgtgtgggaaggtgttttcccagaggtccaatctcctgaggcaccaaaagatccacaccggggagaggccttttgtttgcagtgaatgtgggcgctctttctcacggagcagtcatttgttacgccatcaactgacgcacaccgaagagcgaccttttgtgtgtggagattgtggccagggcttcgttcgatccgcccggttggaggagcaccgaagagtccacacaggggagcagccgtttagatgcgctgaatgtggtcagtcctttagacagcgcagtaacctgttgcaacaccaacgcatccacggtgaccctcctggacccggagccaagccacctgctcccccgggagctcctgagccacctggcccatttccttgctcagaatgccgggagagttttgctagacgggccgtcctgcttgagcaccaggctgtccacaccggggacaaaagttttggttgtgtggagtgcggcgaaagatttggcagacgcagcgtgctgctgcagcatagacgggtgcactcaggggaaaggccgttcgcctgcgcagagtgcggccagtcatttcggcaacgatctaatcttacacagcatcgacggatacacaccggggaacgcccatttgcctgcgccgaatgcggtaaagcttttcggcaaagacccactctaacacagcacctccgagtccatacaggagaaaagccatttgcatgtcccgagtgtggccagagattctctcaaaggcttaagttgactcgacaccagcggacccacactggggaaaaaccatatcactgcggagagtgcggactcgggtttacccaggtctctaggctgacagaacaccagaggattcacacaggagagcgtccttttgcttgccccgagtgcggacaatcatttcggcagcatgctaatctcacgcaacatcggaggatacacaccggggagcgtccttacgcatgtcctgagtgcggtaaagccttcaggcagcgcccaacccttacccagcacctgcgcacacacagacgcgaaaaaccctttgcatgtcaagactgtggaaggcgctttcaccagtccactaaattaatccagcaccagagagttcactcagccgaatag

SEQ ID NO: 295207 - DNA, 2205 bp, Artificial Sequence
  derived and/or modified sequence
atgagacccgcagtcctcggaagtcccgatcgggctcctccagaagatgaggggcctgtcatggtgaaactggaagattccgaggaggaaggcgaggctgccctgtgggaccctggaccagaggccgcaaggcttcggtttcgttgctttcgttatgaggaggccactggcccacaagaggcacttgcgcagctgcgagagctctgccgccagtggctacgtcccgaagtaaggtcaaaggaacagatgctggaactgctggtgctggaacaatttctgggcgcactgccacccgaaatccaggccagggttcagggccaacggcctggttctcctgaggaggcagcagctttagtggacggccttcgacgcgagccaggaggcccaagaaggtgggtcacagttcaggtacaaggacaggaggttctctctgagaaaatggaaccaagtagttttcagcccttgcctgaaacagagccaccgacgcccgaacccggtcccaaaaccccaccaagaacaatgcaggaatcccccttgggcctccaggtgaaggaggagtcagaagtgactgaagactctgattttctcgaaagtggacctctggccgcaacccaggaatccgtgccaacgcttctccccgaggaagcacagcggtgtgggaccgttctggaccagatcttcccccatagcaagaccgggccagaaggtcctagctggagggaacacccccgagcactgtggcatgaggaagctggcggtattttcagtccgggattcgccctccaactagggtccatatcggccggtccaggatcagttagcccacatcttcacgtgccgtgggatctggggatggcaggcctatctggacagatacagtccccaagcagagagggaggctttgcacatgctctgcttctgccatctgatctccgatctgaacaggaccccaccgatgaggacccgtgccgcggagtgggccctgccctgataacaaccagatggagatcacccagaggccgttcccggggacgcccatccacagggggtggggtggtaaggggcggacgttgtgacgtgtgtggtaaagtcttctctcagcgttccaacctgctacgccaccaaaagattcataccggagagcggcctttcgtttgtagcgagtgcggacgaagcttttctaggagctcccatcttcttcggcatcagctgacccatactgaggaaagaccatttgtttgtggggattgtggccagggattcgtccgatctgctcggctggaagagcaccgccgtgtgcacactggcgaacagcccttcagatgcgcagagtgcggccaaagcttccggcagaggagtaatctgctgcaacatcagcggattcatggtgatccccctggacctggtgcaaagccgccagccccaccaggggcaccagagcctcccggaccattcccctgttccgagtgtcgggaaagttttgctcgcagggcagtcctactcgaacaccaggcagttcacactggcgataaatcctttggatgcgtggaatgtggagaacggtttggcagaagatctgtcctcctacagcaccggagagttcatagtggcgaacgcccttttgcttgtgctgaatgtgggcaatcatttcgacagcggtcaaacctcacccagcaccgaagaattcatacgggggagaggcccttcgcatgcgctgaatgcgggaaagcctttcggcaacggcctaccctcacacagcacctacgcgtccacactggcgagaaacccttcgcttgtccagagtgtggacagaggttttcacagcggctcaagctcacccgacaccagagaactcataccggcgagaagccttaccactgcggcgagtgcggattgggatttacccaggtgtctcgactcaccgagcaccaaaggattcacactggagaacgtcctttcgcgtgccccgagtgcggacagtctttccgtcagcatgccaacctcacccagcaccgcagaattcacacaggtgagagaccctatgcgtgtccagaatgcggaaaagccttccggcagaggcccacattgacccagcacctgcggactcataggcgtgagaagccgttcgcctgtcaggactgtggtcgcagatttcatcagtctacgaaactgattcagcatcagagagtgcactccgctgaatag

SEQ ID NO: 295208 - protein, 544 aa, Artificial Sequence
  derived and/or modified sequence
MWLKVGGLLRGTGGQLGQTVGWPCGALGPGPHRWGPCGGSWAQKFYQDGPGRGLGEEDIRRAREARPRKTPRPQLSDRSRERKVPASRISRLANFGGLAVGLGLGVLAEMAKKSMPGGRLQSEGGSGLDSSPFLSEANAERIVQTLCTVRGAALKVGQMLSIQDNSFISPQLQHIFERVRQSADFMPRWQMLRVLEEELGRDWQAKVASLEEVPFAAASIGQVHQGLLRDGTEVAVKIQYPGIAQSIQSDVQNLLAVLKMSAALPAGLFAEQSLQALQQELAWECDYRREAACAQNFRQLLANDPFFRVPAVVKELCTTRVLGMELAGGVPLDQCQGLSQDLRNQICFQLLTLCLRELFEFRFMQTDPNWANFLYDASSHQVTLLDFGASREFGTEFTDHYIEVVKAAADGDRDCVLQKSRDLKFLTGFETKAFSDAHVEAVMILGEPFATQGPYDFGSGETARRIQDLIPVLLRHRLCPPPEETYALHRKLAGAFLACAHLRAHIACRDLFQDTYHRYWASRQPDAATAGSLPTKGDSWVDPS

SEQ ID NO: 295209 - DNA, 1635 bp, Artificial Sequence
  derived and/or modified sequence
atgtggctgaaggtgggcggcctgctgagaggcaccggcggccagctgggccagaccgtgggctggccctgcggcgccctgggccccggcccccacagatggggcccctgcggcggcagctgggcccagaagttctaccaggacggccccggcagaggcctgggcgaggaggacatcagaagagccagagaggccagacccagaaagacccccagaccccagctgagcgacagaagcagagagagaaaggtgcccgccagcagaatcagcagactggccaacttcggcggcctggccgtgggcctgggcctgggcgtgctggccgagatggccaagaagagcatgcccggcggcagactgcagagcgagggcggcagcggcctggacagcagccccttcctgagcgaggccaacgccgagagaatcgtgcagaccctgtgcaccgtgagaggcgccgccctgaaggtgggccagatgctgagcatccaggacaacagcttcatcagcccccagctgcagcacatcttcgagagagtgagacagagcgccgacttcatgcccagatggcagatgctgagagtgctggaggaggagctgggcagagactggcaggccaaggtggccagcctggaggaggtgcccttcgccgccgccagcatcggccaggtgcaccagggcctgctgagagacggcaccgaggtggccgtgaagatccagtaccccggcatcgcccagagcatccagagcgacgtgcagaacctgctggccgtgctgaagatgagcgccgccctgcccgccggcctgttcgccgagcagagcctgcaggccctgcagcaggagctggcctgggagtgcgactacagaagagaggccgcctgcgcccagaacttcagacagctgctggccaacgaccccttcttcagagtgcccgccgtggtgaaggagctgtgcaccaccagagtgctgggcatggagctggccggcggcgtgcccctggaccagtgccagggcctgagccaggacctgagaaaccagatctgcttccagctgctgaccctgtgcctgagagagctgttcgagttcagattcatgcagaccgaccccaactgggccaacttcctgtacgacgccagcagccaccaggtgaccctgctggacttcggcgccagcagagagttcggcaccgagttcaccgaccactacatcgaggtggtgaaggccgccgccgacggcgacagagactgcgtgctgcagaagagcagagacctgaagttcctgaccggcttcgagaccaaggccttcagcgacgcccacgtggaggccgtgatgatcctgggcgagcccttcgccacccagggcccctacgacttcggcagcggcgagaccgccagaagaatccaggacctgatccccgtgctgctgagacacagactgtgccccccccccgaggagacctacgccctgcacagaaagctggccggcgccttcctggcctgcgcccacctgagagcccacatcgcctgcagagacctgttccaggacacctaccacagatactgggccagcagacagcccgacgccgccaccgccggcagcctgcccaccaagggcgacagctgggtggaccccagctag

SEQ ID NO: 295210 - DNA, 1635 bp, Artificial Sequence
  derived and/or modified sequence
atgtggctgaaggtcggaggcttattaaggggaacgggcgggcagttaggacaaactgttggatggccttgtggggctctgggccctggccctcaccgatggggtccttgtggaggcagctgggcacagaaattttaccaggacgggcctgggagggggctgggagaagaagatattcgacgggcaagagaggcccgtcccagaaagacaccaaggccacaattatcagacagatctagagagcggaaggttcctgcttcccgcatcagccggctcgctaactttggcggcttagccgtgggcctgggactcggcgttctagcagagatggctaagaagtcgatgcctggaggacgcctgcagtctgagggggggagcggtctggacagttcaccgtttctctcagaggcaaacgccgaacgcattgtgcaaaccctttgcacagtgagaggagctgcactgaaggtcggacagatgttatcaatacaggataatagtttcatatcaccacagctacaacacatattcgaacgagtccgtcagagtgcagattttatgcctaggtggcaaatgctgcgcgtcttagaagaggaactgggtcgggattggcaggcaaaagtcgcctctctcgaggaagtccccttcgccgcagcctcgattggacaggtgcatcaagggctcctgcgggacggcacggaggtcgcggtcaagattcagtacccaggcatagcgcagtctattcaaagcgatgtgcagaacctgttggccgtgttgaagatgtctgccgccttaccggcaggcttgttcgccgagcagtccctccaagcattgcagcaggaactcgcatgggagtgcgattacaggcgggaggccgcttgtgctcaaaactttagacagcttctggcaaatgaccctttctttcgcgtccctgcagtcgtgaaagaactttgcaccactcgggtgcttggtatggagttagcggggggagtgcccctggaccagtgccagggcttgagccaagacctgcgcaaccagatctgcttccaactgctcactctgtgcttaagggagctgttcgagtttaggtttatgcaaactgacccaaactgggccaacttcttgtacgacgccagctcccaccaggtcacgctattagactttggggccagcagagagtttggcaccgagtttacagaccactacatcgaagtcgtcaaagcagcagcagatggtgaccgggattgtgtattgcagaagtcccgagacctcaagttcctgaccggatttgagaccaaggccttcagcgatgcacacgtggaagccgtgatgattcttggggaaccttttgctacgcagggcccctatgactttgggtctggggagactgcgagaagaatccaggacttgattcccgtactgctcagacataggctctgcccccctccagaggagacgtatgccctgcatcgcaaattagctggggctttcctcgcttgtgctcacttgcgcgcacacatagcctgtcgcgacctttttcaggatacttatcacagatactgggcgtccagacagcccgatgccgcaaccgcagggagcctaccgactaagggcgattcatgggtggacccgtcatag

SEQ ID NO: 295211 - DNA, 1635 bp, Artificial Sequence
  derived and/or modified sequence
atgtggctgaaggtgggcggcctgctgcggggcaccggcggccagctgggccagacagtgggctggccctgtggggccctgggccctggcccccaccgctggggcccctgtggcggctcctgggcccagaagttctaccaggacggccctggccggggcctgggggaggaggacatccggcgggcccgggaggcccggcccaggaagaccccccggccccagctgagtgacaggagccgggagaggaaggtgcctgccagccgcatcagccggctggccaactttggaggcctggccgtgggcctgggcctgggcgtgctggccgagatggccaagaagtccatgcctgggggccgcctgcagagcgagggcggcagcggcctggacagcagccccttcctgtctgaggccaatgctgagcgcatcgtgcagaccctgtgcaccgtgcggggggccgccctgaaggtgggccagatgctgagcatccaggacaacagcttcatcagcccccagctgcagcacatctttgagcgggtgcggcagagcgctgacttcatgccccgctggcagatgctgcgggtgctggaggaggagctgggccgggactggcaggccaaggtggccagcctggaggaggtgccctttgctgctgccagcatcggccaggtgcaccagggcctgctgagagatggaacagaggtggccgtgaagatccagtacccaggcatcgcccagagcatccagagtgatgtgcagaacctgctggccgtgctgaagatgtctgctgccctgcctgctggcctgtttgctgagcagagcctgcaggccctgcagcaggagctggcctgggagtgtgactaccgccgggaggccgcctgtgcccagaacttccggcagctgctggccaatgaccccttcttccgggtgcctgctgtggtgaaggagctgtgcaccaccagggtgctgggcatggagctggccggcggcgtgcccctggaccagtgccagggcctgagccaggacctgaggaaccagatctgcttccagctgctgaccctgtgcctgcgggagctgtttgagttccgcttcatgcagacagaccccaactgggccaacttcctgtatgatgccagcagccaccaggtgaccctgctggactttggagccagccgggagtttggaacagagttcacagaccactacatcgaggtggtgaaggctgctgctgatggagaccgggactgtgtgctgcagaagagccgggacctgaagttcctgactggatttgagaccaaggccttcagtgatgcccacgtggaggccgtgatgatcctgggggagccctttgccacccagggcccctatgactttggaagtggagaaacagcccggcgcatccaggacctgatccctgtgctgctgcggcaccggctgtgccccccacctgaggagacctacgccctgcacaggaagctggccggggccttcctggcctgtgcccacctgcgggcccacatcgcctgccgggacctcttccaggacacctaccaccgctactgggccagccggcagccagatgctgccacagctggcagcctgcccaccaagggggacagctgggtggaccccagctag

SEQ ID NO: 295212 - DNA, 1635 bp, Artificial Sequence
  derived and/or modified sequence
atgtggctgaaggtgggcggcctgctgcggggcaccggcggccagctggggcagacagtaggttggccctgtggcgctttaggtccaggcccccatcggtgggggccttgtggtggaagctgggcacagaaattttatcaggacgggccgggaagaggactgggcgaagaagatattagaagggccagagaggcccgaccacgaaaaacacccaggcctcagctgagtgaccgcagccgggagagaaaagtgccggcttcccggatatctagacttgccaatttcggtggccttgccgtcgggctgggactgggcgtcttggctgagatggctaaaaaaagcatgcccgggggacgccttcagtccgagggaggcagcgggctcgactccagtccattcctgtccgaggccaatgctgagagaattgtccagaccctgtgcaccgtcagaggcgctgcactcaaagtcggccaaatgttgtccatccaagacaattcatttatttctcctcagcttcagcacatattcgaacgagtccgccaatccgctgacttcatgccccgatggcagatgctgcgcgtgctggaggaggagttgggacgggactggcaagctaaagtggcctcccttgaagaggttccttttgctgcagctagcataggccaggtgcaccagggcttactacgagatggtactgaggtggcagtgaaaattcagtacccagggatagcacaatccatccagagcgacgtccagaacctcttggcagtcttgaaaatgtccgccgccttgccagctgggctatttgctgagcaatctctgcaggctcttcagcaggagttggcctgggaatgcgactatagaagagaggccgcctgcgcccaaaacttcagacagttacttgccaatgaccccttcttcagagtgccagccgtggtgaaggagctctgcactacaagggtcctcgggatggagctggccggcggtgtccctcttgaccaatgccaaggtctgagccaggatctgaggaaccaaatttgtttccaactactcacgctctgcttgcgtgagttgttcgagttccgctttatgcaaacggacccgaattgggcaaactttctatacgacgcctcgagtcatcaggtaacattgctggacttcggagcctctagagagttcggaaccgaatttacagaccattatatcgaggtagtcaaagccgcagccgatggagatcgcgactgcgtacttcaaaagagcagggacctgaagttcctcaccggctttgagacaaaggccttcagcgatgcgcacgtagaggccgtcatgatcctgggggaaccatttgccacccaggggccatatgacttcggatccggcgagacagctagaaggattcaggacctgatccctgtgctcctgaggcaccgcctgtgtccaccccctgaagagacctatgcgctgcaccgaaaactcgccggcgctttcctcgcctgcgctcaccttcgcgctcacattgcgtgtcgcgatcttttccaggacacttaccaccggtactgggcttccagacagcccgatgctgccacggccgggagcctgccgacaaaaggtgactcctgggtcgatccttcatag

SEQ ID NO: 295213 - DNA, 1635 bp, Artificial Sequence
  derived and/or modified sequence
atgtggttgaaagtggggggactcctgagaggaaccggtggacaactgggccagacagttggctggccatgcggggctctcggacccggtcctcatagatggggaccgtgcggcggaagctgggcccagaaattctatcaagatggtccaggtcggggactgggagaggaggacatccgccgtgctagggaagcccgacctagaaaaacacctaggccacagctcagtgaccgatctcgggagcgaaaggtccccgcatcccgcatctccagactggctaactttgggggactcgccgtgggactgggtttgggagtccttgctgaaatggctaaaaaatcaatgcctgggggaaggttacagtccgagggaggcagcggcttagactctagccctttcttaagcgaggctaacgctgaaagaatcgtgcagacgctctgtactgttaggggggctgccctgaaggtcggacaaatgctttccatccaggataacagttttatttcacctcaattgcaacatatctttgagcgcgtccgccagtccgcggatttcatgccccgatggcagatgttgcgagtgctggaggaggagcttgggcgtgactggcaggctaaggttgccagtctcgaggaggtaccattcgcagctgcgtctattggccaggtccatcaggggctgctccgagatggtaccgaggtggccgtcaagatccaatatcccggaatagctcaaagcatacaatctgacgtacagaatctgctcgccgtcctgaaaatgtccgccgcacttccagcaggattgtttgccgaacagtctttgcaggccctccagcaggagctggcttgggaatgtgattatagacgtgaggctgcttgtgctcagaattttcgtcagctgctcgcaaacgatccattctttagggtcccagcagtggtaaaggaactgtgcactacacgagttctggggatggaactggctggcggagttccattggaccagtgtcagggcctgagtcaggacttgcggaatcaaatttgtttccaattgctgaccctgtgccttcgagagttgttcgagtttaggttcatgcagaccgacccaaattgggctaactttctgtatgatgcctcgagccatcaagtgactctgttggactttggcgcatcccgggaatttgggactgagtttacggatcattacatcgaagtggtaaaggcagcagctgatggagaccgcgactgcgtgttacagaaaagcagggatctcaaatttctcactggcttcgagactaaggcattctccgacgcccacgtcgaagcagtcatgatcttaggcgaaccatttgccacccagggaccatacgactttggctccggggaaacagcacgtaggattcaggacctaattcccgtgctcctgcgccataggttgtgcccacctccagaagagacctatgctctccaccgtaagctagctggcgctttcttggcgtgtgctcaccttcgcgctcacatcgcatgcagagacctgtttcaggacacataccatcgctattgggcgagtaggcagcctgacgcagctaccgcaggctcattgcccaccaagggcgatagctgggttgacccatcttag

SEQ ID NO: 295214 - protein, 683 aa, Artificial Sequence
  derived and/or modified sequence
MRRCPCRGSLNEAEAGALPAAARMGLEAPRGGRRRQPGQQRPGPGAGAPAGRPEGGGPWARTEGSSLHSEPERAGLGPAPGTESPQAEFWTDGQTEPAAAGLGVETERPKQKTEPDRSSLRTHLEWSWSELETTCLWTETGTDGLWTDPHRSDLQFQPEEASPWTQPGVHGPWTELETHGSQTQPERVKSWADNLWTHQNSSSLQTHPEGACPSKEPSADGSWKELYTDGSRTQQDIEGPWTEPYTDGSQKKQDTEAARKQPGTGGFQIQQDTDGSWTQPSTDGSQTAPGTDCLLGEPEDGPLEEPEPGELLTHLYSHLKCSPLCPVPRLIITPETPEPEAQPVGPPSRVEGGSGGFSSASSFDESEDDVVAGGGGASDPEDRSGSKPWKKLKTVLKYSPFVVSFRKHYPWVQLSGHAGNFQAGEDGRILKRFCQCEQRSLEQLMKDPLRPFVPAYYGMVLQDGQTFNQMEDLLADFEGPSIMDCKMGSRTYLEEELVKARERPRPRKDMYEKMVAVDPGAPTPEEHAQGAVTKPRYMQWRETMSSTSTLGFRIEGIKKADGTCNTNFKKTQALEQVTKVLEDFVDGDHVILQKYVACLEELREALEISPFFKTHEVVGSSLLFVHDHTGLAKVWMIDFGKTVALPDHQTLSHRLPWAEGNREDGYLWGLDNMICLLQGLAQS

SEQ ID NO: 295215 - DNA, 2052 bp, Artificial Sequence
  derived and/or modified sequence
atgcggcggtgcccatgtaggggatcattgaatgaggctgaggctggagcgttgcccgcagccgctaggatgggactggaagcccctcggggcgggcggcgtagacaacctggccagcaacggcctgggccaggagccggcgctcccgccggaagacccgagggcggcgggccatgggccaggactgaaggcagctctctacattcggaacccgaacgagccggactgggccccgctcccggaactgagtccccgcaagcggagttctggactgacggccagacagaacccgcagccgctggactgggagtcgagaccgagcgaccaaagcagaagacagaaccagatcggagcagcttgaggacgcacctcgaatggtcttggagtgagctggaaactacctgtttatggaccgagaccggaacagacgggctttggactgaccctcacagaagcgatctccagtttcagccagaggaggccagtccttggacccagcctggcgttcatggaccctggaccgagcttgagactcacggcagccagacacagcctgaaagagttaaatcttgggctgacaatctctggacacatcagaatagctcctcactacagacccaccccgagggggcctgcccctctaaggaaccttctgccgatgggagctggaaagaactttatactgacggcagccgaacacagcaagacatcgagggcccatggacagagccatacacagatggctcccagaagaaacaggatacagaagctgccagaaaacagcctgggaccggcggttttcagattcagcaggacaccgacggcagctggacccaacccagtaccgatggtagtcaaactgcgcccgggactgattgcttgctgggagaacccgaggacggcccgcttgaagagccagagcctggcgaactgcttacccacttatatagtcatctgaagtgcagtcccctgtgccccgtgcctagacttattatcacccctgagaccccagagccggaagcccagcctgttggtccccctagccgggtggagggtggatcgggcgggttctccagtgcaagcagctttgacgagtctgaggatgacgtggtggctggcggcgggggcgcctcagatccagaggataggagtgggtccaagccttggaaaaaactgaagacagttctcaaatactctccctttgtcgtctcgttcaggaaacactatccttgggtacaactcagcggccacgctgggaattttcaggctggtgaggatggcagaatcttgaagagattctgccaatgcgagcagaggagtcttgaacagttaatgaaggaccccctgcgcccctttgttcctgcatattatggcatggtgttgcaggatggtcaaacattcaaccagatggaggatctcctggctgatttcgaaggcccctctattatggattgcaagatgggctcccgtacatatctggaggaagaactcgtgaaagccagagaaaggcccagacccaggaaggatatgtacgagaaaatggtggcagtggaccccggcgctccgacgcctgaggagcacgcacaaggagccgtgacaaagcccagatacatgcaatggcgggagacgatgtcctcaaccagtacactcgggttccggatcgagggcataaagaaagctgatggcacgtgtaatactaacttcaagaagacccaagctctggaacaagtaactaaggtcctggaagatttcgtggacggggatcacgtcatcctccaaaaatacgtcgcgtgcctcgaggagctgcgggaggccctggaaatttcgccattcttcaagacacatgaggtggtagggtcctctctgttatttgtccatgatcacacaggactcgcaaaggtctggatgatcgactttgggaaaaccgttgccctgcccgaccaccaaactctttctcacagattaccatgggcggagggtaatagggaagatggctacctctggggcctcgacaatatgatatgccttttacagggcctggctcagagttag

SEQ ID NO: 295216 - DNA, 3383 bp, Artificial Sequence
  derived and/or modified sequence
gggtcggccgaagcccgaaccgaaggagcgggcatgaggcgctgcccgtgccgtgggagcctgaacgaggcggaggccggggcgctgcccgcggcggcccgcatgggactggaggcgccgcgaggagggcggcggcggcagccgggacagcagcgacctgggcccggcgcaggggccccggcggggcggccggaggggggcgggccctgggcccggacagaggggtccagcctccacagcgagcctgagagggccggcctcgggcctgcgccggggacagagagtccgcaggcagaattctggacagacggacagactgagcccgcggcagctggccttggagtagagaccgagaggcccaagcaaaagacggagccagacaggtccagcctccggacgcatctagaatggagctggtcagagctggagacgacttgtctttggacggagaccgggacagatggcctttggactgatccgcacaggtccgacctccagtttcagcccgaggaggccagcccctggacacagccaggggttcatgggccctggacagagctggaaacgcatgggtcacagactcagccagagagggtcaagtcctgggctgataacctctggacccaccagaacagttccagcctccagactcacccagaaggagcctgtccctcaaaagagccaagtgctgatggctcctggaaagaattgtatactgatggctccaggacacaacaggatattgaaggtccctggacagagccatatactgatggctcccagaaaaaacaggatactgaagcagccaggaaacagcctggcactggtggtttccaaatacaacaggatactgatggctcctggacacaacctagcactgacggttcccagacagcacctgggacagactgcctcttgggagagcctgaggatggcccattagaggaaccagagcctggagaattgctgactcacctgtactctcacctgaagtgtagccccctgtgccctgtgccccgcctcatcattacccctgagacccctgagcctgaggcccagccagtgggacccccctcccgggttgaggggggcagcggcggcttctcctctgcctcttctttcgacgagtctgaggatgacgtggtggccgggggcggaggtgccagcgatcccgaggacaggtctgggagcaaaccctggaagaagctgaagacagttctgaagtattcaccctttgtggtctccttccgaaaacactacccttgggtccagctttctggacatgctgggaacttccaggcaggagaggatggtcggattctgaaacgtttctgtcagtgtgagcagcgcagcctggagcagctgatgaaagacccgctgcgacctttcgtgcctgcctactatggcatggtgctgcaggatggccagaccttcaaccagatggaagacctcctggctgactttgagggcccctccattatggactgcaagatgggcagcaggacctatctggaagaggagctagtgaaggcacgggaacgtccccgtccccggaaggacatgtatgagaagatggtggctgtggaccctggggcccctacccctgaggagcatgcccagggtgcagtcaccaagccccgctacatgcagtggagggaaaccatgagctccacctctaccctgggcttccggatcgagggcatcaagaaggcagatgggacctgtaacaccaacttcaagaagacgcaggcactggagcaggtgacaaaagtgctggaggacttcgtggatggagaccacgtcatcctgcaaaagtacgtggcatgcctagaagaacttcgtgaagctctggagatctcccccttcttcaagacccacgaggtggtaggcagctccctcctcttcgtgcacgaccacaccggcctggccaaggtctggatgatagacttcggcaagacggtggccttgcccgaccaccagacgctcagccacaggctgccctgggctgagggcaaccgtgaggacggctacctctggggcctggacaacatgatctgcctcctgcaggggctggcacagagctgagctgctcagccaccatcaggttaattggatggcgccagtctggctggaggagccctgagatgccatgggaggcctgaggttggccacgggggagctggcctccagggacgggagagattgtgtcatgtgccacacgagaccaacgtggaaaagtctgaagggccttgggagaccaggtagcacctggccccatcatgatgcaggggttttggggacctggaaggaaggtgatgaggcagtgagtcagaaaaaccagaacggggtccccggatctgccgggaaggcttctgaggggctgccctgagagcattcagttcacatgtcacagggtatggtgtgacagggtgcctgtggacacatgaatcacttctaacctgcctccctgtcagcctccaggctgccagctggctgaggccagggactgggtcaggctcatctgtggcgcctcagagggtcagcatcattggtgaacagatgcaggcgctgctggaccatctggggagagtgacagtccatgtcttcaccagggagccatttgagtgctgagcgacaagaggctcagagggcatgaccccatgggactggatgcggcctgagggctgataccgctgggcggtatcctgccctgctgtggccctgtgggatcctccgtgttcctcggcggactctgctgacctcctgcagacccaaaccacagccacatcccagcttctgtgccagcactgtgacagtacctcgctcctctgtgcaccagatccggcctcaggacttacacctcctgcctgacccccaggcttctctctcctttctcccagcaaactgcagtggcagaaaggaggttcagaggctgggaaagtgggcctccccttgcaactcagagctgctgcactcaggagggccccatccaatcccgggcccctgcagggaaaagcgctgggtgtgtgtcagaggcgcagggtgggtggggctgccagccaggaccctggcctgcagcctgatccaaaccaaagactgtagaaccctggggtgtggctaacggcccctccagcacccatagccaggtcttcctggcccttgaggctgggctggcggacaggcacctacctcttccttaagctgaagctcccacactgtcttccagggctgaggagatgctctccttttctactgaccatcttgatacttatttatacgagaggcagttgctggacggggtagtactgggaagcaggaggcagaatggctctgctgagcctcctacccatgacaacaccccaataaacagaacattcagagcc

SEQ ID NO: 295217 - DNA, 2052 bp, Artificial Sequence
  derived and/or modified sequence
atgaggcgctgcccctgccggggcagcctgaatgaagctgaggccggggccctgcctgctgctgccaggatgggcctggaggccccccggggcggcagaagacggcagcccggccagcagaggcctggccctggggccggggccccagctggccggcctgagggcggcggcccctgggccaggacagagggcagcagcctgcacagcgagcctgagcgggccggcctgggccctgcccctggaacagagagcccccaggccgagttctggacagatggccagacagagcctgctgctgctggcctgggcgtggagacagagcggcccaagcagaagacagagccagacaggagcagcctgcggacccacctggagtggagctggagcgagctggagaccacctgcctgtggacagagaccggcacagatggcctgtggacagacccccacagaagtgacctgcagttccagcctgaggaggccagcccctggacccagcccggggtgcacggcccctggacagagctggagacccacggcagccagacccagcctgagcgggtgaagtcctgggccgacaacctgtggacccaccagaacagcagcagcctgcagacccaccctgagggcgcctgccccagcaaggagcccagcgcagatggctcctggaaggagctgtacacagatggcagcaggacccagcaggacatcgagggcccctggacagagccctacacagatggcagccagaagaagcaggacacagaagctgccaggaagcagcccggcaccggcggcttccagatccagcaggacacagatggctcctggacccagcccagcacagatggcagccagacagcccctggaacagactgcctgctgggggagccagaagatggccccctggaggagcctgagcccggggagctgctgacccacctgtacagccacctgaagtgcagccccctgtgccctgtgcccaggctcatcatcaccccagagaccccagagcctgaggcccagcctgtgggcccccccagccgggtggagggcggcagcggcggcttcagcagcgccagcagctttgatgaaagtgaagatgatgtggtggccggcggcggcggggccagtgaccctgaagatagaagtggcagcaagccctggaagaagctgaagacagtgctgaagtacagcccctttgtggtgtccttcaggaagcactacccctgggtgcagctgagcggccacgccggcaacttccaggccggagaagatggccgcatcctgaagcgcttctgccagtgtgagcagaggagcctggagcagctgatgaaggaccccctgcggccctttgtgcctgcctactacggcatggtgctgcaggacggccagaccttcaaccagatggaggacctgctggccgactttgagggccccagcatcatggactgcaagatgggcagcaggacctacctggaggaggagctggtgaaggcccgggagcggccccggcccaggaaggacatgtatgagaagatggtggccgtggaccccggggcccccaccccagaggagcacgcccagggcgctgtgaccaagccccgctacatgcagtggagggagaccatgagcagcaccagcaccctgggcttccgcatcgagggcatcaagaaggcagatggcacctgcaacaccaacttcaagaagacccaggccctggagcaggtgaccaaggtgctggaggactttgtggatggagaccacgtgatcctgcagaagtatgtggcctgcctggaggagctgcgggaggccctggagatcagccccttcttcaagacccatgaggtggtgggcagcagcctgctgtttgtgcatgaccacacaggcctggccaaggtgtggatgattgactttgggaagacagtggccctgcctgaccaccagaccctgagccaccggctgccctgggccgagggcaacagagaagatggctacctgtggggcctggacaacatgatctgcctgctgcagggcctggcccagagctag

SEQ ID NO: 295218 - DNA, 2052 bp, Artificial Sequence
  derived and/or modified sequence
atgcggcggtgcccctgccggggcagcctgaacgaggccgaggccggcgctcttccagcagcggctcgtatgggactggaagccccccggggaggcagacgtaggcaaccaggtcagcagaggcccgggcccggagcaggagcacccgcaggccggcctgagggtggtggaccctgggcccgaacggaaggctcaagtctgcacagcgaaccagagagggcagggcttggtcccgcccctgggacagagtcaccccaggcagaattttggaccgatggtcaaactgaacctgctgctgctgggcttggcgtcgagacagagaggcccaaacagaagacagagcctgaccggagcagtctacgtacacatctcgaatggagctggtctgaactggaaacaacctgtctgtggacggaaacaggcactgacgggctttggaccgacccccacaggagcgacctgcaattccaacctgaagaagcatccccctggacacagcccggcgttcacggcccttggacagaacttgagactcacggatcacagacccaacccgaacgggtaaagtcctgggcagataacctctggactcaccagaatagttcctccttgcagacacacccagaaggcgcctgtccctccaaggaaccatccgccgatggctcctggaaggagctgtacactgatgggagtcgcacgcagcaggacatagaggggccctggactgagccgtacacggacggctctcagaagaaacaggatacagaggcagcacgtaagcaaccagggacagggggtttccagatccagcaagatacggatggttcttggacacagcctagcacggacggcagccaaacagccccaggcaccgactgcttactcggcgagcccgaagatgggcccctggaagagcccgaacctggcgaattgctgactcatctatacagtcatctgaagtgttcacctctctgtcctgtacctagactgattatcactccggaaactcctgaaccagaggctcagcccgtgggaccaccctcaagggtggaaggaggatccggggggttttcttcagcgagctctttcgacgagagcgaagacgatgttgtggccggaggcgggggtgcttccgatcccgaggacaggagtggttctaagccgtggaaaaagttgaaaactgttcttaaatacagcccctttgttgtctctttcagaaaacactacccatgggtccagctatctggacacgccggcaactttcaggcaggtgaagatgggagaatactgaaacgcttttgtcagtgtgagcagcgtagcttggagcaactaatgaaggatccactgcggccctttgtgccggcctattacggtatggtcctgcaggacggccagacctttaaccagatggaagaccttttggcggacttcgaggggccatctatcatggactgcaagatggggtctcggacatatttagaggaggagctggtgaaggctagggaaagacccagaccgcgcaaagacatgtacgaaaaaatggtggctgtggaccctggagctccaacgccagaggagcacgcacagggcgccgtgactaaaccccgctatatgcagtggcgggaaactatgtcgtctacttcaacattggggttccgaatcgaggggatcaagaaagccgatgggacttgcaatacgaacttcaagaagacccaggccctcgagcaagtgaccaaggttctggaggatttcgtggacggtgaccacgtcatcctgcaaaaatatgtagcctgcctcgaagagctgcgagaggccttggaaatttctcctttctttaaaactcatgaagtcgtgggttccagtcttttgttcgtacatgaccacacaggcctggccaaggtgtggatgatagattttggcaagactgtcgccctaccagatcaccagactttgtcccatcgtctgccttgggccgaaggcaatagggaggatgggtacctgtggggcctagacaacatgatatgcctgctccaggggttggctcagtcatag

SEQ ID NO: 295219 - DNA, 2052 bp, Artificial Sequence
  derived and/or modified sequence
atgcgcaggtgcccatgccgaggatccctgaatgaggcagaggccggagccctgccagctgccgctcgcatgggattagaggccccaagagggggacgcagacgccagcccggtcagcaacgccctggacccggtgcaggagctcctgcgggtcgaccagagggcggaggcccatgggccaggacggaaggaagcagcttgcactccgagccagagcgggcaggcttgggacccgctcccggaaccgagtcaccccaggccgagttctggactgatgggcagaccgagccagcggcagcgggactcggggttgaaactgagcgtcctaagcagaagaccgaaccggacaggagctctctgagaacccacctcgaatggtcctggtctgagctcgaaacaacctgtctttggaccgaaactggcaccgatgggctgtggactgaccctcatcgtagtgatctccagttccagcccgaggaagcgtctccttggactcagccaggcgtgcacggcccatggactgagctggagacacacggcagtcaaacacaaccagagcgcgtgaagtcttgggccgataatttatggacgcaccaaaacagctccagcctgcaaacacatcccgagggggcatgtccgtctaaggaacccagtgcagacggctcctggaaagaactgtacaccgatggctctaggacccagcaggatatagaaggaccctggacagagccctataccgatggcagccagaagaagcaggatacagaagccgcaaggaagcaacctgggacaggtgggtttcaaattcaacaggacaccgatgggtcctggactcagccctctacagatggatcacagacagctcctgggaccgattgtctgctcggcgaaccagaagacgggccattggaagagcccgaacccggagagctcctgactcatctttactcacatctaaaatgcagcccactgtgtcctgtgccaagactgatcattacccccgagactccagagcctgaagctcaaccagtggggcctccatcaagagtcgaaggaggatctggcggattcagttccgcgtccagctttgatgagagcgaggacgatgtggtggctggaggcggtggtgcatctgaccctgaagacaggtctggtagtaagccatggaaaaaattgaaaaccgtcttaaaatacagtccctttgtggttagctttcgtaaacactatccttgggtgcagcttagtggccacgccggtaactttcaagccggtgaagacggcagaattcttaaacgattctgccagtgtgagcagcgaagtctggaacaactgatgaaagacccgctcagaccttttgtgcctgcatattatggtatggtattacaggatggtcaaacgtttaaccagatggaagatttgcttgcagacttcgaggggccttctatcatggactgtaaaatgggctcaaggacttatctggaagaagagttggtgaaagctagggagaggcctcgaccgagaaaagacatgtatgaaaaaatggtagccgtggatccaggtgcccctactcccgaagagcacgcccagggggcagttacaaagcccaggtacatgcagtggcgcgaaaccatgagcagcacatcaacactcggattcagaattgaagggataaagaaagcagatggtacgtgtaatactaatttcaagaaaactcaggctcttgagcaggtgaccaaagtgcttgaggacttcgtggatggcgatcacgtaattctccaaaaatacgtagcgtgtctggaggagcttcgcgaagcattggaaatttctcccttttttaagactcatgaagttgtgggcagctctttgcttttcgtccacgaccataccggactggctaaggtctggatgattgattttgggaagactgttgcacttccagatcaccagactctgtctcacagattgccttgggcagaaggtaatcgagaggacggctacctctggggcctggataacatgatctgcctcttgcagggtctggcacagagttag

SEQ ID NO: 295220 - DNA, 2052 bp, Artificial Sequence
  derived and/or modified sequence
atgagaagatgcccctgcagaggcagcctgaacgaggccgaggccggcgccctgcccgccgccgccagaatgggcctggaggcccccagaggcggcagaagaagacagcccggccagcagagacccggccccggcgccggcgcccccgccggcagacccgagggcggcggcccctgggccagaaccgagggcagcagcctgcacagcgagcccgagagagccggcctgggccccgcccccggcaccgagagcccccaggccgagttctggaccgacggccagaccgagcccgccgccgccggcctgggcgtggagaccgagagacccaagcagaagaccgagcccgacagaagcagcctgagaacccacctggagtggagctggagcgagctggagaccacctgcctgtggaccgagaccggcaccgacggcctgtggaccgacccccacagaagcgacctgcagttccagcccgaggaggccagcccctggacccagcccggcgtgcacggcccctggaccgagctggagacccacggcagccagacccagcccgagagagtgaagagctgggccgacaacctgtggacccaccagaacagcagcagcctgcagacccaccccgagggcgcctgccccagcaaggagcccagcgccgacggcagctggaaggagctgtacaccgacggcagcagaacccagcaggacatcgagggcccctggaccgagccctacaccgacggcagccagaagaagcaggacaccgaggccgccagaaagcagcccggcaccggcggcttccagatccagcaggacaccgacggcagctggacccagcccagcaccgacggcagccagaccgcccccggcaccgactgcctgctgggcgagcccgaggacggccccctggaggagcccgagcccggcgagctgctgacccacctgtacagccacctgaagtgcagccccctgtgccccgtgcccagactgatcatcacccccgagacccccgagcccgaggcccagcccgtgggcccccccagcagagtggagggcggcagcggcggcttcagcagcgccagcagcttcgacgagagcgaggacgacgtggtggccggcggcggcggcgccagcgaccccgaggacagaagcggcagcaagccctggaagaagctgaagaccgtgctgaagtacagccccttcgtggtgagcttcagaaagcactacccctgggtgcagctgagcggccacgccggcaacttccaggccggcgaggacggcagaatcctgaagagattctgccagtgcgagcagagaagcctggagcagctgatgaaggaccccctgagacccttcgtgcccgcctactacggcatggtgctgcaggacggccagaccttcaaccagatggaggacctgctggccgacttcgagggccccagcatcatggactgcaagatgggcagcagaacctacctggaggaggagctggtgaaggccagagagagacccagacccagaaaggacatgtacgagaagatggtggccgtggaccccggcgcccccacccccgaggagcacgcccagggcgccgtgaccaagcccagatacatgcagtggagagagaccatgagcagcaccagcaccctgggcttcagaatcgagggcatcaagaaggccgacggcacctgcaacaccaacttcaagaagacccaggccctggagcaggtgaccaaggtgctggaggacttcgtggacggcgaccacgtgatcctgcagaagtacgtggcctgcctggaggagctgagagaggccctggagatcagccccttcttcaagacccacgaggtggtgggcagcagcctgctgttcgtgcacgaccacaccggcctggccaaggtgtggatgatcgacttcggcaagaccgtggccctgcccgaccaccagaccctgagccacagactgccctgggccgagggcaacagagaggacggctacctgtggggcctggacaacatgatctgcctgctgcagggcctggcccagagctag

SEQ ID NO: 295221 - protein, 521 aa, Artificial Sequence
  derived and/or modified sequence
MVDYHAANQSYQYGPSSAGNGAGGGGSMGDYMAQEDDWDRDLLLDPAWEKQQRKTFTAWCNSHLRKAGTQIENIDEDFRDGLKLMLLLEVHELDYYDSHNVNTRCQKICDQWDALGSLTHSRREALEKTEKQLEAIDQLHLEYAKRAAPFNNWMESAMEDLQDMFIVHTIEEIEGLISAHDQFKSTLPDADREREAILAIHKEAQRIAESNHIKLSGSNPYTTVTPQIINSKWEKVQQLVPKRDHALLEEQSKQQSNEHLRRQFASQANVVGPWIQTKMEEIGRISIEMNGTLEDQLSHLKQYERSIVDYKPNLDLLEQQHQLIQEALIFDNKHTNYTMEHIRVGWEQLLTTIARTINEVENQILTRDAKGISQEQMQEFRASFNHFDKDHGGALGPEEFKACLISLGYDVENDRQGEAEFNRIMSLVDPNHSGLVTFQAFIDFMSRETTDTDTADQVIASFKVLAGDKNFITAEELRRELPPDQAEYCIARMAPYQGPDAVPGALDYKSFSTALYGESDL

SEQ ID NO: 295222 - protein, 203 aa, Artificial Sequence
  derived and/or modified sequence
MATAIQNPLKSLGEDFYREAIEHCRSYNARLCAERSLRLPFLDSQTGVAQNNCYIWMEKTHRGPGLAPGQIYTYPARCWRKKRRLNILEDPRLRPCEYKIDCEAPLKKEGGLPEGPVLEALLCAETGEKKIELKEEETIMDCQKQQLLEFPHDLEVEDLEDDIPRRKNRAKGKAYGIGGLRKRQDTASLEDRDKPYVCDSESF

SEQ ID NO: 295223 - DNA, 1188 bp, Artificial Sequence
  derived and/or modified sequence
atgaaggaggacggcggcgccgagttcagcgccagaagcagaaagagaaaggccaacgtgaccgtgttcctgcaggaccccgacgaggagatggccaagatcgacagaaccgccagagaccagtgcggcagccagccctgggacaacaacgccgtgtgcgccgacccctgcagcctgatccccacccccgacaaggaggacgacgacagagtgtaccccaacagcacctgcaagcccagaatcatcgcccccagcagaggcagccccctgcccgtgctgagctgggccaacagagaggaggtgtggaagatcatgctgaacaaggagaagacctacctgagagaccagcacttcctggagcagcaccccctgctgcagcccaagatgagagccatcctgctggactggctgatggaggtgtgcgaggtgtacaagctgcacagagagaccttctacctggcccaggacttcttcgacagatacatggccacccaggagaacgtggtgaagaccctgctgcagctgatcggcatcagcagcctgttcatcgccgccaagctggaggagatctacccccccaagctgcaccagttcgcctacgtgaccgacggcgcctgcagcggcgacgagatcctgaccatggagctgatgatcatgaaggccctgaagtggagactgagccccctgaccatcgtgagctggctgaacgtgtacatgcaggtggcctacctgaacgacctgcacgaggtgctgctgccccagtacccccagcagatcttcatccagatcgccgagctgctggacctgtgcgtgctggacgtggactgcctggagttcccctacggcatcctggccgccagcgccctgtaccacttcagcagcagcgagctgatgcagaaggtgagcggctaccagtggtgcgacatcgagaactgcgtgaagtggatggtgcccttcgccatggtgatcagagagaccggcagcagcaagctgaagcacttcagaggcgtggccgacgaggacgcccacaacatccagacccacagagacagcctggacctgctggacaaggccagagccaagaaggccatgctgagcgagcagaacagagccagccccctgcccagcggcctgctgacccccccccagagcggcaagaagcagagcagcggccccgagatggcctag

SEQ ID NO: 295224 - DNA, 1188 bp, Artificial Sequence
  derived and/or modified sequence
atgaaggaagacggaggggccgaattttcagctcgaagcagaaaacggaaagctaacgtgacagtatttttgcaggaccctgacgaggagatggcaaaaattgaccggactgctcgggaccagtgtggatcccaaccctgggataataacgccgtgtgtgccgacccctgctcactaatcccaaccccagacaaggaagatgatgaccgggtatatccaaattccacctgtaaaccccgaataatcgcgccatcaagaggttcccctctgccagtgctgagttgggctaatcgagaggaggtttggaagattatgttaaataaagagaagacatacttgcgtgatcagcattttcttgagcagcaccccctgctgcagcctaagatgcgcgcaatactgctagattggcttatggaagtatgcgaggtgtacaagcttcacagagagactttctacttagcccaggacttttttgataggtacatggcgacccaggagaacgtggtgaaaactctcctccaactgatagggatctccagtcttttcattgctgctaagctcgaggagatttacccccctaaattgcatcaatttgcatacgtgaccgacggcgcctgctcaggggacgagatcctcactatggagcttatgattatgaaagcgttgaaatggaggctgtcccctctgaccatcgtgagctggttaaatgtttatatgcaagttgcgtatctgaacgatctgcacgaggttcttttgcctcaatacccgcagcaaatcttcattcagattgcggagctgctagacctgtgcgtgctggacgtcgattgtctggagttcccgtatggaatcttggctgcctcggccttgtaccactttagctcctctgaacttatgcagaaagtttcaggataccagtggtgtgacatcgagaattgcgtgaagtggatggtgccttttgccatggtaatcagggagaccggctcaagcaagctgaagcacttccgcggggtcgccgacgaggacgcgcataacatccaaactcatagagacagcctggatcttctcgataaagcccgtgcaaaaaaggccatgctgtccgagcaaaatagggcctctccgcttccctccggcctgttaacaccaccccaatcgggtaagaagcagtctagcggacccgagatggcatag

SEQ ID NO: 295225 - DNA, 1188 bp, Artificial Sequence
  derived and/or modified sequence
atgaaggaggatggcggcgctgagttcagcgcccggagcaggaagaggaaggccaacgtgacagtgttcctgcaggaccctgatgaggagatggccaagattgacagaacagcccgggaccagtgtggcagccagccctgggacaacaatgctgtgtgtgccgacccctgcagcctcatccccaccccagacaaggaggatgatgacagagtgtaccccaacagcacctgcaagccccgcatcatcgcccccagccggggcagccccctgcctgtgctgtcctgggccaaccgggaggaggtgtggaagatcatgctgaacaaggagaagacctacctgcgggaccagcacttcctggagcagcaccccctgctgcagcccaagatgagggccatcctgctggactggctgatggaggtgtgtgaggtgtacaagctgcaccgggagaccttctacctggcccaggacttctttgaccgctacatggccacccaggagaatgtggtgaagaccctgctgcagctgattggcatcagcagcctcttcatcgccgccaagctggaggagatctacccacccaagctgcaccagtttgcctacgtgacagatggagcctgcagcggagatgagatcctgaccatggagctgatgatcatgaaggccctgaagtggaggctgagccccctgaccatcgtgtcctggctgaatgtgtacatgcaggtggcctacctgaatgacctgcacgaggtgctgctgccccagtacccccagcagatcttcatccagattgctgagctgctggacctgtgtgtgctggatgtggactgcctggagttcccctacggcatcctggccgccagcgccctgtaccacttcagcagcagcgagctgatgcagaaggtgtctggctaccagtggtgtgacatcgagaactgtgtgaagtggatggtgccctttgccatggtgatccgggagaccggcagcagcaagctgaagcacttccggggcgtggctgatgaagatgcccacaacatccagacccaccgggacagcctggacctgctggacaaggcccgggccaagaaggccatgctgtctgagcagaacagagccagccccctgcccagcggcctgctgaccccaccccagagcggcaagaagcagagcagcggccctgagatggcctag

SEQ ID NO: 295226 - DNA, 1188 bp, Artificial Sequence
  derived and/or modified sequence
atgaaggaggacggcggcgccgagttcagcgcccggagccggaagaggaaggctaatgttaccgtgttccttcaagaccccgacgaggagatggctaagattgataggacggcgagagaccagtgtggctcccagccttgggataacaatgccgtgtgtgccgatccctgcagcctgataccaacgcccgacaaagaagacgatgacagagtgtaccccaactcaacttgcaaacccaggatcatcgccccaagcagaggctctccactgcccgtgttaagttgggcaaatcgggaagaagtgtggaaaattatgcttaacaaagaaaaaacttacctacgcgatcagcacttcttagagcaacacccccttctgcagcccaaaatgagggccattctcctggattggctgatggaggtgtgcgaagtctacaagcttcatagggaaacattctatctggctcaggacttcttcgaccggtacatggcaacgcaggaaaacgtggtgaagactcttttacaacttattggcatctcatctctcttcatcgccgcaaaactggaggagatatacccaccaaaactccatcaatttgcttacgtcaccgatggagcatgttctggagatgaaattctgacaatggagttaatgattatgaaagcgctgaagtggagattgtctcctctcacgattgtttcctggcttaatgtctacatgcaggtggcctacctcaacgacctacacgaagttctattgccacagtatcctcagcagatcttcattcagatcgcagagcttctcgatttgtgcgtgcttgacgtagattgtctggaatttccgtatggcatactagccgcatctgccttgtatcacttttcatcttcggagctgatgcagaaagtttcaggttaccaatggtgcgacatcgagaactgtgtgaagtggatggtgccattcgccatggtgatcagggagaccggatcttctaagctgaagcatttccgcggtgtggcagatgaggatgctcataatattcagacccacagagacagcctcgaccttctagataaagcacgcgccaagaaggctatgctctcagagcaaaatagagccagtcctttgcctagtggactgctcacacctccgcaatcggggaagaagcagtcgagcggaccggaaatggcttag

SEQ ID NO: 295227 - DNA, 1188 bp, Artificial Sequence
  derived and/or modified sequence
atgaaagaggacggcggtgcagaattctccgcaaggtccagaaaaagaaaagccaacgtcaccgtattcctgcaggaccccgacgaggagatggcaaaaatagaccggactgctagggatcagtgtggcagccagccttgggataacaacgctgtgtgtgccgacccctgctcactcattcccacacctgacaaagaggatgatgacagagtgtaccctaacagcacttgtaaaccccgaattatagcccctagtaggggtagccccctgccggtcctatcctgggcaaatagggaggaagtttggaaaatcatgctcaataaggaaaaaacctacttacgggatcagcatttcttagagcaacatcccctcttgcaaccaaagatgcgagccattttgctagattggctcatggaagtgtgcgaggtttataagctgcatagagagaccttttacctggcccaggatttcttcgatcggtacatggcgacgcaggaaaatgttgtgaagactttactgcaactcattggtataagttccctattcatcgccgcaaagttagaggagatatacccgccaaagttgcaccaatttgcctatgtgacggatggagcctgctctggtgacgaaatcctcaccatggagctgatgatcatgaaggctttaaagtggaggctgtccccactcactatcgtgtcctggcttaacgtttacatgcaagtggcgtatctgaatgatctgcatgaagttttacttccccagtatcctcagcagattttcattcagatagccgagctcctggacctctgtgtcttggatgtggattgcctcgaatttccttacggaattctggcagcttctgcattataccacttttccagctctgagctgatgcaaaaggtgagcggctatcagtggtgcgacattgagaactgtgtgaaatggatggtcccttttgcaatggtgattcgggagaccggaagttccaaactgaagcactttcgcggtgtggccgacgaagatgcccacaatatacaaacgcaccgcgactctctggacctgttggacaaggccagagcaaaaaaagctatgttgagcgagcagaaccgcgcttcaccactcccttccggtttgctgacacccccacagtctggaaagaaacagagctctggtccagagatggcctag

SEQ ID NO: 295228 - DNA, 2028 bp, Artificial Sequence
  derived and/or modified sequence
gaacccgggtcagggagtcgggaccccggacctggcatagccgaacccgacctgggtcgccctgctgggcaccttagagctgatacatccccggcagaacctagggagatggaggactttgctcgaggagccgcctcccccgggccttctaggcccggtctggtgcccgttagtatcattggggccgaggatgaggactttgaaaatgagctggagactaatagcgaggagcaaaattcacagtttcagtctcttgaacaagtcaagagaaggcctgctcacctgatggccctcctacagcacgttgccttacagtttgaaccaggtcccctgttgtgctgtctgcacgcagatatgctgggtagtttgggtccaaaggaggccaagaaagccttccttgacttttaccacagctttctggaaaagaccgccgtcctgcgcgtaccagtgccgccaaatgttgccttcgaactagaccgtactcgagctgatctgataagcgaggacgtccagcggcgcttcgtccaggaagtggttcaatcccagcaggttgctgtgggccggcagcttgaagattttcgctccaagcggctgatgggcatgaccccttgggaacaggagcttgctcaacttgaggcctgggttggcagggaccgcgcctcgtatgaggctagagaaagacacgtggccgagcgcctgctgatgcacttggaagagatgcagcacaccataagcactgacgaggaaaagagtgccgccgtagtgaatgctatcgggctatacatgcggcatctgggcgtgagaacaaaaagcggggacaagaagtctggcaggaatttcttccgcaaaaaggttatgggaaatcgccgaagcgacgagcctgctaagactaagaaaggtctcagctccatcttagacgctgcgcggtggaataggggagagccccaggtgcccgactttagacatttgaaggcggaggtcgatgccgagaaaccaggagcaacagaccggaaaggtggggttggaatgccatcacgagacaggaatattggggcccctggccaagacacaccgggtgtatcccttcacccactcagcctagattcacccgaccgtgagccaggcgccgacgccccactggaactgggcgattcatcaccccagggtcccatgtcgctcgaaagcctggccccgcccgaatctactgacgaaggcgcagagacggagaggtgcccaggatggggggctggagccggaggtgtcgcttactgggctttggtaggaggctgtcgagtgactgccgctatttgtgcatgcctgtctcaggctcttgctccccatgcacccctcctgctatcaggctcaggacactcgagtcctttcttctttccatttctgatctcactgctgctgccacactgtcctcctttcctgctgtcgttcctcttccctttactgctccccctgttgcctttcttcaccaacccttctccacctccattcttgtccaccaccccaagtatcagttttatctcatctccactgctgagccacctacccccccccttgttcccgcctcattcctcacttacgtgggtcttttttcctcacctacccagcccttccgatttacctgccacattccactttttctccccaagtccattctcttttaagccaccatgccccctacccccgacaccgcggctggcaccggcctcctggtgtccatcattgaatcctcctcccctgtgtagcgttccgtggggtccttgcccgccttacagctggggtgctggctcagcatcttgcccaagtctgtgccgatgctttggcgatcctctcgtgggcgcaggacgctgggttcgtttccaccttggaccacctctgacactgtgcccatcgcttccgcgaaggtggaaaaggtgggtgcctggaccatgggtgggagagggtttagccccgcccccattcttacccgcccctcccctgtctccgtggcccttaccacccttgcactctctttag

SEQ ID NO: 295229 - DNA, 2028 bp, Artificial Sequence
  derived and/or modified sequence
gagcccggcagcggcagccgggaccccggccctggcattgctgagccagacctgggccggcctgctggccacctgcgggctgacaccagccctgctgagccccgggagatggaggactttgcccggggggccgccagccctggccccagccggcccggcctggtgcctgtgtccatcatcggggctgaagatgaagattttgaaaatgagctggagaccaacagcgaggagcagaacagccagttccagagcctggagcaggtgaagaggaggcctgcccacctgatggccctgctgcagcacgtggccctgcagtttgagcccggccccctgctgtgctgcctgcatgctgacatgctgggcagcctgggccccaaggaggccaagaaggccttcctggacttctaccacagcttcctggagaagacagctgtgctgcgggtgcctgtgcccccaaatgtggcctttgagctggacaggaccagggctgacctgatcagtgaagatgtgcagaggagatttgtgcaggaggtggtgcagagccagcaggtggccgtgggccggcagctggaggacttccgcagcaagaggctgatgggcatgaccccctgggagcaggagctggcccagctggaggcctgggtgggccgggaccgggccagctatgaggcccgggagcggcacgtggccgagcggctgctgatgcacctggaggagatgcagcacaccatcagcacagatgaggagaagtctgctgctgtggtgaatgccatcggcctgtacatgaggcacctgggcgtgaggaccaagagcggggacaagaagagcggcaggaacttcttcaggaagaaggtgatgggcaacagaagaagtgatgagcccgccaagaccaagaagggcctgagcagcatcctggatgctgcccgctggaacagaggagagccccaggtgcctgacttccgccacctgaaggccgaggtggatgctgagaagccaggggccacagacaggaagggcggcgtgggcatgcccagccgggacaggaacatcggggcccctggccaggacaccccaggagtgtccctgcaccccctgagcctggacagcccagaccgggagcccggggctgatgcccccctggagctgggggacagcagcccccagggccccatgagcctggagagcctggcccctcctgagagcacagatgaaggagctgagacagagcgctgccccggctggggcgctggggccggcggcgtggcctactgggccctggtgggcggctgccgggtgacagctgccatctgtgcctgcctgagccaggccctggcccctcatgcccccctgctgctgagcggcagcggccacagcagccccttcttcttccccttcctgatcagcctgctgctgccccactgcccccccttcctgctgtccttcctgttccccctgctgctgcccctgctgcccttcttcaccaaccccagccccccacccttcctgagcaccacccccagcatctccttcatcagcagccccctgctgagccacctgcccccacccctcttccccccccacagcagcctgacctgggtgttcttcccccacctgcccagccccagcgacctgcctgccaccttccacttcttcagccccagccccttctccttcaagccaccctgccccctgccccccaccccccggctggccccagcctcctggtgccccagcctgaaccccccacccctgtgcagcgtgccctggggcccctgccccccctacagctggggcgccggcagcgccagctgccccagcctgtgccgctgctttggagaccccctggtgggcgccggccgctgggtgcgcttccacctgggcccccccctgaccctgtgccccagcctgccccggcgctggaagcgctgggtgcccggcccctgggtgggggagggcctggcccccccacccttcctgcctgccccacccctgagcccctggcccctgccccccctgcacagcctgtag

SEQ ID NO: 295230 - DNA, 2028 bp, Artificial Sequence
  derived and/or modified sequence
gagcccggcagcggcagccgggaccccggccccggcatcgccgagccagacctgggtcgacccgccggtcacctcagagcagacacgtccccagccgagccgagagagatggaggattttgccagaggtgccgctagtcccggtccttcccgacctggtctggtgcccgtaagcataatcggggctgaggacgaagatttcgagaatgaactcgagacgaactcagaggaacaaaacagtcaattccagagtctcgagcaggtcaagagacgcccagctcacttaatggccttgttgcagcatgtagctctgcagttcgagccggggccattgctttgttgcctgcatgccgacatgctcgggtccctcgggccaaaagaggcaaaaaaggcttttctcgatttttaccactctttcttggagaaaactgccgttctcagagtgcccgtacccccaaatgtagcttttgagcttgaccggacgcgcgccgacctgatcagcgaagacgtacaacggcggttcgtccaagaagtagtgcagtctcagcaggtggctgtgggccggcaacttgaggattttcgatctaaacggctgatgggtatgactccatgggagcaggagctggcccagctcgaggcctgggtaggtcgggacagagcatcttacgaggcaagagagagacatgtggcagagcggcttttgatgcatctggaggagatgcagcatacgatctccacagatgaagagaaatctgctgctgtggtcaatgcgattgggctctatatgaggcacttaggagtccggacaaagtctggcgataagaagtccggtaggaactttttccggaagaaagtaatgggtaaccggaggtctgacgaaccggctaaaactaagaagggcctgtccagcatcttggatgctgcaagatggaacagaggagagccccaggttcccgactttcggcacctaaaagcagaggtagatgcggagaagccaggcgccactgacagaaaaggaggcgtaggaatgcctagccgcgatcggaatattggtgcacctggacaggatactccaggggttagtctgcacccactctccctcgattctccagatcgggagcctggcgcagacgctcccttggaactgggggattcctctccacagggtccaatgtccctggagtctctggcgccgcccgagtccaccgacgaaggcgccgagacggaacggtgtcctggatggggagctggtgcaggaggagtcgcttactgggctctcgtcggggggtgtcgggtcacagcggccatttgcgcctgcttgtctcaagcactagcgccccacgctcccctccttctatccgggtcagggcatagcagtccttttttctttcccttcctcatttcccttttattgccacattgtccaccttttctgctctccttcctgtttcccctcctgctccctctcctgccgttttttactaatcccagcccgcccccctttctttctaccactccttcaatctctttcattagcagccctctgttgtcacacctaccaccccctctgttcccacctcactctagtctcacctgggtattctttccccacctcccttcgcctagcgatctgccagctacattccattttttcagcccttccccctttagctttaagcctccgtgccccctcccccccactcctcgattagcacccgcctcctggtgtccttcgctgaaccccccccccctctgtagcgtgccttgggggccatgtcccccgtatagctggggagcagggtctgctagctgtccaagcctctgcagatgctttggcgacccactagttggtgcagggcgttgggtacggtttcacttgggcccccccctcactctttgtccctccctcccacgcagatggaagagatgggtgccgggaccctgggtcggcgaaggcctggcccctccacccttcctgcctgcgcccccgctctcaccgtggccactgccacctcttcattccctctag

SEQ ID NO: 295231 - DNA, 2028 bp, Artificial Sequence
  derived and/or modified sequence
gaacctggatcaggcagtagggacccaggtccaggtattgcagagccggacttaggccgacctgccggacacctgcgcgcagatacttcccccgctgaacctcgggagatggaagattttgcccgtggcgcagcctcacccggaccctcaaggcctggattagtgcctgtgtccattattggggctgaggatgaggatttcgagaacgagctggagacaaacagtgaagagcagaactctcagtttcagagtttggagcaggtcaagcggcgtcctgcccatctaatggcattactgcaacatgttgcactgcaatttgagcccggacccctcttgtgttgtctccacgcagacatgctcggatcgttgggccctaaagaagcaaaaaaggcgttcctggatttctaccattcatttcttgaaaaaacggctgttctgagagtgcccgtgcccccaaacgtggcctttgaactcgaccggacccgcgctgatctgatctctgaagacgttcagcgcagattcgtgcaggaagtggtgcagtctcagcaggttgctgtgggcagacaattggaggacttcaggtccaagaggctgatggggatgacaccttgggagcaggagctcgcacaactggaggcatgggtaggacgggacagagctagctacgaagctagggagcgtcatgtggccgagcggctcctgatgcatctggaagagatgcagcataccatctcaaccgatgaagagaagtctgccgctgtggtgaacgccatcggcctgtatatgaggcacctgggcgtcaggacaaagtccggagacaaaaagtctggacgtaattttttcaggaagaaggtgatgggcaacaggaggagtgacgaaccagccaaaaccaaaaaaggcctaagctccatccttgatgccgctagatggaatcggggagagccacaggtcccagactttagacatctcaaggctgaagtggatgccgaaaaacctggggcaaccgacaggaagggcggagtgggcatgccaagtagggatcgcaatattggagccccaggacaggacacccccggtgtctccctccaccctttatccctggactctcccgaccgcgaaccaggggcagatgcgccactggagttgggcgatagttctccccaaggccctatgagccttgagagtctggcaccccctgaatccactgacgaaggagccgaaactgagcgttgtcccggatggggcgcaggcgcaggcggagtggcctactgggctcttgtcggaggttgccgtgtgacagctgccatatgcgcgtgcctcagccaggctttggccccacacgcccctctcctgcttagtggaagtggccactcttcccctttctttttcccttttctgatctcactgctgctgccacactgccccccttttttactctcctttctgttcccacttctgttgcccctgctgcccttctttaccaatccgtcccctccaccattcctgagcactacccccagcatctccttcatcagctctccactcctgtcccatctgccaccacccttattccctccccattctagcctcacttgggtattcttcccccacctaccaagcccctccgacttgcctgcaactttccactttttttcaccctcgcccttctctttcaaaccaccatgccctctgccacctacccccagacttgccccagccagttggtgcccatcactgaatccacccccactttgtagcgtcccctggggcccatgcccaccctacagctggggagcaggtagtgccagttgcccatctctgtgcaggtgcttcggggaccccctggtgggcgcaggtaggtgggtgcgttttcacctgggaccaccacttaccctgtgcccttctctgccccgtcgatggaagcgctgggtgccgggtccatgggtcggcgaaggattggcaccacccccttttttgccagcaccccctctgtcaccatggcccctgccgcctctgcacagtctctag

SEQ ID NO: 295232 - DNA, 2028 bp, Artificial Sequence
  derived and/or modified sequence
gagccaggaagcgggagccgggacccagggcccgggatcgccgagcccgacctcgggcgccccgccggtcacctccgcgcggacaccagccctgcagagcccagggagatggaagacttcgcccgaggggcggcctccccaggcccctcccggcctggcctggttcccgtcagcatcatcggggctgaggatgaggattttgagaacgagctggagacaaactcagaagagcaaaacagccagttccagagcctggagcaggtgaagcggcgcccagcccacctcatggccctcctgcagcacgtggccctgcagtttgagccaggacccctgctttgctgtctgcatgccgacatgctgggctcactgggccccaaggaggccaagaaggccttcctggacttctaccacagcttcctggagaagacagcggttctccgggtgccggtccctcccaacgtcgcctttgaacttgaccgcactagggctgacctcatctccgaggatgtccagcggcggttcgtgcaggaggtggtgcaaagccagcaggtagccgtgggccggcagctggaggacttccgttccaagcggctcatgggcatgacgccctgggagcaggagctggcccagctggaggcttgggttgggcgggaccgagccagctacgaggcccgggagcggcacgtggcggagcggctgctcatgcacctggaggagatgcaacataccatctctaccgacgaagaaaagagtgctgccgtggtcaacgccattggcctgtacatgcgccaccttggggtgcggaccaagagtggagacaagaagtcggggaggaacttcttccggaaaaaggtgatggggaaccggcggtcggacgagcctgccaagaccaagaaggggctgagcagcatcctggatgccgcccgctggaaccggggagagccccaggttccagattttcgacacctcaaagcagaggttgatgccgagaagccaggtgctacagaccggaagggaggcgtggggatgccctctcgggaccggaatatcggggctcctgggcaggacacccctggagtctctctgcaccctctgtccctggacagcccagaccgggaaccaggtgctgacgcccccctggagctgggggactcatccccgcagggcccaatgagcctggagtccttggcgcccccagagagtaccgacgagggggccgaaaccgagaggtgcccaggctggggtgcaggggcgggaggtgtggcttactgggcgctggtgggtgggtgcagggtcaccgctgccatctgtgcctgcctgtcccaggctcttgctccccatgctcctctgctgctctctgggtctggccattcctctcccttcttctttccttttctcatctccctcctgcttcctcattgcccccctttccttttatccttcctttttcctctgctccttcctctccttccttttttcactaatccttctcctcctcccttcctctccaccactccttccatctcctttatttcctcccccctcctctctcaccttccccctcctctctttcctccccactcctctctcacctgggttttctttccccaccttccatccccctccgatctccctgccacttttcattttttcagcccttcccccttctctttcaagcccccctgccccctgccccccaccccccgcctcgctcctgcctcctggtgcccgtccctcaaccccccacccctctgctctgtgccctgggggccctgtcccccttacagctggggggcaggctctgcctcctgcccgtccttgtgccgctgctttggggaccctttggtgggtgcggggaggtgggtcaggttccatctgggcccacctctgaccctgtgcccctctctccccagaaggtggaagaggtgggtgcctgggccctgggtgggggaagggctagcccctcccccatttctcccagcccctcccctctccccatggccactccctccccttcactccctgtga

SEQ ID NO: 295233 - DNA, 2028 bp, Artificial Sequence
  derived and/or modified sequence
gagcccggcagcggcagcagagaccccggccccggcatcgccgagcccgacctgggcagacccgccggccacctgagagccgacaccagccccgccgagcccagagagatggaggacttcgccagaggcgccgccagccccggccccagcagacccggcctggtgcccgtgagcatcatcggcgccgaggacgaggacttcgagaacgagctggagaccaacagcgaggagcagaacagccagttccagagcctggagcaggtgaagagaagacccgcccacctgatggccctgctgcagcacgtggccctgcagttcgagcccggccccctgctgtgctgcctgcacgccgacatgctgggcagcctgggccccaaggaggccaagaaggccttcctggacttctaccacagcttcctggagaagaccgccgtgctgagagtgcccgtgccccccaacgtggccttcgagctggacagaaccagagccgacctgatcagcgaggacgtgcagagaagattcgtgcaggaggtggtgcagagccagcaggtggccgtgggcagacagctggaggacttcagaagcaagagactgatgggcatgaccccctgggagcaggagctggcccagctggaggcctgggtgggcagagacagagccagctacgaggccagagagagacacgtggccgagagactgctgatgcacctggaggagatgcagcacaccatcagcaccgacgaggagaagagcgccgccgtggtgaacgccatcggcctgtacatgagacacctgggcgtgagaaccaagagcggcgacaagaagagcggcagaaacttcttcagaaagaaggtgatgggcaacagaagaagcgacgagcccgccaagaccaagaagggcctgagcagcatcctggacgccgccagatggaacagaggcgagccccaggtgcccgacttcagacacctgaaggccgaggtggacgccgagaagcccggcgccaccgacagaaagggcggcgtgggcatgcccagcagagacagaaacatcggcgcccccggccaggacacccccggcgtgagcctgcaccccctgagcctggacagccccgacagagagcccggcgccgacgcccccctggagctgggcgacagcagcccccagggccccatgagcctggagagcctggccccccccgagagcaccgacgagggcgccgagaccgagagatgccccggctggggcgccggcgccggcggcgtggcctactgggccctggtgggcggctgcagagtgaccgccgccatctgcgcctgcctgagccaggccctggccccccacgcccccctgctgctgagcggcagcggccacagcagccccttcttcttccccttcctgatcagcctgctgctgccccactgcccccccttcctgctgagcttcctgttccccctgctgctgcccctgctgcccttcttcaccaaccccagccccccccccttcctgagcaccacccccagcatcagcttcatcagcagccccctgctgagccacctgcccccccccctgttccccccccacagcagcctgacctgggtgttcttcccccacctgcccagccccagcgacctgcccgccaccttccacttcttcagccccagccccttcagcttcaagcccccctgccccctgccccccacccccagactggcccccgccagctggtgccccagcctgaaccccccccccctgtgcagcgtgccctggggcccctgccccccctacagctggggcgccggcagcgccagctgccccagcctgtgcagatgcttcggcgaccccctggtgggcgccggcagatgggtgagattccacctgggcccccccctgaccctgtgccccagcctgcccagaagatggaagagatgggtgcccggcccctgggtgggcgagggcctggcccccccccccttcctgcccgccccccccctgagcccctggcccctgccccccctgcacagcctgtag

SEQ ID NO: 295234 - protein, 523 aa, Artificial Sequence
  derived and/or modified sequence
MALPQGLLTFRDVAIEFSQEEWKCLDPAQRTLYRDVMLENYRNLVSLDISSKCMMKEFSSTAQGNREVFHAGTSQRHESHHNGDFCFQDIDKDIHDIEFQWQEDERNGHEALMTKIKKLTGSTERYDQNYAGNKPVKYQLGFSFHSHLPELHIFHTEEKIDNQVVKSIHDASLVSTAQRISCRPETHISNDYGNNFLNSSLFTQKQEVHMREKSFQCNDSGKAYNCSSLLRKHQLIHLGEKQYKCDICGKVFNSKRYVARHRRCHTGEKPYKCNECGKTFSQTYYLTCHRRLHTGEKPYKCEECDKAFHFKSKLQIHRRIHTGEKPYKCNECGKTFSQKSYLTCHRRLHTGEKPYKCNECGKTFSRKSHFTCHHRVHTGEKPYKCNECSKTFSHKSSLTYHRRLHTEEKPYKCNECGKTFNQQLTLNICRLHSGEKPYKCEECDKAYSFKSNLEIHQKIHTEENPYKCNECGKTFSRTSSLTYHHRLHTGQKPYKCEDCDEAFSFKSNLERHRRIYTGEKLHV

SEQ ID NO: 295235 - DNA, 1572 bp, Artificial Sequence
  derived and/or modified sequence
atggccctgccccagggcctgctgaccttcagagacgtggccatcgagttcagccaggaggagtggaagtgcctggaccccgcccagagaaccctgtacagagacgtgatgctggagaactacagaaacctggtgagcctggacatcagcagcaagtgcatgatgaaggagttcagcagcaccgcccagggcaacagagaggtgttccacgccggcaccagccagagacacgagagccaccacaacggcgacttctgcttccaggacatcgacaaggacatccacgacatcgagttccagtggcaggaggacgagagaaacggccacgaggccctgatgaccaagatcaagaagctgaccggcagcaccgagagatacgaccagaactacgccggcaacaagcccgtgaagtaccagctgggcttcagcttccacagccacctgcccgagctgcacatcttccacaccgaggagaagatcgacaaccaggtggtgaagagcatccacgacgccagcctggtgagcaccgcccagagaatcagctgcagacccgagacccacatcagcaacgactacggcaacaacttcctgaacagcagcctgttcacccagaagcaggaggtgcacatgagagagaagagcttccagtgcaacgacagcggcaaggcctacaactgcagcagcctgctgagaaagcaccagctgatccacctgggcgagaagcagtacaagtgcgacatctgcggcaaggtgttcaacagcaagagatacgtggccagacacagaagatgccacaccggcgagaagccctacaagtgcaacgagtgcggcaagaccttcagccagacctactacctgacctgccacagaagactgcacaccggcgagaagccctacaagtgcgaggagtgcgacaaggccttccacttcaagagcaagctgcagatccacagaagaatccacaccggcgagaagccctacaagtgcaacgagtgcggcaagaccttcagccagaagagctacctgacctgccacagaagactgcacaccggcgagaagccctacaagtgcaacgagtgcggcaagaccttcagcagaaagagccacttcacctgccaccacagagtgcacaccggcgagaagccctacaagtgcaacgagtgcagcaagaccttcagccacaagagcagcctgacctaccacagaagactgcacaccgaggagaagccctacaagtgcaacgagtgcggcaagaccttcaaccagcagctgaccctgaacatctgcagactgcacagcggcgagaagccctacaagtgcgaggagtgcgacaaggcctacagcttcaagagcaacctggagatccaccagaagatccacaccgaggagaacccctacaagtgcaacgagtgcggcaagaccttcagcagaaccagcagcctgacctaccaccacagactgcacaccggccagaagccctacaagtgcgaggactgcgacgaggccttcagcttcaagagcaacctggagagacacagaagaatctacaccggcgagaagctgcacgtgtag

SEQ ID NO: 295236 - DNA, 1572 bp, Artificial Sequence
  derived and/or modified sequence
atggccctgcctcaaggtctgctgaccttcagagatgtggctattgagttctcgcaagaggaatggaagtgtttggaccccgctcagcggacgctctatagagacgttatgctagagaactataggaatctcgtgtccctggacatcagctcaaaatgcatgatgaaagagttttctagtactgctcagggaaatagagaggtcttccatgcgggaacgtcacagcgccacgaatctcatcacaatggggacttttgcttccaggatatcgacaaggatatccacgacattgaattccaatggcaggaggacgagcgcaatgggcacgaagccctgatgacgaagattaaaaagctgaccggcagcaccgagaggtacgatcaaaattatgctggaaacaagcccgtaaaatatcagctcggattctcgttccacagccacttacctgagctgcacatctttcacacagaagagaagatcgacaaccaagtggtaaagtccattcacgatgctagcctcgttagtacagcacaacggatctcctgccgtcctgagacccacatttctaacgactacgggaacaatttcctgaacagttccctgttcactcaaaaacaggaggtgcacatgcgagaaaagtctttccagtgtaatgacagcgggaaagcctacaattgcagtagcctcttgcgcaaacatcagctgatccacctgggtgagaagcaatataaatgcgacatttgtggcaaggtgttcaactctaaacgatacgtagcacgacacagaagatgtcacactggggagaaaccatacaaatgtaacgagtgcggaaagacattcagccagacttattatcttacttgtcatcggaggctacacacaggcgagaaaccttacaaatgcgaggagtgtgataaggcatttcactttaagtcaaaattgcaaatccataggcgcatccacactggcgaaaaaccctataaatgcaatgaatgcggcaagaccttctctcaaaaaagctatctaacttgtcaccgcaggctccacaccggagaaaaaccttacaagtgcaatgaatgtgggaaaaccttttctcgcaagtctcacttcacttgtcaccaccgcgtccacaccggcgaaaaaccctacaaatgcaacgagtgcagtaagaccttttcacataaaagctctctgacctaccaccgcagactgcacaccgaagagaagccctacaagtgcaacgagtgtggaaagacttttaaccagcagctgacacttaatatctgtcggctacacagcggcgaaaagccgtacaaatgcgaagaatgcgataaggcgtattcctttaagagcaacctggaaattcatcaaaagattcacactgaggagaacccgtacaagtgtaacgagtgtggcaaaactttctcccggacttcctcccttacctaccaccatcgtctacacacaggtcaaaagccttacaagtgcgaagattgtgacgaagctttctcttttaagtccaacctggagcgacatcgacgcatttataccggagagaagcttcatgtctag

SEQ ID NO: 295237 - DNA, 1572 bp, Artificial Sequence
  derived and/or modified sequence
atggccctgccccagggcctgctgaccttcagagatgtggccatcgagttcagccaggaggagtggaagtgcctggaccctgcccagaggaccctgtacagagatgtgatgctggagaactacagaaacctggtgtccctggacatcagcagcaagtgcatgatgaaggagttcagcagcacagcccagggcaaccgggaggtgttccacgccggcaccagccagagacatgagagccaccacaacggggacttctgcttccaggacatcgacaaggacatccatgacatcgagttccagtggcaggaggatgaaagaaatggacatgaggccctgatgaccaagatcaagaagctgaccggcagcacagaaagatatgaccagaactatgccggcaacaagcctgtgaagtaccagctgggcttctccttccacagccacctgcctgagctgcacatcttccacacagaggagaagattgacaaccaggtggtgaagagcatccatgatgccagcctggtgtccacagcccagaggatcagctgcaggcctgagacccacatcagcaatgactatggcaacaacttcctgaacagcagcctcttcacccagaagcaggaggtgcacatgagggagaagagcttccagtgcaatgacagcggcaaggcctacaactgcagcagcctgctgaggaagcaccagctgatccacctgggggagaagcagtacaagtgtgacatctgtgggaaggtgttcaacagcaagagatatgtggcccggcaccggcgctgccacactggagagaagccctacaagtgcaatgaatgtgggaagaccttcagccagacctactacctgacctgccaccggcggctgcacactggagagaagccctacaagtgtgaagaatgtgacaaggccttccacttcaagagcaagctgcagatccaccggcgcatccacactggagagaagccctacaagtgcaatgaatgtgggaagaccttcagccagaagagctacctgacctgccaccggcggctgcacactggagagaagccctacaagtgcaatgaatgtgggaagaccttcagcaggaagagccacttcacctgccaccaccgggtgcacactggagagaagccctacaagtgcaatgaatgttccaagaccttcagccacaagagcagcctgacctaccaccggcggctgcacacagaggagaagccctacaagtgcaatgaatgtgggaagaccttcaaccagcagctgaccctgaacatctgccgcctgcacagcggggagaagccctacaagtgtgaggagtgtgacaaggcctacagcttcaagagcaacctggagatccaccagaagatccacacagaggagaacccctacaagtgcaatgaatgtgggaagaccttcagcaggaccagcagcctgacctaccaccaccggctgcacacaggccagaagccctacaagtgtgaggactgtgatgaggccttctccttcaagagcaacctggagcggcaccggcgcatctacacaggagagaagctgcacgtgtag

SEQ ID NO: 295238 - DNA, 1572 bp, Artificial Sequence
  derived and/or modified sequence
atggccctgccccagggcctgctgaccttccgggacgtggccatcgaatttagtcaggaggagtggaaatgcctggatcctgcacaaaggaccctttaccgcgacgtaatgctggaaaattaccgaaacctggtgagtctagatatcagctcgaagtgtatgatgaaggagttcagtagcacggctcagggcaaccgcgaggtgtttcacgccggcacctcgcagagacacgaatctcatcacaatggggacttctgcttccaggatatagacaaggacattcatgacattgaattccagtggcaagaagacgagagaaacggtcatgaagctctcatgacgaagatcaagaagctgacaggcagcactgagaggtacgaccagaattacgctggtaataagcccgtgaaataccagctcggcttttcatttcactcccacctgcccgagctgcacatttttcatacagaggaaaagatcgataatcaagttgttaagtctattcatgatgcatctctggtttcaaccgcacagcgcatctcatgcaggccagaaacacacatctcaaatgattacggcaacaatttcctcaactcatccctgtttacacaaaaacaggaggtccacatgcgcgagaagtcatttcagtgtaatgattctggcaaggcatacaactgttctagtttgctcaggaagcatcagcttattcacttgggtgaaaaacagtacaaatgcgatatatgcggcaaggttttcaactctaaaagatacgtggctcggcacaggaggtgccatacaggtgaaaagccttacaaatgtaacgagtgtggtaagactttttcccaaacctactatctaacttgtcaccgtcggctccacaccggggaaaagccatataaatgcgaagaatgtgataaggccttccatttcaaatccaaactccagatacatagaaggatccacacgggagaaaaaccgtataaatgcaacgagtgtggcaagacattctcgcaaaaaagctacctgacatgtcaccgtaggctccacactggcgagaagccttacaagtgtaatgagtgcggtaagactttcagtcgcaagtctcatttcacatgccatcaccgggtgcacaccggcgaaaagccatacaagtgcaacgagtgtagcaagaccttttcccataaatccagccttacctatcatcggcgcctccacaccgaagagaagccttataaatgtaatgagtgtggaaaaactttcaatcaacagctgactcttaatatctgcagactgcattccggtgagaagccttataagtgtgaggagtgtgacaaagcctattccttcaagtccaatctggaaattcaccagaaaattcacaccgaggagaatccttacaagtgtaatgaatgcggcaagacgttttcgcggacaagttcccttacctaccaccacaggttgcacacagggcagaaaccatacaaatgcgaagactgtgacgaagctttcagtttcaaatcaaacctggagaggcaccgccggatatatactggggagaaactgcacgtttag

SEQ ID NO: 295239 - DNA, 1572 bp, Artificial Sequence
  derived and/or modified sequence
atggcacttccccagggactactgacttttagggacgtggctatcgagttcagccaggaagagtggaaatgtctggatccagcccaaagaaccctctatcgtgacgtcatgctagaaaattacagaaatctcgtgtctttggatattagctccaagtgtatgatgaaggagttctcaagtacagcgcaggggaaccgagaggtatttcatgcgggaacatcacagagacacgagagccaccacaatggagatttttgcttccaggatatagataaggatattcacgatattgagtttcaatggcaggaggacgaacgaaatgggcacgaggcactgatgactaagattaaaaaactgaccgggagcacggagcgctacgaccagaattatgccggaaacaaacccgtcaagtaccaactgggtttttcttttcattcacaccttcctgaactgcacattttccatactgaagaaaaaattgataatcaggtggttaaaagcatccacgacgcaagcctcgtttccaccgcccagcggatctcctgccggcctgagactcatatctcgaacgattatggcaacaactttttgaattcttccctctttacccagaagcaggaggtgcacatgcgagagaagtccttccaatgtaacgattccggcaaggcctacaattgctcgagcctgttaaggaagcatcagttgatacatctgggcgagaagcagtacaagtgtgatatctgtgggaaagtattcaactccaagcgatatgtcgctcggcaccgacgctgtcataccggggagaaaccttacaagtgtaatgaatgcggaaagacgttcagtcagacatactacctaacgtgccacagacgattgcacaccggcgagaaaccatacaagtgtgaggaatgtgataaggcattccactttaagtccaagcttcagattcatcggaggatacacacaggagaaaaaccctacaaatgcaatgagtgcgggaagaccttctcacagaagagttatctgacctgccacaggaggctccacactggcgaaaagccttataagtgtaatgagtgtgggaagactttctcccgcaagtcccactttacttgccaccatagagttcatactggggaaaaaccttacaagtgcaacgaatgctctaaaacattttcccataagagtagcttaacttaccacaggcgactgcacacagaagagaagccatataagtgcaacgaatgcggcaaaacgttcaaccaacagttaacactcaatatatgtagactgcactccggggaaaaaccctataagtgcgaagaatgcgacaaagcctacagctttaagagcaatctggaaatccaccagaagatccatactgaggaaaacccatataaatgtaacgagtgcgggaagacctttagccgaacttcctccctgacctaccaccacagactgcacactgggcagaaaccatacaaatgcgaggattgcgacgaagcttttagttttaaaagtaatctggaaaggcaccgcaggatctatacgggcgagaagctccatgtctag

SEQ ID NO: 295240 - DNA, 4569 bp, Artificial Sequence
  derived and/or modified sequence
gacccggaagcggacggcgtggagtgactatcccaccgccgcgggattgacttctaaagactcttggtatgtgaggaagaaacctggaagaggaagaggaaagcaaaggagtcagggatggctcttcctcagggtctattgacattcagggatgtggccatagaattctctcaggaggagtggaaatgcctggaccctgctcagaggactctatacagggacgtgatgctggagaattataggaacctggtctccctggatatctcttccaaatgcatgatgaaggagttctcgtcaacagcacaaggcaatagagaagtgttccatgcagggacatctcaaagacatgaaagtcatcacaatggagatttttgtttccaggatattgataaagatattcatgacattgagtttcagtggcaagaagatgaaagaaatggccatgaagcactcatgacaaaaatcaaaaagttgacaggtagtacagagcgatatgatcaaaattatgctggaaacaagcctgttaaatatcagcttggattcagctttcattcgcatctgcctgaactgcacatatttcacactgaagagaaaattgataatcaagttgtgaagtctatccacgatgcttccttggtttcaacagcccaaagaatttcttgtaggcctgaaacccatatttctaatgactatgggaataatttcctgaattcttcattattcacacaaaaacaggaagtacatatgagggaaaaatctttccaatgcaatgacagtggcaaagcctataattgtagctcactcttaaggaaacatcagttaatccatttaggagagaaacaatataaatgcgatatatgtggcaaggtctttaattcgaagcgatacgttgcacgccatcgtagatgtcacactggtgagaaaccttacaagtgtaatgagtgtggcaagaccttcagtcagacatattacctaacatgccatcgtagacttcatactggagagaaaccttacaaatgtgaagaatgtgacaaagctttccatttcaaatcaaagcttcaaatacataggagaattcatactggagagaaaccgtacaagtgtaatgagtgtggcaagacctttagtcagaagtcgtaccttacatgccatcgtaggcttcatactggagagaaaccttacaagtgtaatgagtgtggcaagacctttagtcggaagtcacattttacatgccatcatagagttcatactggagagaaaccttacaagtgtaatgagtgtagcaagacctttagtcacaagtcatctcttacataccatcgtagacttcatactgaagagaaaccttacaagtgtaatgagtgtggcaagaccttcaatcagcagttaacccttaacatttgtagacttcatagtggagagaaaccttacaaatgtgaagaatgtgacaaagcctacagtttcaaatcaaaccttgaaatacatcagaaaattcatactgaagagaatccttacaagtgtaatgagtgtggcaagaccttcagccggacgtcatcccttacataccatcatagacttcatactggacagaaaccttacaaatgtgaagattgtgatgaagctttcagtttcaaatcaaaccttgaaagacataggagaatttatactggagagaaactacacgtgtaatgagtgtggtaagaccttcaatcaggagttaacccttacatgccatcgtaggcttcatagtggagagaaaccttacaaatatgaagaacttgacaaagcttacaatttcaaatcaaaccttgaaatacatcagaaaattcgtactgaagagaatcttacaagtgtaatgagtgtggcaagaccttgagtcatacgtcatcttttgtgtaccatcataaacttcatagtggagagaccttacaaatgtgaagaatgtgaagaagctttctgtttcaaatccaaccttgaaagacataggagaattcacactggtgagaaaccttacaggtgtaatgagtgtggcaagaccttcagccagacctcatcccttacatgccattgtagacttcgtactggagagaaaccttacaaatgtgaagaatttgagttttccatttcaaatcaaaccttgaaagacaaaggagaattcatactggagagaaaccatacaagtgtaatgagtgtggcaagacctttagtcagaactcataccttacacgccatcgtagacttcatactggaggataccttacaaatgtaatgagtgtggcaagacctttagtcagaactcataccttacatgccatcatagacttcatactggagagataccttaaaagtgtagtgagtgtggcaagacctttagtctgaagtcataccttacgcaccatcgtagacttcatactggagaggtaccttacaaggataatgagtgtagaaaaacctttcatgggcagtcagcattttacaaatgtaatgattgtcaccaagtcttgagtaatgctacaactattgcaaatcattggagaatccataatgaagagagatcctacaagtgtgataaatgcagaataaatgcagaaaatttttcagacatccttcatacctttgcagttcatgggtgaagtcgtattagaaaccttacaaatgtgaagaatgtgatgaagctttcagattcaaatcaaaccttgatagtcatagaattcatactagagagaaaccttagcagtgtaatgaacgtggcaaggttttaaatcaaaaagcaaagcttgcacatcatcatagaattcatactggagataaacgttacaaatgtgaagcatgtgacaaagtttacagtcgcaaatcaagcctccaaagacaggagaattcatactggagagaaagcttacatatgtgaagaatgtcaccaagttttcagtcacactcaaaccttgaaagacacaggagaattcctactggagagatagcataaaaatgtaagagtttgtgacaaggctttcaggcataattcgcacctggcacaacatcctagaattcacattggagagaaagcttacaagtataatgaatgtgacaggtctttagtgggcagtcaacacttgtttaccatcaggcaatccatggtgtagggaaactttacttatgtaatgattgtcacaaagtcttcagttacactacaaccattgcgaatcattggagaatccataatgaagagagatcatactagtttaataaatttggcaaatttttcagacattgttcataacttgcagttcatcggcgaactcgtactggagagaaaccttacaaatgtcatgattgtgacaaggtctcagtcaagcttcattctatgcaaaacataggagaattcatacaggagagaaacctcacaagtgtgatgattgcggcaaagcctttaattcacattcacacctcactagacatcagagaatgcatactggacagaaatcttataaatgtcatcagtgtgccaaagtcttcagtctgagctcactccttgcaggatatcagaaaattcattttggagatagttgttccaaatacaatgtgtatagcaaaccatcaagcattaattgacactagagtcagttcagcattgacttgagtttgacttaacattgagttgaagccttaattgacattaaagtgtttatgttaagaggactgggccaggcacagtggctcacacctgtaatctgagcgctttgggaggccagcaccggtagatcacttgagttcaggagtttgaggtcagcctggccaacagacgtgagccattttcccagcctgttttttgtttctttaacaaaaactgatagggatttttttttttttttttgagatggagtttcactcttgttgcccaggctggactgcaatggagcgatcccagctcactacaacctccgcctcccaggttcaagcaattctcctgcctcagcctccagagtagctaggattacaggcatgagccaccacgcccagctaattttgtatttttagtagagatggggtttctccatgttggttaggctggtcttgaactcccagcctcagatgatccacccacctcggcctcccaaagtgctgggattacaggcgtgagccactgcgcccagccccagtgataaggatttttatgggtaccgtgttgaatctaaatcacattgggttatataatcatttaacaatattaatttttccaaaccataagtatgggttgtagctctatgtttctaatcattttgatcaatgtttgtagatttcaaggtaaaaacctctgacctttttacgtttatttctaagtatttcttactttaagttctccagccaatggaagtgttttaaaattttcttttaaagttgtttgttgttaaaagtatggaaattcaactaatttttggtgctgatactgtattgtgcaaatccactgaatatgttacttagttccagtagtattttggttgactctttgtgattttctgcacagaagatcatgtcgtctacaaacaaatataattttacttctttctttct

SEQ ID NO: 295241 - DNA, 522 bp, Artificial Sequence
  derived and/or modified sequence
ggacggcgtggagtgactatcccaccgccgcgggattgacttctaaagactcttggtatgtgaggaagaaacctggaagaggaagaggaaagcaaaggagtcagggatggctcttcctcagatatctcttccaaatgcatgatgaaggagttctcgtcaacagcacaaggcaatagagaagtgttccatgcagggacatctcaaagacatgaaagtcatcacaatggagatttttgtttccaggatattgataaagatattcatgacattgagtttcagtggcaagaagatgaaagaaatggccatgaagcactcatgacaaaaatcaaaaagttgacaggtagtacagagcgatatgatcaaaattatgctggaaacaagcctgttaaatatcagcttggattcagctttcattcgcatctgcctgaactgcacatatttcacactgaagagaaaattgataatcaagttgtgaagtctatccacgatgcttccttggtttcaacagcccaaagaatttct

SEQ ID NO: 295242 - protein, 128 aa, Artificial Sequence
  derived and/or modified sequence
MMKEFSSTAQGNREVFHAGTSQRHESHHNGDFCFQDIDKDIHDIEFQWQEDERNGHEALMTKIKKLTGSTERYDQNYAGNKPVKYQLGFSFHSHLPELHIFHTEEKIDNQVVKSIHDASLVSTAQRIS

SEQ ID NO: 295243 - DNA, 387 bp, Artificial Sequence
  derived and/or modified sequence
atgatgaaggagttcagcagcaccgcccagggcaacagagaggtgttccacgccggcaccagccagagacacgagagccaccacaacggcgacttctgcttccaggacatcgacaaggacatccacgacatcgagttccagtggcaggaggacgagagaaacggccacgaggccctgatgaccaagatcaagaagctgaccggcagcaccgagagatacgaccagaactacgccggcaacaagcccgtgaagtaccagctgggcttcagcttccacagccacctgcccgagctgcacatcttccacaccgaggagaagatcgacaaccaggtggtgaagagcatccacgacgccagcctggtgagcaccgcccagagaatcagctag

SEQ ID NO: 295244 - DNA, 387 bp, Artificial Sequence
  derived and/or modified sequence
atgatgaaggaatttagttcaacagcacagggcaatagagaagtctttcatgcaggaacaagtcagcgccatgaatcgcaccacaacggtgatttttgctttcaagacatcgataaggacatccacgatatcgagttccaatggcaggaggacgagcggaatggtcacgaggcactgatgacaaaaattaagaagctgactggctctactgagagatacgatcagaactatgctggaaacaagcccgtgaaatatcagttaggcttctcatttcactcccacctccccgagcttcacatattccacacagaggaaaagatagataaccaggtggtcaaatccatccacgatgcctcacttgtgtctacggctcagagaataagctag

SEQ ID NO: 295245 - DNA, 387 bp, Artificial Sequence
  derived and/or modified sequence
atgatgaaggagttcagcagcacagcccagggcaaccgggaggtgttccacgccggcaccagccagagacatgagagccaccacaatggagacttctgcttccaggacatcgacaaggacatccatgacatcgagttccagtggcaggaggatgaaagaaatggccacgaggccctgatgaccaagatcaagaagctgaccggcagcacagaaagatatgaccagaactatgccggcaacaagcctgtgaagtaccagctgggcttctccttccacagccacctgcctgagctgcacatcttccacacagaggagaagattgacaaccaggtggtgaagagcatccatgatgccagcctggtgtccacagcccagaggatctcctag

SEQ ID NO: 295246 - DNA, 387 bp, Artificial Sequence
  derived and/or modified sequence
atgatgaaggagttcagcagcaccgcccagggcaaccgggaggtgttccacgcaggcacctctcagagacacgagagtcatcacaatggtgatttttgctttcaggacatcgataaggacatccacgatatagagttccaatggcaggaggacgagcggaacggacatgaggcactgatgacaaagatcaagaagctgactgggtctacagagagatacgatcaaaactatgccgggaataagcccgttaagtaccagctcggcttctcattccactcccacctacccgagctgcacatttttcatactgaggagaaaatcgacaatcaggtcgtgaaatctatccatgacgcaagcttggtgagtaccgcacaacgcatctcttag

SEQ ID NO: 295247 - DNA, 387 bp, Artificial Sequence
  derived and/or modified sequence
atgatgaaggaattcagcagcaccgcccaggggaaccgagaggtgtttcacgccggtacttcgcagagacatgagagccaccacaacggcgacttttgcttccaggacattgacaaagacattcatgacatcgagttccagtggcaggaggacgaacgtaacggtcacgaggctttgatgacaaagattaagaagctgacgggatctaccgaaagatatgaccagaactacgcaggtaataagccagtgaaataccagctcggcttcagtttccacagccatctgccagagttgcatatctttcatacagaggaaaaaattgacaatcaggtggttaagtctatccacgatgccagcctggtctcaaccgcacaacggatctcatag

SEQ ID NO: 295248 - protein, 205 aa, Artificial Sequence
  derived and/or modified sequence
MAARDATSGSLSEESSALDLPSACDIRDYVLQGPSQEANSEAFSSLEFHSFPYSSDVDPDTSNLNIEQNNSWTAENFWLDPAVKGQSEKEEDDGLRKSLDRFYEMFGHPQPGSANSLSASVCKCLSQKITQLRGQESQKYALRSFQMARVIFNRDGCSVLQRHSRDTHFYPLEEGSTSLDDEKPNPGLSKDITHFLLQQNVMKDL

SEQ ID NO: 295249 - protein, 151 aa, Artificial Sequence
  derived and/or modified sequence
MAARDATSGSLSEESSALDLPSACDIRDYVLQGPSQEANSEAFSSLEFHSFPYSSDVDPDTSNLNIEQNNSWTAENFWLDPAVKGQSEKEEDDGLRKSLDRFYEMFGHPQPGSANSLSASVCKCLSQKITQLRGQESQKYALRQQNVMKDL

SEQ ID NO: 295250 - protein, 200 aa, Artificial Sequence
  derived and/or modified sequence
MESHSCSPSWSTMTISAHCNLRLPSASQSVGITGVSHHIWPRIFYMTMAARDATSGSLSEESSALDLPSACDIRDYVLQGPSQEANSEAFSSLEFHSFPYSSDVDPDTSNLNIEQNNSWTAENFWLDPAVKGQSEKEEDDGLRKSLDRFYEMFGHPQPGSANSLSASVCKCLSQKITQLRGQESQKYALRSFQMARVIFN

SEQ ID NO: 295251 - protein, 121 aa, Artificial Sequence
  derived and/or modified sequence
MAARDATSGSLSEESSALDLPSACDIRDYVLQGPSQEANSEAFSSLEFHSFPYSSDVDPDTSNLNIEQNNSWTAENFWLDPAVKGQSEKEEDDGLRKSLDRFYEMFGHPQPGSANSLSASV

SEQ ID NO: 295252 - protein, 106 aa, Artificial Sequence
  derived and/or modified sequence
MEVCSCCPGWSATVSAHCNLRFASSTSQSAGITGMSQCAWPTFTFLTMAARDATSGSLSEESSALDLPSACDIRDYVLQGPSQEANSEAFSSLEFHSFPYSSDVDP

SEQ ID NO: 295253 - DNA, 627 bp, Artificial Sequence
  derived and/or modified sequence
agttttctggagtgctttggaggagagatggagtctcactcttgtagcccaagctggagtacaatgacaatctcagctcactgcaacctccgtcttccatcagcttcccaaagtgttgggattacaggcgtaagccaccacatctggcctaggattttctatatgactatggcagccagggacgccacttcaggcagcctgtcagaggagagcagtgctttggacctgccatcagcgtgtgacataagagattacgtcctgcagggacccagccaagaagccaacagcgaggctttcagttctttggaattccattcttttccttattcttctgatgtggatccagacaccagtaacttaaatatagaacaaaataactcctggaccgctgagaacttctggcttgaccctgctgtgaaaggccagtcagagaaggaagaggatgatggccttcggaaatccctggatagattctatgaaatgtttggtcatccacagccaggctctgcaaactcactctctgcatctgtctgcaagtgcctgtctcagaaaatcactcaactaagaggccaggagagccaaaagtatgccctccgcagttttcaaatggcccgggtgatcttcaac

SEQ ID NO: 295254 - DNA, 501 bp, Artificial Sequence
  derived and/or modified sequence
ggcggcttttctcctcagttttctggagtgctttggaggagagacaaggtcttgctatgttgcccaggctggtcttgaactcctggcctcaagcgatcctcccaacttggcctcgcaaagtgctgggactacaggactatggcagccagggacgccacttcaggcagcctgtcagaggagagcagtgctttggacctgccatcagcgtgtgacataagagattacgtcctgcagggacccagccaagaagccaacagcgaggctttcagttctttggaattccattcttttccttattcttctgatgtggatccagacaccagtaacttaaatatagaacaaaataactcctggaccgctgagaacttctggcttgaccctgctgtgaaaggccagtcagagaaggaagaggatgatggccttcggaaatccctggatagattctatgaaatgtttggtcatccacagccaggctctgcaaactcactctctgcatctgtc

SEQ ID NO: 295255 - DNA, 603 bp, Artificial Sequence
  derived and/or modified sequence
atggagagccacagctgcagccccagctggagcaccatgaccatcagcgcccactgcaacctgagactgcccagcgccagccagagcgtgggcatcaccggcgtgagccaccacatctggcccagaatcttctacatgaccatggccgccagagacgccaccagcggcagcctgagcgaggagagcagcgccctggacctgcccagcgcctgcgacatcagagactacgtgctgcagggccccagccaggaggccaacagcgaggccttcagcagcctggagttccacagcttcccctacagcagcgacgtggaccccgacaccagcaacctgaacatcgagcagaacaacagctggaccgccgagaacttctggctggaccccgccgtgaagggccagagcgagaaggaggaggacgacggcctgagaaagagcctggacagattctacgagatgttcggccacccccagcccggcagcgccaacagcctgagcgccagcgtgtgcaagtgcctgagccagaagatcacccagctgagaggccaggagagccagaagtacgccctgagaagcttccagatggccagagtgatcttcaactag

SEQ ID NO: 295256 - DNA, 603 bp, Artificial Sequence
  derived and/or modified sequence
atggagagccactcctgtagcccttcttggtccaccatgactattagcgcccactgtaatctgcgcctgccatccgcctcacagagcgtgggaataacaggagtgagccatcacatctggcccaggatcttctacatgactatggcagcgagggacgcgactagtggctccctcagtgaggagagttcggccctggacctgccatccgcttgcgacatccgggactacgtgctacagggaccgagccaagaagcaaacagcgaggcattttcctccttagagttccactcctttccatactcctcagatgtggaccctgacacttcaaatctcaatatcgaacagaataattcttggactgctgagaacttttggttggaccctgcagtgaaaggtcagtcagagaaggaagaagacgatgggttaagaaagagcctggacaggttctatgagatgttcggccaccctcagcccggatcagctaactctttgtcagcctccgtttgtaagtgcctctctcaaaagattacccaactgcggggccaagagagccagaaatatgcactgcgctccttccagatggcgagggtcatattcaactag

SEQ ID NO: 295257 - DNA, 603 bp, Artificial Sequence
  derived and/or modified sequence
atggagagccacagctgcagccccagctggagcaccatgaccatcagcgcccactgcaacctgcggctgcccagcgccagccagagcgtgggcatcactggagtgagccaccacatctggccccgcatcttctacatgaccatggccgccagagatgccaccagcggcagcctgtctgaggagagcagcgccctggacctgcccagcgcctgtgacatccgggactatgtgctgcagggccccagccaggaggccaacagcgaggccttcagcagcctggagttccacagcttcccctacagcagtgatgtggaccctgacaccagcaacctgaacatcgagcagaacaacagctggacagctgagaacttctggctggaccctgctgtgaagggccagagcgagaaggaggaggatgatggcctgaggaagagcctggaccgcttctatgagatgtttggccacccccagcccggcagcgccaacagcctgagcgcctctgtgtgcaagtgcctgagccagaagatcacccagctgcggggccaggagagccagaagtatgccctgcgctccttccagatggcccgggtcatcttcaactag

SEQ ID NO: 295258 - DNA, 603 bp, Artificial Sequence
  derived and/or modified sequence
atggagagccacagctgcagccccagctggagcaccatgaccatctccgcacactgtaatctgcggctgccgtctgcctctcaaagcgtaggcatcactggcgtgagccaccacatatggcctcggatcttttatatgacaatggctgcaagggatgccacttccggaagtctctctgaagagtcaagtgcactggacctgcccagcgcttgcgatatccgggactacgtcctacagggaccatcacaggaagcgaactctgaggctttctcaagtttggagttccacagcttcccatactctagtgatgtggaccccgatactagtaacctcaacatcgaacaaaataatagttggaccgcggaaaacttttggctagatccggcggtgaaaggccagtctgagaaggaagaggatgacggcctgcgcaaatcgttagaccgcttttatgagatgtttggccaccctcagcctggctcagccaacagccttagcgcatctgtgtgcaagtgcttgagtcaaaaaattactcagcttaggggacaagaatcgcaaaagtacgcacttcgttcctttcagatggccagggtgatctttaactag

SEQ ID NO: 295259 - DNA, 603 bp, Artificial Sequence
  derived and/or modified sequence
atggaatcacatagctgctcgccaagctggagcactatgaccatcagcgcacactgcaaccttcgcctgccgagtgcaagtcagtccgtgggcatcacaggcgtttcacaccatatctggccacgaattttttatatgaccatggctgcaagggacgccacatccggctccctctctgaggaatcgtccgctctcgatctgccttctgcatgcgacatccgggattacgtgcttcaggggccatcgcaggaggccaacagcgaggccttcagttctctagagtttcatagcttcccgtatagctctgacgttgaccctgacacgtccaacctaaacatcgagcagaataatagctggaccgccgagaacttctggctcgaccccgctgtaaagggccagtctgaaaaggaggaggatgatggactgagaaaatctctcgatcgcttttatgaaatgttcggacacccccagcccggatccgcaaattctctcagtgccagtgtttgcaaatgcttgtcccaaaagatcactcagcttcggggtcaagagagccagaaatacgccttgaggtcctttcaaatggctcgtgtgatcttcaattag

SEQ ID NO: 295260 - DNA, 1374 bp, Artificial Sequence
  derived and/or modified sequence
atgctcggggccgtgaagatggagggacatgagccctcagactggagcagttactatgcagaacccgagggatactcctctgtaagtaatatgaacgccggcctcggaatgaatgggatgaatacctatatgagcatgagcgcggccgcaatggggagcggaagtggcaatatgtctgccgggagcatgaacatgtcctcttacgtcggagctggaatgtccccctcactggccgggatgtctccgggcgctggagccatggctggcatgggtggctccgccggggcagctggagtcgccggaatgggccctcacctcagcccttctctaagcccgctggggggccaggcagcgggagcaatgggcggactcgcaccgtatgctaacatgaatagtatgagcccgatgtatggtcaggccggtctgtcccgggctagggaccctaaaacttatcgccgatcttacacgcatgctaaacccccctactcatacattagcctcattacaatggcaatccagcagtccccaaacaagatgctcaccttatcggagatttatcaatggatcatggatctcttcccattttaccgccagaaccagcagcggtggcagaattcaattagacattccctgtccttcaacgactgctttctcaaggttcctcgatccccggataagccaggaaaggggagcttttggactctacacccagatagtggaaatatgttcgaaaatggatgctaccttcgtcgacaaaagaggtttaagtgtgaaaagcagcttgccctgaaggaagcagcaggcgccgccggcagcggcaagaaggctgctgccggcgcacaggccagtcaagcacagctgggcgaagccgcaggacccgcttcagaaacaccagccggaaccgagtcaccacacagctctgcatcgccctgccaggaacacaagcgaggtggcttgggcgagctgaaaggcacccccgctgccgcgttgtcccctcccgagcccgctccctctcctgggcagcaacaacaggccgcggcacatctgctgggcccgcctcaccaccctggcctgccccctgaagcacaccttaaacctgagcaccactacgcatttaaccacccttttagtataaataacttgatgtcctctgagcagcagcaccatcacagtcaccaccatcatcagccccacaagatggacctgaaggcttacgagcaggtaatgcactatcctggatatggcagccccatgcctggaagtttagcaatgggacccgtcactaacaaaactggcctcgatgcctctccacttgcagccgacaccagttactaccagggtgtttattcccgacccattatgaatagttcttag

SEQ ID NO: 295261 - DNA, 1374 bp, Artificial Sequence
  derived and/or modified sequence
atgttaggcgcagtcaagatggaaggccatgaacccagcgactggagtagttactacgctgagcctgagggctattcaagcgtcagcaatatgaacgccggactggggatgaacgggatgaatacctacatgagtatgtccgccgctgcaatgggaagcgggagcgggaacatgagtgcagggagtatgaatatgagcagttatgtgggcgctgggatgtctccttctctagctggtatgagtccaggcgccggtgctatggcaggtatggggggatcggccggagcggctggagtggccgggatgggccctcatctgtccccctccctcagtcccctcggtggccaagcagccggcgcaatgggaggtctcgctccatacgccaacatgaacagcatgagtcctatgtacggtcaagctggtctctctagggcccgcgatcccaagacctataggagatcatacacccacgcgaagccgccttatagttatataagcctgatcactatggcaatacagcagtcgcctaataaaatgcttacgctgtcggaaatttatcagtggataatggacttgttccctttctacaggcagaatcagcagcgatggcagaactctatcaggcactcacttagttttaatgactgtttcttgaaggtgccccggtctccggataagcccggtaagggtagtttctggacacttcatccagattcaggtaatatgttcgaaaacgggtgctacctgcggaggcaaaagaggtttaaatgtgagaaacagctggcactgaaagaggccgccggagcagctggtagcgggaagaaggcagcagcaggtgctcaggcctcccaggcacagctcggcgaggctgctggaccagcatcggaaactcccgccggcactgagagtccacactcgagtgcttcgccctgccaagaacacaaaaggggtggcctgggcgagttaaagggcactccagctgcggctttatcaccgcctgagccggccccgtcacccggacagcaacagcaggccgccgcacacctgctcggcccaccacaccaccctggactgccacctgaggcacatctcaaacccgaacatcactacgcgttcaaccaccccttttccattaataatcttatgagttccgagcaacaacatcaccatagccaccaccaccaccaaccacacaagatggatctgaaagcctacgaacaggttatgcattaccctggatacggaagcccaatgccaggcagcctcgccatggggcctgtgacaaacaagaccgggctcgatgcatcaccactcgcggccgacacatcatattaccaaggcgtctactcgcgtcctattatgaactcctcttag

SEQ ID NO: 295262 - DNA, 1374 bp, Artificial Sequence
  derived and/or modified sequence
atgctgggcgctgtgaagatggagggccacgagcccagcgactggagcagctactatgcagagcctgagggctacagctctgtgagcaacatgaatgccggcctgggcatgaatggcatgaacacctacatgtccatgtctgctgctgccatgggcagcggcagcggcaacatgtctgctggctccatgaacatgagcagctatgtgggcgccggcatgagccccagcctggccggcatgagccctggggccggggccatggccggcatgggcggcagcgctggagctgctggggtggccggcatgggcccccacctgagccccagcctgagccccctgggcggccaggccgccggggccatgggcggcctggccccctatgccaacatgaacagcatgagccccatgtatggccaggccggcctgagccgggcccgggaccccaagacctaccgccgcagctacacccacgccaagccaccctacagctacatcagcctcatcaccatggccatccagcagagccccaacaagatgctgaccctgtctgagatctaccagtggatcatggacctcttccccttctaccggcagaaccagcagcgctggcagaacagcatccgccacagcctgtccttcaatgactgcttcctgaaggtgcccaggagcccagacaagccaggcaagggcagcttctggaccctgcacccagattctggcaacatgtttgaaaatggctgctacctgcggcggcagaagcgcttcaagtgtgagaagcagctggccctgaaggaggccgccggggccgccggcagcggcaagaaggctgctgctggggcccaggccagccaggcccagctgggggaggccgccggccctgccagcgagaccccagctggaacagagagcccccacagcagcgccagcccctgccaggagcacaagagaggaggcctgggggagctgaagggcaccccagctgctgccctgagccccccagagcccgcccccagccctggccagcagcagcaggccgccgcccacctgctgggccccccccaccaccctggcctgcccccagaggcccacctgaagccagagcaccactacgccttcaaccaccccttcagcatcaacaacctgatgagcagcgagcagcagcaccaccacagccaccaccaccaccagccccacaagatggacctgaaggcctatgagcaggtgatgcactacccaggctacggcagccccatgcctggcagcctggccatgggccctgtgaccaacaagacaggcctggatgccagccccctggccgctgacaccagctactaccagggcgtgtacagccggcccatcatgaacagcagctag

SEQ ID NO: 295263 - DNA, 1374 bp, Artificial Sequence
  derived and/or modified sequence
atgctgggcgccgtgaagatggagggccacgagcccagcgactggtcttcttattacgccgagccagaagggtacagcagtgtgagtaatatgaacgccggcctcggtatgaacggcatgaatacgtatatgtctatgtccgctgctgcaatggggagtggttccggcaatatgagcgcagggtcgatgaatatgtcctcctatgtcggggctgggatgagcccttctttagccggaatgtccccaggtgctggcgctatggccggcatggggggcagtgctggtgctgctggggtggccggaatgggcccccatctgtctccgagtctgtccccactcggggggcaggctgccggggctatgggtggtttggccccctatgcaaatatgaacagcatgagccccatgtacggacaggccggtctgtcccgggcaagggatccaaagacctatcgccgaagctatactcatgcaaaacctccctactcttacatcagcctgatcacaatggcaatccaacagtcccctaataagatgttgactttgagtgagatctatcaatggatcatggatctgttcccgttttaccgacagaatcagcagcgctggcagaacagcattcgccacagcttgtcatttaatgactgtttcctcaaggtgccccgcagccccgacaaaccaggcaaggggtctttttggacacttcacccagattcaggaaacatgtttgagaacgggtgctatctcagacgacaaaagcgatttaagtgcgaaaagcagctcgccctcaaagaggctgctggtgccgcaggctctggcaaaaaagcagcagcgggtgcacaggctagtcaggctcagcttggcgaggccgccggaccagcatccgagacccctgccggcactgagagcccgcacagcagcgcctctccatgtcaagagcataagagaggcgggcttggagaacttaagggcacgcccgcagcggcacttagccctcctgagcccgccccctctcctgggcagcagcagcaggccgccgcccatctgctgggcccacctcatcaccccggcctgcctcccgaggctcaccttaagcccgagcatcattatgcattcaatcatccatttagcatcaacaatcttatgtcttccgagcagcagcaccaccattctcatcaccatcatcaaccacataagatggacttaaaggcgtacgaacaggtgatgcactatcccgggtatgggagccctatgccagggtccctggcaatgggcccagtcactaataaaactgggctggacgcgtccccactggccgccgatacaagttactaccagggagtctacagccgaccaattatgaattcttcatag

SEQ ID NO: 295264 - DNA, 1374 bp, Artificial Sequence
  derived and/or modified sequence
atgctgggcgccgtgaagatggagggccacgagcccagcgactggagttcgtattacgccgagccagagggatactcatcagtttcaaacatgaatgcagggttaggtatgaacggcatgaacacttacatgagcatgtcagctgccgccatgggttcaggcagcggcaacatgtccgccgggtctatgaatatgtcgtcctacgtgggagcgggaatgtcgccatctcttgctggaatgtccccaggcgcaggagctatggccggcatgggtggctccgccggggcggcaggggtggcaggaatggggccacacttatcgcccagcctgtctcctctgggagggcaggctgcgggggctatgggaggccttgcaccatatgccaacatgaattcaatgtctccaatgtatggccaggctggcctcagtcgggcacgagatcctaagacttacagacggtcctatacccacgcaaagcccccgtattcttacatctctctgataaccatggccatccaacaaagtccgaataagatgcttacgctcagtgaaatttatcagtggatcatggacttgtttcccttttacaggcagaaccaacagcggtggcagaacagcattcggcattcactatcttttaacgactgcttcttgaaagtgccccgcagcccagacaaacctgggaagggctccttctggaccctgcaccctgactcaggcaacatgtttgagaatggatgctaccttcggcgccagaagaggtttaagtgcgagaaacagttagccctgaaggaagccgcgggagccgctggcagcggaaagaaagccgcggctggggcccaggcctcgcaggcgcaactgggtgaggctgctggaccagcctcagagacccccgccgggacagaaagtccacactcctcagcatccccttgccaggaacataaaaggggaggcctaggggaactaaaagggacgcccgccgccgcactgagtccgcccgaacccgctccctctccaggacagcagcagcaggcggccgctcacctcctcggaccacctcaccaccctggattaccaccggaggcccaccttaaacctgaacaccactatgcctttaatcaccctttctccattaacaacctgatgtctagtgaacagcagcaccaccactctcaccatcatcaccaacctcacaagatggatctgaaggcttatgaacaggtaatgcattaccccgggtatggcagccccatgccgggaagcctggctatgggtccagtgactaataaaacaggactggacgcgtcaccactggcagcagacacatcatactaccagggcgtgtacagccggcccattatgaattcttcatag

SEQ ID NO: 295265 - DNA, 1374 bp, Artificial Sequence
  derived and/or modified sequence
atgcttggcgctgttaagatggaaggacatgaaccctctgactggagttcctactatgcagagcccgagggctacagcagcgtgtccaatatgaacgccggactgggaatgaacgggatgaatacttacatgagcatgtccgctgccgcaatggggagcgggtctggaaatatgtccgccggttctatgaacatgtctagctacgtcggggctggcatgtctccttctctggccggtatgtcacccggagcaggcgctatggccggaatgggtggttcagccggagcagcgggagtcgcaggcatgggtcctcatctttccccctcactttcccctttggggggtcaagcggcaggtgcaatgggcggtctcgcaccatacgctaacatgaacagtatgtcccccatgtacgggcaggctggtctgtcacgggctcgggatccaaagacgtataggcggtcttacacgcacgccaaacctccctactcttacatatctctcattacgatggccatacaacaaagccctaataaaatgcttaccctgagcgaaatataccagtggatcatggatctctttcccttctatcgacagaatcagcagcggtggcagaatagcatccgtcactcactctcgtttaatgattgttttctgaaggttccccgatcaccagataagcccggaaaggggtccttttggaccctccaccctgactccgggaacatgtttgagaacggatgttacctcagacgtcagaaacgtttcaagtgtgagaaacagttagccctgaaggaggccgcaggtgcagccggttccggaaaaaaggccgcagctggggcacaggcgagccaggcacagctgggggaggcagcaggacccgcttcagaaacccctgccggtaccgagagtccacactcttccgcctcaccttgccaggaacataagcgaggtgggttgggcgagctaaagggcacacctgccgctgctctgagtcctcccgagcctgccccatctcctggccagcaacaacaggcagcggctcacttgcttggcccaccacatcatccgggactgcctcccgaggcgcatttaaaacccgagcaccattatgcctttaaccatcccttctccatcaataaccttatgtcctctgaacagcaacatcaccattcacaccatcatcaccagccccacaaaatggacctgaaggcctacgaacaggtgatgcattacccaggctacggatcccctatgcccggatccctcgcgatgggtcccgttacgaacaaaaccggtttagacgcctcacccctggcggctgacacaagttattatcagggcgtttacagtcgcccaatcatgaattccagttag

SEQ ID NO: 295266 - DNA, 1374 bp, Artificial Sequence
  derived and/or modified sequence
atgctgggagccgtgaagatggaagggcacgagcccagtgactggtcaagttactatgccgaaccagaaggatatagctcggtgagcaatatgaatgctgggttaggaatgaacggcatgaacacatatatgtcgatgtccgccgctgctatggggagcggaagcggcaatatgagcgcaggcagtatgaacatgtctagttatgtcggcgctggcatgagtccttctcttgcagggatgagcccgggtgccggtgccatggccggaatgggaggatctgccggtgcggcaggggtggctggaatgggccctcatctgtctccgagtctgagtccgcttggagggcaggccgctggagcaatgggagggcttgctccctacgcgaacatgaatagtatgtcgccaatgtacggccaggcagggctgtcaagagcacgggatcctaagacttaccggaggagctatactcacgctaaaccaccttacagctacatctctctgatcacgatggccatccagcagtctccaaacaaaatgttaacactaagcgagatctaccagtggatcatggatttattccctttctacagacaaaaccagcagaggtggcagaattcaatcagacactccctgtcttttaacgattgcttcctcaaagtgcccaggtcacccgacaagccgggaaagggaagcttctggacgctgcatcccgattctggtaatatgttcgagaacggatgctatctgcgacgtcagaaacgcttcaaatgtgagaagcagctggcgcttaaagaagcggcaggcgctgccggtagtgggaagaaggccgctgctggagcccaagcgagtcaggcacagttgggagaggccgcaggcccagcaagcgagacacctgcagggaccgaaagtccccattctagtgctagcccgtgtcaggagcataaacggggagggcttggcgagctaaagggaactcccgctgcagccttatcccccccagagcccgctcccagcccagggcagcagcagcaagctgccgcacacctgctcggccctccacaccatcccggtctgccgcctgaggcccacttgaaaccggagcatcactacgccttcaaccacccattctccattaataacctaatgtctagtgagcaacagcaccatcacagccatcatcaccaccaaccacacaagatggatcttaaggcttacgaacaagtaatgcactatccgggttacggctcacctatgccaggatcactggctatgggaccggtgaccaataagacagggctcgacgcaagccccctggctgcagatacgtcttactatcagggtgtgtattctcgtccaattatgaacagctcttag

SEQ ID NO: 295267 - DNA, 1374 bp, Artificial Sequence
  derived and/or modified sequence
atgctgggcgccgtgaagatggagggccacgagcccagcgactggagcagctactacgccgagcccgagggctacagcagcgtgagcaacatgaacgccggcctgggcatgaacggcatgaacacctacatgagcatgagcgccgccgccatgggcagcggcagcggcaacatgagcgccggcagcatgaacatgagcagctacgtgggcgccggcatgagccccagcctggccggcatgagccccggcgccggcgccatggccggcatgggcggcagcgccggcgccgccggcgtggccggcatgggcccccacctgagccccagcctgagccccctgggcggccaggccgccggcgccatgggcggcctggccccctacgccaacatgaacagcatgagccccatgtacggccaggccggcctgagcagagccagagaccccaagacctacagaagaagctacacccacgccaagcccccctacagctacatcagcctgatcaccatggccatccagcagagccccaacaagatgctgaccctgagcgagatctaccagtggatcatggacctgttccccttctacagacagaaccagcagagatggcagaacagcatcagacacagcctgagcttcaacgactgcttcctgaaggtgcccagaagccccgacaagcccggcaagggcagcttctggaccctgcaccccgacagcggcaacatgttcgagaacggctgctacctgagaagacagaagagattcaagtgcgagaagcagctggccctgaaggaggccgccggcgccgccggcagcggcaagaaggccgccgccggcgcccaggccagccaggcccagctgggcgaggccgccggccccgccagcgagacccccgccggcaccgagagcccccacagcagcgccagcccctgccaggagcacaagagaggcggcctgggcgagctgaagggcacccccgccgccgccctgagcccccccgagcccgcccccagccccggccagcagcagcaggccgccgcccacctgctgggccccccccaccaccccggcctgccccccgaggcccacctgaagcccgagcaccactacgccttcaaccaccccttcagcatcaacaacctgatgagcagcgagcagcagcaccaccacagccaccaccaccaccagccccacaagatggacctgaaggcctacgagcaggtgatgcactaccccggctacggcagccccatgcccggcagcctggccatgggccccgtgaccaacaagaccggcctggacgccagccccctggccgccgacaccagctactaccagggcgtgtacagcagacccatcatgaacagcagctag

SEQ ID NO: 295268 - protein, 502 aa, Artificial Sequence
  derived and/or modified sequence
MIQLLRRGEVQWVEEEKRDLEGIRESLLRVKEARAGGDEDGEELEKAQLRFFEFKRRQLVKLVNLEKDLVQQKDILKKEVQEEQEILECLKCEHDKESRLLEKHDESVTDVTEVPQDFEKIKPVEYRLQYKERQLQYLLQNHLPTLLEEKQRAFEILDRGPLSLDNTLYQVEKEMEEKEEQLAQYQANANQLQKLQATFEFTANIARQEEKVRKKEKEILESREKQQREALERALARLERRHSALQRHSTLGMEIEEQRQKLASLNSGSREQSGLQASLEAEQEALEKDQERLEYEIQQLKQKIYEVDGVQKDHHGTLEGKVASSSLPVSAEKSHLVPLMDARINAYIEEEVQRRLQDLHRVISEGCSTSADTMKDNEKLHNGTIQRKLKYEITVLDETWTVFRRYSRFREMHKTLKLKYAELAALEFPPKKLFGNKDERVIAERRSHLEKYLRDFFSVMLQSATSPLHINKVGLTLSKHTICEFSPFFKKGVFDYSSHGTG

SEQ ID NO: 295269 - DNA, 1509 bp, Artificial Sequence
  derived and/or modified sequence
atgatccagctgctgagaagaggcgaggtgcagtgggtggaggaggagaagagagacctggagggcatcagagagagcctgctgagagtgaaggaggccagagccggcggcgacgaggacggcgaggagctggagaaggcccagctgagattcttcgagttcaagagaagacagctggtgaagctggtgaacctggagaaggacctggtgcagcagaaggacatcctgaagaaggaggtgcaggaggagcaggagatcctggagtgcctgaagtgcgagcacgacaaggagagcagactgctggagaagcacgacgagagcgtgaccgacgtgaccgaggtgccccaggacttcgagaagatcaagcccgtggagtacagactgcagtacaaggagagacagctgcagtacctgctgcagaaccacctgcccaccctgctggaggagaagcagagagccttcgagatcctggacagaggccccctgagcctggacaacaccctgtaccaggtggagaaggagatggaggagaaggaggagcagctggcccagtaccaggccaacgccaaccagctgcagaagctgcaggccaccttcgagttcaccgccaacatcgccagacaggaggagaaggtgagaaagaaggagaaggagatcctggagagcagagagaagcagcagagagaggccctggagagagccctggccagactggagagaagacacagcgccctgcagagacacagcaccctgggcatggagatcgaggagcagagacagaagctggccagcctgaacagcggcagcagagagcagagcggcctgcaggccagcctggaggccgagcaggaggccctggagaaggaccaggagagactggagtacgagatccagcagctgaagcagaagatctacgaggtggacggcgtgcagaaggaccaccacggcaccctggagggcaaggtggccagcagcagcctgcccgtgagcgccgagaagagccacctggtgcccctgatggacgccagaatcaacgcctacatcgaggaggaggtgcagagaagactgcaggacctgcacagagtgatcagcgagggctgcagcaccagcgccgacaccatgaaggacaacgagaagctgcacaacggcaccatccagagaaagctgaagtacgagatcaccgtgctggacgagacctggaccgtgttcagaagatacagcagattcagagagatgcacaagaccctgaagctgaagtacgccgagctggccgccctggagttcccccccaagaagctgttcggcaacaaggacgagagagtgatcgccgagagaagaagccacctggagaagtacctgagagacttcttcagcgtgatgctgcagagcgccaccagccccctgcacatcaacaaggtgggcctgaccctgagcaagcacaccatctgcgagttcagccccttcttcaagaagggcgtgttcgactacagcagccacggcaccggctag

SEQ ID NO: 295270 - DNA, 1509 bp, Artificial Sequence
  derived and/or modified sequence
atgattcagcttttgcggaggggcgaggtacaatgggtcgaggaagaaaagcgagacctggaaggtattcgagagtcactgctgcgcgtaaaggaagccagagctggcggagacgaagatggggaagagctggaaaaagcccagctgcggttctttgagtttaagaggaggcagttagtcaagcttgttaacctagagaaagatctggtacagcagaaggacatcttaaaaaaggaagttcaggaagaacaagagattttggaatgcctgaagtgcgagcacgataaagagtccaggctacttgaaaagcatgacgagagtgttacagatgtcacagaggtgccccaggattttgaaaagattaagcctgtggagtatcgcctccagtacaaagaacgacaactgcagtacctgctccagaaccatctcccaacgcttcttgaggaaaaacagagagcctttgagatcctggacaggggtcccctgtcccttgacaatactctgtaccaagtagagaaagaaatggaggagaaggaagagcagctggcccagtaccaggctaatgcaaaccagctccagaagttacaggccacctttgagttcactgccaatattgcccggcaagaggaaaaggtccgaaagaaggagaaggaaatcctagaatcaagagagaagcagcagcgcgaagctcttgaacgggctctggcccggttagagcgccgccactccgccctccagcgtcactctaccctgggcatggagattgaggagcagcgtcagaaacttgccagcctgaattcgggtagccgcgagcaatcaggcctgcaagcctccttggaggctgaacaagaggcactggagaaggatcaggagagactggagtacgaaattcagcagctgaagcaaaaaatttacgaagtcgatggggtgcagaaggatcaccatggcactctcgaggggaaggtcgccagtagttctctgcccgtgtcggcagagaaatcacacctagttcctcttatggacgccaggatcaacgcctacatcgaggaggaggtacagagaagacttcaggatctgcaccgcgtcattagtgaagggtgttccacatcagctgacacgatgaaagataatgagaaactgcacaatggcaccatacaaagaaaactgaaatatgagatcaccgttctggatgaaacctggaccgtgttccgtcgttacagcagatttcgagaaatgcataagaccttgaagttgaaatacgcagagctcgcagccctcgaattcccgcctaaaaagctttttggcaacaaagatgaaagagtgatcgccgagcgtcggtcacacctggaaaagtatctgcgcgattttttttctgtaatgcttcagtcggctacaagtccactccatattaacaaagtgggtttaaccctatccaagcataccatctgcgagttttcccccttctttaaaaagggcgtcttcgactacagttcccacggaactggatag

SEQ ID NO: 295271 - DNA, 5137 bp, Artificial Sequence
  derived and/or modified sequence
gcaggtggggctgccgcggaactccaggtccggccgggagcagaggggcgggggcgagagggaagtgggcgggagccgcgatctgagtagccagcgtcgccggcgaccgcggagttctgggctagtgggaccccgcgcgggctggttcgggatgagcgatggcatcggtcaaggtggccgtgagggtccggcccatgaatcgcagggaaaaggacttggaggccaagttcattattcagatggagaaaagcaaaacgacaatcacaaacttaaagataccagaaggaggcactggggactcaggaagagaacggaccaagaccttcacctatgacttttctttttattctgctgatacaaaaagcccagattacgtttcacaagaaatggttttcaaaaccctcggcacagatgtcgtgaagtctgcatttgaaggttataatgcttgtgtctttgcatatgggcaaactggatctggaaagtcatacactatgatgggaaattctggagattctggcttaatacctcggatctgtgaaggactcttcagtcggataaatgaaaccaccagatgggatgaagcttcttttcgaactgaagtcagctacttagaaatttataacgaacgtgtgagagatctacttcggcggaagtcatctaaaaccttcaatttgagagtccgtgagcatcccaaagaaggcccttatgttgaggatttatccaaacatttagtacagaattatggtgacgtagaagaacttatggatgcgggcaatatcaaccggaccaccgcagcgactgggatgaacgacgtcagtagcaggtctcatgccatcttcaccatcaagttcactcaggctaaatttgattctgaaatgccatgtgaaaccgtcagtaagatccacttggttgatcttgccggaagtgagcgtgcagatgccaccggagccaccggggttaggctaaaggaagggggaaatattaacaagtccctcgtgactctggggaacgtcatttctgccttagctgatttatctcaggatgctgcaaatactcttgcaaagaagaagcaagttttcgtgccttacagggattctgtgttgacttggttgttaaaagatagccttggaggaaactctaaaactatcatgattgccaccatttcacctgctgatgtcaattatggagaaaccctaagtactcttcgctatgcaaatagagccaaaaacatcatcaacaagcctaccattaatgaggatgccaacgtcaaacttatccgtgagctgcgagctgaaatagccagactgaaaacgctgcttgctcaagggaatcagattgccctcttagactcccccacagctttaagtatggaggaaaaacttcagcagaatgaagcaagagttcaagaattgaccaaggaatggacaaataagtggaatgaaacccaaaatattttgaaagaacaaactctagccctcaggaaagaagggattggagttgttttggattctgaactgcctcatttgattggcatcgatgatgaccttttgagtactggaatcatcttatatcatttaaaggaaggtcagacatacgttggtagagacgatgcttccacggagcaagatattgttcttcatggccttgacttggagagtgagcattgcatctttgaaaatatcggggggacagtgactctgatacccctgagtgggtcccagtgctctgtgaatggtgttcagatcgtggaggccacacatctaaatcaaggtgctgtgattctcttgggaagaaccaatatgtttcgctttaaccatccaaaggaagccgccaagctcagggagaagaggaagagtggccttctgtcctccttcagcttgtccatgaccgacctctcgaagtcccgtgagaacctgtctgcagtcatgttgtataaccccggacttgaatttgagaggcaacagcgtgaagaacttgaaaaattagaaagtaaaaggaaactcatagaagaaatggaggaaaagcagaaatcagacaaggctgaactggagcggatgcagcaggaggtggagacccagcgcaaggagacagaaatcgtgcagctccagattcgcaagcaggaggagagcctcaaacgccgcagcttccacatcgagaacaagctaaaggatttacttgcggagaaggaaaaatttgaagaggagaggctgagggaacagcaggaaatcgagctgcagaagaagagacaagaagaagagacctttctccgcgtccaagaagaactccaacgactcaaagaactcaacaacaacgagaaggctgagaagtttcagatatttcaagaactggaccagctccaaaaggaaaaagatgaacagtatgccaagcttgaactggaaaaaaagagactagaggagcaggagaaggagcaggtcatgctcgtggcccatctggaagagcagctccgagagaagcaggagatgatccagctcctgcggcgtggggaggtacagtgggtggaagaggagaagagggacctggaaggcattcgggaatccctcctgcgggtgaaggaggctcgtgccggaggggatgaagatggcgaggagttagaaaaggctcaactgcgtttcttcgaattcaagagaaggcagcttgtcaagctagtgaacttggagaaggacctggttcagcagaaagacatcctgaaaaaagaagtccaagaagaacaggagatcctagagtgtttaaaatgtgaacatgacaaagaatctagattgttggaaaaacatgatgagagtgtcacagatgtcacggaagtgcctcaagatttcgagaaaataaagccagtggagtacaggctgcaatataaagaacgccagctacagtacctcctgcagaatcacttgccaactctgttggaagaaaagcagagagcatttgaaattcttgacagaggccctctcagcttagacaacactctttatcaagtagaaaaggaaatggaagaaaaagaagaacagcttgcacagtaccaggccaatgcaaaccagctgcaaaagctccaagccacctttgaattcactgccaacattgcacgtcaggaggaaaaagtgaggaaaaaggaaaaggagattttggagtccagagagaagcagcagagagaggcgctggagcgggccctggccaggctggagaggagacattctgcgctgcagaggcactccaccctgggcatggagattgaagagcagaggcagaaacttgccagtctgaacagtggcagcagagagcagtcagggctccaggctagcctggaggctgagcaggaagccctggagaaggaccaggagaggttagaatatgaaatccagcagctgaaacagaagatttatgaggtcgatggtgttcaaaaagatcatcatgggaccctggaagggaaggtggcttcttccagcttgccagtcagtgctgaaaaatcacacctggttcccctcatggatgccaggatcaatgcttacattgaagaagaagtccaaagacgccttcaggatttgcatcgtgtgattagtgaaggctgcagtacatctgcagacacgatgaaggataatgagaaacttcacaatggcaccattcaacgtaaactaaaatatgagattactgtcctagatgagacatggactgtattcaggcgttacagtcgttttcgagaaatgcataaaacattgaagttaaagtatgcagagcttgctgcccttgaatttcctccaaagaaactatttggaaataaggatgaacgtgtgattgctgagagacgaagtcacttagagaaatacctcagggactttttcagcgtgatgctccagtccgcaacatctcccctccacatcaacaaagtgggactgactctctcgaaacataccatttgtgagttttcaccattcttcaagaaaggagtctttgactacagcagccacgggacggggtagagccaggggtgatggaggaaccaccacagcagtgccttctcgtcgaagcgggctccgatgcagggcagctcccccatgcgaggatccgggtctgcctcctcctgctgaagacagacatgcagcagcgggcccgggccacctcacgtttccatacctagtgcctgagtttggggatgggatgctctgcctgctgatgtggccctgacaggcagccgttaccgttccattgcggttgaacgtggccttttcccacagtgcttccttctcactgcgcagcaaagttcgtcccctgtggcaagatagatgtggttgggccatcgtgggttccctgagcccagccagcctgggacctcccaaagtgggtggcttaccagaccacccttaaatgactttcatctggtttcctctttcaccaaaatatactcgtattttttatatttcttccatgtggctggctatattccaagaaaagcattttaaattatttcattgtatttttttctttttttccctcatttgaatcagaacttttatataaaacccaaacactgatgtttacacagaatttcatattctgcaaaagggattttttgatccaatcatgactgtagtcttccatgcttgacaaattggatgtagacaacattacttaaaacttctataaatccctacaattaggatatttatttaaccttgaatattcaagaacattctcccaaatctaaatggctactgtgcattcttgagctttttctgctaagcacaaaatgaacgcaaagctaaatgcatatttttaagtattattcacattttttgttacagaatctattggatctttggctggaaaactagaatttatagcagtttattaatgataccttaaattactcaggacttaatgtagcattgcacttctgtgtacagtaaaactgctttgttttactaaagagaaaaatgtgagtggaaaaaatatgtatgtggtatatactcaaatgtatataattctatctatagatttatatatgtatacattctgtacagtagttccatcaaaatatgtaataattcacaccaattttattaaatgtatttgctttttcaaaatttaaattgagctgctatcaatattaaatgaagttatggcatct

SEQ ID NO: 295272 - DNA, 1509 bp, Artificial Sequence
  derived and/or modified sequence
atgatccagctgctgcggcggggggaggtgcagtgggtggaggaggagaagagggacctggagggcatccgggagagcctgctgcgggtgaaggaggcccgggctggaggagatgaagatggagaggagctggagaaggcccagctgcgcttctttgagttcaagaggcggcagctggtgaagctggtgaacctggagaaggacctggtgcagcagaaggacatcctgaagaaggaggtgcaggaggagcaggagatcctggagtgcctgaagtgtgaacatgacaaggagagccggctgctggagaagcatgatgaatctgtgacagatgtgacagaggtgccccaggactttgagaagatcaagcctgtggagtaccgcctgcagtacaaggagcggcagctgcagtacctgctgcagaaccacctgcccaccctgctggaggagaagcagagggcctttgagatcctggaccggggccccctgagcctggacaacaccctgtaccaggtggagaaggagatggaggagaaggaggagcagctggcccagtaccaggccaatgccaaccagctgcagaagctgcaggccacctttgagttcaccgccaacatcgcccggcaggaggagaaggtgaggaagaaggagaaggagatcctggagagccgggagaagcagcagcgggaggccctggagcgggccctggcccggctggagcggcggcacagcgccctgcagaggcacagcaccctgggcatggagattgaggagcagaggcagaagctggccagcctgaacagcggcagccgggagcagagcggcctgcaggccagcctggaggccgagcaggaggccctggagaaggaccaggagcggctggagtatgagatccagcagctgaagcagaagatctatgaggtggatggagtgcagaaggaccaccacggcaccctggagggcaaggtggccagcagcagcctgcctgtgtctgctgagaagagccacctggtgcccctgatggatgcccgcatcaatgcctacatcgaggaggaggtgcagaggcggctgcaggacctgcacagggtcatcagcgagggctgcagcaccagcgctgacaccatgaaggacaatgagaagctgcacaacggcaccatccagaggaagctgaagtatgagatcaccgtgctggatgagacctggacagtgttccgccgctacagccgcttccgggagatgcacaagaccctgaagctgaagtatgcagagctggccgccctggagttcccccccaagaagctgtttggaaacaaggatgagcgggtgattgctgagaggaggagccacctggagaagtacctgcgggacttcttctctgtgatgctgcagagcgccaccagccccctgcacatcaacaaggtgggcctgaccctgagcaagcacaccatctgtgagttcagccccttcttcaagaagggcgtgtttgactacagcagccatggaactggatag

SEQ ID NO: 295273 - DNA, 1509 bp, Artificial Sequence
  derived and/or modified sequence
atgatccagctgctgcggcggggcgaggtgcagtgggtggaggaggagaagagggacctcgagggcatcagggaaagcctcctgcgcgtgaaggaagcacgtgctggtggcgacgaggatggagaggaattggagaaggctcagttgcggttcttcgagtttaagcgaaggcaactggtgaaactggtcaaccttgagaaagacctggtgcaacagaaagatattctgaagaaagaggtgcaagaagaacaggagattctggaatgtctgaagtgtgagcacgataaggagtcacggctgttagagaagcacgacgagtcagtgacagatgtcaccgaggtgccacaagactttgaaaagataaaacccgtagagtacaggctccagtataaagagagacagttacagtacttactccagaatcatcttcccaccctgctggaggagaaacaacgagcctttgaaattttggaccgtgggcccctgagcctggataacactttgtatcaggtggagaaggagatggaggaaaaggaggagcaactcgcccagtaccaagcaaatgcaaatcagttgcagaagctgcaggcgaccttcgagtttacagctaatatcgcgcgacaggaggagaaagtccgaaagaaggagaaagaaatactggagtctcgggagaagcagcagagggaggcgctggagagagcgctggccagacttgagcgccgtcactctgctctccaaaggcattcaactctcggaatggagatcgaggagcaaagacagaagctcgcttcccttaatagtgggtctagagagcagagtgggcttcaggctagcttagaggctgagcaggaggctcttgaaaaagaccaggagaggcttgaatatgagattcaacaactaaagcaaaaaatctacgaagtagacggggttcagaaggatcatcatggtacactggagggcaaggtggcgagtagctccctccctgtgtctgcagagaagtctcacttggtcccattgatggatgccaggattaatgcctacattgaggaagaggtccaacgtcgactgcaggatctgcacagagtgatcagtgagggttgctccacatctgccgacacaatgaaggacaatgagaagcttcataacggtactattcaacgaaaattgaagtatgaaataactgtgctggacgaaacttggaccgtgtttcggaggtacagtcggttccgggaaatgcacaaaacattaaaacttaaatacgcagaattagccgcactcgaatttccacctaagaaactgttcgggaacaaagacgaacgcgtaatagccgagcgcaggagccaccttgaaaaatatttgcgggatttcttcagtgtaatgctgcaaagtgctacctcccccctccacatcaacaaggtcggtttgactctgtcaaagcacacaatctgcgagtttagtcctttctttaaaaagggggtgtttgattacagtagccacgggaccggttag

SEQ ID NO: 295274 - DNA, 1509 bp, Artificial Sequence
  derived and/or modified sequence
atgattcagcttctgcggaggggtgaggtgcagtgggtggaagaggaaaagcgcgatcttgaggggatccgcgaaagcctgcttagggtgaaggaagccagggccggaggagatgaggatggggaggaactggaaaaagcccaattgagattcttcgagttcaagcgcagacagttggtgaagctggtgaatctggaaaaagacctggtccagcagaaggatatcttgaagaaggaagtccaagaggagcaagaaatactggagtgcttaaaatgtgagcacgacaaggagagtcgcctgctggaaaaacacgatgaatccgtcacagacgtaactgaggtgcctcaggacttcgaaaagatcaagcctgtcgaatatagactgcagtacaaagagcggcagcttcagtacttactccagaaccacttgcctactctcctcgaagagaaacaaagggcctttgagattctggaccggggacccctctccctggacaacaccctctaccaggtggaaaaggaaatggaagaaaaggaggagcagcttgcgcaatatcaggcaaatgcgaaccagttgcagaagctacaggctacatttgaattcacagccaatatagcccgacaggaggagaaggttaggaagaaagagaaggaaattcttgagtctagggagaaacagcaacgtgaggccctggagcgggcactagccagactggagcgtcggcacagcgccctgcagcggcactctactctcggaatggaaatagaagagcagcgacagaagctcgctagccttaactctggatcaagagaacagtccggcctccaagcctctttagaagccgagcaggaggctctagaaaaggaccaggaaaggctcgagtatgaaattcagcagctcaagcaaaaaatttacgaagtcgatggagtccagaaagaccatcatggaactctcgaaggaaaggtcgcttcatcttccctgcccgtaagcgctgagaaatctcatctagtcccattaatggatgcccgaattaacgcgtacatagaggaagaggtgcaaagacgtttacaagacctccatcgcgtgatcagcgagggctgttcaacttcagctgacaccatgaaagacaatgaaaaactgcacaacgggaccattcagcgcaaactaaaatacgaaattaccgttctcgacgaaacgtggaccgtgttccgtcgttactctaggtttagagaaatgcacaagacattgaagctgaagtacgcagagctggcagccctggagttccctccaaagaagctcttcgggaacaaggacgagcgggtaattgccgagcgacgatcccacctggagaagtacttgcgggatttcttctctgttatgttgcagtcggctacttcaccacttcacattaataaagtgggcctgactttaagcaagcatacaatctgtgaattctcccctttttttaagaaaggtgtcttcgattacagttctcatggaacaggttag

SEQ ID NO: 295275 - protein, 259 aa, Artificial Sequence
  derived and/or modified sequence
MTKMKMRRKRKARGAKEHGAVAVERVTKSPGETSKPRPFAGGGYRLGAAPEEESAYVAGEKRQHSSQDVHVVLKLWKSGFSLDNGELRSYQDPSNAQFLESIRRGEVPAELRRLAHGGQVNLDMEDHRDEDFVKPKGAFKAFTGEGQKLGSTAPQVLSTSSPAQQAENEAKASSSILIDESEPTTNIQIRLADGGRLVQKFNHSHRISDIRLFIVDARPAMAATSFILMTTFPNKELADESQTLKEANLLNAVIVQRLT

SEQ ID NO: 295276 - DNA, 780 bp, Artificial Sequence
  derived and/or modified sequence
atgaccaagatgaagatgagaagaaagagaaaggccagaggcgccaaggagcacggcgccgtggccgtggagagagtgaccaagagccccggcgagaccagcaagcccagacccttcgccggcggcggctacagactgggcgccgcccccgaggaggagagcgcctacgtggccggcgagaagagacagcacagcagccaggacgtgcacgtggtgctgaagctgtggaagagcggcttcagcctggacaacggcgagctgagaagctaccaggaccccagcaacgcccagttcctggagagcatcagaagaggcgaggtgcccgccgagctgagaagactggcccacggcggccaggtgaacctggacatggaggaccacagagacgaggacttcgtgaagcccaagggcgccttcaaggccttcaccggcgagggccagaagctgggcagcaccgccccccaggtgctgagcaccagcagccccgcccagcaggccgagaacgaggccaaggccagcagcagcatcctgatcgacgagagcgagcccaccaccaacatccagatcagactggccgacggcggcagactggtgcagaagttcaaccacagccacagaatcagcgacatcagactgttcatcgtggacgccagacccgccatggccgccaccagcttcatcctgatgaccaccttccccaacaaggagctggccgacgagagccagaccctgaaggaggccaacctgctgaacgccgtgatcgtgcagagactgacctag

SEQ ID NO: 295277 - DNA, 780 bp, Artificial Sequence
  derived and/or modified sequence
atgaccaagatgaagatgcggcgcaagaggaaggccaggggcgcgaaggaacatggcgccgtagcggtggagagagtgaccaagtctccaggggaaacttccaagccccggccctttgccggaggcggttatcggctgggtgctgcgcctgaggaggaatctgcctatgtggcaggggagaagagacaacatagttcccaggacgtgcacgtcgtcttgaagttatggaagtccgggttttccttggataacggagagctgaggtcataccaggacccatcaaatgctcaatttctggaatctattaggagaggggaagtgcccgccgagcttcgacgactggcacatggcggccaggtgaacctcgatatggaggaccaccgggatgaggattttgtgaagcctaagggtgcgtttaaggctttcacaggcgagggacagaagctgggctcaaccgcacctcaggtgctctcaactagcagcccagctcagcaggccgagaacgaagccaaagcctcctcttcaattctgatcgacgagagtgagccaaccacgaatattcagatccgacttgccgatggaggaagacttgtccaaaaatttaaccattcccatcgcatttctgacatccgactgttcatcgtggatgcccgccccgccatggccgctacgtcctttattctcatgactacattccctaacaaagagctcgccgatgaaagccagaccctgaaagaggctaacctcttaaatgccgttatcgttcagagacttacctag

SEQ ID NO: 295278 - DNA, 780 bp, Artificial Sequence
  derived and/or modified sequence
atgaccaagatgaagatgaggaggaagaggaaggcccggggggccaaggagcacggggctgtggccgtggagcgggtgaccaagagccctggagagaccagcaagccccggccctttgctgggggcggctaccgcctgggcgccgcccctgaggaggagagcgcctacgtggccggggagaagaggcagcacagcagccaggatgtgcacgtggtgctgaagctgtggaagagcggcttcagcctggacaacggggagctgcggagctaccaggaccccagcaatgcccagttcctggagagcatcagaagaggagaggtgcctgctgagctgcggcggctggcccacggcggccaggtgaacctggacatggaggaccacagagatgaggactttgtgaagcccaagggggccttcaaggccttcaccggggagggccagaagctgggcagcacagccccccaggtgctgagcaccagcagccctgcccagcaggctgaaaatgaggccaaggccagcagcagcatcctgattgatgaaagtgagcccaccaccaacatccagatccggctggctgatggcggccgcctggtgcagaagttcaaccacagccaccgcatcagtgacatccgcctcttcatcgtggatgcccggcctgccatggccgccaccagcttcatcctgatgaccaccttccccaacaaggagctggctgatgagagccagaccctgaaggaggccaacctgctgaatgctgtgattgtgcagaggctgacctag

SEQ ID NO: 295279 - DNA, 3451 bp, Artificial Sequence
  derived and/or modified sequence
aactaggggtaaggaggtacaaagaacaaggaagttaggctttgaaaatagagaacaaagaacaagtaagctgaacaagtaagttcctctttggagaggcaagagggcaaagaagctgaggacccagaagacaggattgtgcctaagaaagtggccttggagcagaggcccaaagaaagcggggagagcgccttgcccatcggtaagggaaaggtgctccaggcacagaagcagctaatgcaacggccctgaggcaaatgcaagataactggcaagttccaggaacagcaaggagggcaaggcgcctggagcagaggaagctagcggatcccttgatgagagggaggaactggcccatctctcatgggtcctgcaggcaggccatgagactgtcttttatgcggggcgagataacgaggcatggacgtgttgtgagcggaggcctagcctgttcaaggtctgaatttttacccctagaatgtaagaagcatgggagcagggactttgttttgctccctgccatatccacagccctagaaaaacgtcgggccattgatagctctcagtaaatgcttgacaagtaagtgaatgaacgaatgcacaattaatgaaatgagggctgcgtcaatgaataactgggaatctgactcctgcagggagccttcagcccacaggtgtatgtaagacccgccccgcctctcatccttcgggctcccacccccgccgttaggctgcggttcgcgccgcggtcgccagagggcgcggagcggcggggcttcccgcacggagggctttgcgtgaggcaccgcgtggggcggggctgcgggcgggctcccagctgctgggccctcatcggctgggcctcgtcgaccggcaagcggaacgcggcagcggggctgggcctgtgcggcggccgccggagcgctttggaaggcgcacggggcgaagatggcggcggagcgacaggaggcgctgagggagttcgtggcggtgacgggcgccgaggaggaccgggcccgcttctttctcgagtcggccggctgggacttgcagtgataatagagtgacatccttcagagacctcattcatgaccaagatgaagatgaggaggaagaggaaggccagaggtgccaaagagcatggagctgtagctgtggagcgagtgaccaagagccctggagagaccagtaaaccgagaccatttgcaggaggtggctaccgccttggggcagcaccagaggaagagtctgcctatgtggcaggagaaaagaggcagcattccagccaagatgttcatgtagtattgaaactctggaagagtggattcagcctggataatggagaactcagaagctaccaagacccatccaatgcccagtttctggagtctatccgcagaggggaggtgccagcagagcttcggaggctagctcacggtggacaggtgaacttggatatggaggaccatcgggacgaggactttgtgaagcccaaaggagccttcaaagccttcactggcgagggtcagaaactgggcagcactgccccccaggtgttgagtaccagctctccagcccaacaggcagaaaatgaagccaaagccagctcttccatcttaatcgacgaatcagagcctaccacaaacatccaaattcggcttgcagacggcgggaggctggtgcagaaatttaaccacagccacaggatcagcgacatccgactcttcatcgtggatgcccggccagccatggctgccaccagctttatcctcatgactactttcccgaacaaagagctggctgatgagagccagaccctgaaggaagccaacctgctcaatgctgtcatcgtgcagcggttaacataaccgcccagccagctgcctggcctccctcctgtgtttcccatggccagtggccatgccccatggggatcgcccctcctgcccccttgtgcacacccagcagtccagtgcaacgtctcctccatagctctgggttcttagatcttggttggacgtttgttttctccttagttgcatttcctgggtttttgtgatgatcaatggactttaatgaaaaaaaaaataaaaacaaccaaaaaaattgaaggaatatcaccagcatgttgtacggaaactctcccactgaagcaggctttaattgctttaaaattatatttatcttggggcctgtgggaggaaacttccttccatcttctctgcataaaaacttgtggcacacaatgcttattcactagtgtgtcccacccgccagccccacagatgactggaggaaggaggggaaatgtgtagaaagaggcttcgccaccacttgttcccacgagaatatgtcacttgcccagataaaactgggcggcagccagagttccctgaagtgggaagtcagagctccatgcacacagtgtcttcagaaggtgaaaataaatatttccctgtgctccttttactcaacccctggggtatctaatcttgccaggtcttggccagttgagattctgttccacctgcctgcctggccctttcctccattaccatccagactgctcgcctcctggggattctcaggggctccattatggcttgatttactccacgtgcagaagtcttgagtggacctaggaggtaggtgggatattttttttcactaggatacagctcatgccaacccatcctaagtgagttcagaatcagggtatcttgccctataagataaacagtcaaaatgccaccgagctgttcactagtgatgtgtggcaaatcaaatcaactgttgaagaaggggtgagttttctgtgctacaagcacctgtcactgttggtacttgcaggaggcttctgctgggtatgttttggaagtgagtgtcactacttggctttgcttagcaggttctgcttcacacttgttctttgacctgctgacttgtgacttgcagaaacataggcagtagtcctagcctggtaaagaccctccaccacccctataagtttgattgctatgcaggtttgggagaggaggcctattgggctcttggatggaaccctttcccgtattaaacaaaccagagacagaatcagtgctgactcaggatctcctggtttggaatcgtaatgtgcctcaatcctctttccaagcaggcctcaccagtctctttctctttcctgcttcacccctgcaatgagccaagaaccaacactacatccacctagaactgcagaagggcttgtggtttcaaccaagacccatcctgagcaagggacttggcttggtgcttttgatcccaaagttcccacaccggcagtggcctgctggggcaatggcatctgtcacggtgttttctccagcaggtggagattatggaacctacatatgggtctggaaaaactgtacactgttgtcaccttgaccattaaaaaccagaatgaggacaa

SEQ ID NO: 295280 - DNA, 780 bp, Artificial Sequence
  derived and/or modified sequence
atgaccaagatgaagatgcggcggaagcggaaggcccggggcgccaaggagcatggcgcggttgcagtcgaacgggtcacgaagtcccccggggaaacttcaaagccgcgccctttcgcagggggcggttatcgtctgggggctgctccagaagaggagtccgcttatgtagcgggcgaaaagcggcagcactcaagccaggacgtgcacgttgtgttaaagctgtggaagtccgggttttcactggataacggggagctcagaagttatcaggatcccagcaacgcccaattcctagagtctatccgtagaggcgaggttcctgccgagctcagacgcctggcccacggcggacaggtcaacttggacatggaggatcaccgggatgaagatttcgtgaagccaaagggggcattcaaggctttcactggtgaggggcaaaaactcggttctacagcgccacaggtactttccaccagcagtcccgcgcaacaagctgagaatgaggcaaaggcttcatcaagcatcttaatcgatgaatctgaacctactacaaacatacagatcagactagccgatggcggtaggctggtgcagaagtttaaccattcacatagaatatctgatattcgtttgtttatagtagacgctcgacccgcgatggccgccacctcctttatcctgatgaccacgtttcccaacaaagaactggcagatgaaagccagactttgaaggaagctaatctcctgaacgctgtcatcgtccagcgccttacatag

SEQ ID NO: 295281 - DNA, 780 bp, Artificial Sequence
  derived and/or modified sequence
atgaccaaaatgaagatgcggagaaagcgtaaagccaggggcgctaaagaacatggcgctgtagccgtggagcgcgtgacaaaatcacctggcgagacaagtaagcctcgccctttcgcgggaggagggtaccggcttggggcagctcctgaggaagagtccgcctacgttgcaggcgagaagagacagcattcgagtcaggacgtacatgtggtgctcaaactctggaaatcagggttctctctggacaatggagaacttcgttcctatcaggacccttctaacgcccaatttctggagtcaattaggagaggggaggtgcccgcagagttgcggcgactggcacacggcggacaagtgaacctggatatggaagatcatcgagacgaagactttgtcaaacccaagggagcgtttaaggccttcacaggcgagggccagaagctgggcagcactgcaccccaggtgctgagcacttcttccccagctcaacaggccgaaaatgaagctaaggcctcatcgagtatactgatcgacgaaagtgagccaactaccaacatccagattaggttggctgacgggggacggctggtacagaaattcaaccactcccataggatcagcgacattaggctgttcatagtggacgcgaggccagctatggctgcaacgtcctttatcctcatgacaacttttcctaacaaggaacttgctgatgagagccagaccttgaaagaggccaatctcctgaacgccgtgattgtccaacggttgacatag

SEQ ID NO: 295282 - protein, 303 aa, Artificial Sequence
  derived and/or modified sequence
EDEYIQSHNFDSAMKVTSQGQPSPVEPRGPFYFCRLLLDDLGMNSWDRRKNFHLLKKNSKLLRELKNLDSRQCRETHKIAVFYIAEGQEDKCSILSNERGSQAYEDFVAGLGWEVDLSTHCGFMGGLQRNGSTGQTAPYYATSTVEVIFHVSTRMPSDSDDSLTKKLRHLGNDEVHIVWSEHSRDYRRGIIPTAFGDVSIIIYPMKNHMFFIAITKKPEVPFFGPLFDGAIVSGKLLPSLVCATCINASRAVKCLIPLYQSFYEERALYLEAIIQNHREVMTFEDFAAQVFSPSPSYSLSGTD

SEQ ID NO: 295283 - protein, 184 aa, Artificial Sequence
  derived and/or modified sequence
RGSVQHPPVVGINAFSSPLAIAVGDATPGPEPGYARSCSSASPRGFAPSPGSQQSGYGGGLGAGLGGYGAPGVAGLGVPGSPSFLNGSTATSPFAIMPSSPPLAAASSMSLPAAAPTTSVFSFSPVNMISAVKQRSAFAPVLRPPSSPPQACPRAHGEGLPDQSFEDSDKFHSPARGLQGLAYS

SEQ ID NO: 295284 - protein, 591 aa, Artificial Sequence
  derived and/or modified sequence
MCNGRKTVLADPEPELYLDPFCPPGFSSQKFPMQHVLCNHPPWIFTCLCAEGNIQPGDPGPGDQEKQQQASEGRPWSDQAEGPEGEGAMPLFGRTKKRTLGAFSRPPQRQPVSSRNGLRGVELEASPAQSGNPEETDKLLKRIEVLGFGTVNCGECGLSFSKMTNLLSHQRIHSGEKPYVCGVCEKGFSLKKSLARHQKAHSGEKPIVCRECGRGFNRKSTLIIHERTHSGEKPYMCSECGRGFSQKSNLIIHQRTHSGEKPYVCRECGKGFSQKSAVVRHQRTHLEEKTIVCSDCGLGFSDRSNLISHQRTHSGEKPYACKECGRCFRQRTTLVNHQRTHSKEKPYVCGVCGHSFSQNSTLISHRRTHTGEKPYVCGVCGRGFSLKSHLNRHQNIHSGEKPIVCKDCGRGFSQQSNLIRHQRTHSGEKPMVCGECGRGFSQKSNLVAHQRTHSGERPYVCRECGRGFSHQAGLIRHKRKHSREKPYMCRQCGLGFGNKSALITHKRAHSEEKPCVCRECGQGFLQKSHLTLHQMTHTGEKPYVCKTCGRGFSLKSHLSRHRKTTSVHHRLPVQPDPEPCAGQPSDSLYSL

SEQ ID NO: 295285 - DNA, 1776 bp, Artificial Sequence
  derived and/or modified sequence
atgtgcaacggcagaaagaccgtgctggccgaccccgagcccgagctgtacctggaccccttctgcccccccggcttcagcagccagaagttccccatgcagcacgtgctgtgcaaccaccccccctggatcttcacctgcctgtgcgccgagggcaacatccagcccggcgaccccggccccggcgaccaggagaagcagcagcaggccagcgagggcagaccctggagcgaccaggccgagggccccgagggcgagggcgccatgcccctgttcggcagaaccaagaagagaaccctgggcgccttcagcagacccccccagagacagcccgtgagcagcagaaacggcctgagaggcgtggagctggaggccagccccgcccagagcggcaaccccgaggagaccgacaagctgctgaagagaatcgaggtgctgggcttcggcaccgtgaactgcggcgagtgcggcctgagcttcagcaagatgaccaacctgctgagccaccagagaatccacagcggcgagaagccctacgtgtgcggcgtgtgcgagaagggcttcagcctgaagaagagcctggccagacaccagaaggcccacagcggcgagaagcccatcgtgtgcagagagtgcggcagaggcttcaacagaaagagcaccctgatcatccacgagagaacccacagcggcgagaagccctacatgtgcagcgagtgcggcagaggcttcagccagaagagcaacctgatcatccaccagagaacccacagcggcgagaagccctacgtgtgcagagagtgcggcaagggcttcagccagaagagcgccgtggtgagacaccagagaacccacctggaggagaagaccatcgtgtgcagcgactgcggcctgggcttcagcgacagaagcaacctgatcagccaccagagaacccacagcggcgagaagccctacgcctgcaaggagtgcggcagatgcttcagacagagaaccaccctggtgaaccaccagagaacccacagcaaggagaagccctacgtgtgcggcgtgtgcggccacagcttcagccagaacagcaccctgatcagccacagaagaacccacaccggcgagaagccctacgtgtgcggcgtgtgcggcagaggcttcagcctgaagagccacctgaacagacaccagaacatccacagcggcgagaagcccatcgtgtgcaaggactgcggcagaggcttcagccagcagagcaacctgatcagacaccagagaacccacagcggcgagaagcccatggtgtgcggcgagtgcggcagaggcttcagccagaagagcaacctggtggcccaccagagaacccacagcggcgagagaccctacgtgtgcagagagtgcggcagaggcttcagccaccaggccggcctgatcagacacaagagaaagcacagcagagagaagccctacatgtgcagacagtgcggcctgggcttcggcaacaagagcgccctgatcacccacaagagagcccacagcgaggagaagccctgcgtgtgcagagagtgcggccagggcttcctgcagaagagccacctgaccctgcaccagatgacccacaccggcgagaagccctacgtgtgcaagacctgcggcagaggcttcagcctgaagagccacctgagcagacacagaaagaccaccagcgtgcaccacagactgcccgtgcagcccgaccccgagccctgcgccggccagcccagcgacagcctgtacagcctgtag

SEQ ID NO: 295286 - DNA, 1776 bp, Artificial Sequence
  derived and/or modified sequence
atgtgtaacggacgaaaaactgtgttggcagacccggaacctgaactatatttagatcctttttgccctccaggattttcatctcagaaattccctatgcagcatgtgctctgtaatcacccaccttggattttcacttgtttgtgcgccgaaggcaatattcaacccggcgacccaggcccaggggatcaggaaaagcagcagcaggcgtccgaaggccgtccatggagcgatcaggctgagggccctgaaggcgaaggtgcaatgcctctgttcggacgaacaaaaaagaggacattgggagcattcagccggccaccgcaacgccagccagtgtcctcacggaacgggctccgtggggtggagctggaggcgtcaccggctcaatctgggaacccggaggagacagataaactgctgaagcgaattgaggtattggggttcggaacagtgaattgcggagagtgcgggctaagcttctcaaaaatgaccaatctgctgagccatcagcgcattcactctggcgaaaaaccctatgtctgtggcgtgtgtgaaaaaggattctctctcaaaaaatcgctggcccgacaccagaaggcccactccggggagaagcccatcgtatgccgggagtgtggccgtggcttcaacaggaagtcgactttgatcattcatgaaagaacacatagcggcgagaagccttatatgtgctctgaatgcggtcgggggttctcacaaaaatcaaatctgattattcaccagaggacccactcaggagagaagccatatgtgtgcagagagtgcgggaagggcttttcccagaaatctgctgtagtgcgacatcagcgcactcatctggaagagaagaccatcgtttgttccgactgcggactaggattctccgatagatcgaaccttatttcacatcagcggacacattccggagagaaaccttacgcttgcaaggaatgcggacgttgttttcggcagaggacaacactggtgaatcatcagcgcacgcactctaaagaaaagccatatgtgtgtggtgtctgtgggcattccttctcccagaatagcacattgatatcacaccgccggacgcacacaggcgagaagccgtacgtgtgcggggtgtgtgggagaggattttcactgaagtcacacctgaaccgacaccagaatatacatagcggagagaagcctatcgtctgcaaggactgcggcaggggtttttctcagcagagtaaccttatccggcaccagagaacccatagtggtgagaagccaatggtttgcggagagtgtgggcgggggtttagccagaagagcaacctcgtggcacaccagcggacccacagtggcgagcgaccttacgtgtgccgagagtgcggcagagggttcagtcatcaggcagggctgatacggcataagaggaaacacagcagagagaaaccttacatgtgccggcaatgtggccttggctttgggaacaaaagcgcgctcattacacataagagggctcatagcgaagagaaaccttgcgtatgccgagaatgcgggcaggggttcctgcagaagtctcacctcaccctgcatcagatgacgcacaccggagagaaaccctacgtgtgcaaaacctgcggccgcggctttagtcttaaatcccacctgagcagacaccggaaaacaacatctgtgcaccacaggttacctgtacagcctgacccggagccttgtgctggccagccttctgacagcctctattccctctag

SEQ ID NO: 295287 - DNA, 1776 bp, Artificial Sequence
  derived and/or modified sequence
atgtgcaatggaaggaagacagtgctggccgaccctgagcctgagctgtacctggaccccttctgccccccaggcttcagcagccagaagttccccatgcagcacgtgctgtgcaaccaccccccctggatcttcacctgcctgtgtgccgagggcaacatccagcccggggaccccggccctggggaccaggagaagcagcagcaggccagcgagggccggccctggagcgaccaggccgagggccctgagggggagggcgccatgcccctgtttggccgcaccaagaagaggaccctgggcgccttcagccggcccccccagaggcagcctgtgagcagcagaaatggcctgcggggcgtggagctggaggccagccctgcccagagcggcaaccctgaggagacagacaagctgctgaagagaattgaggtgctgggcttcggcaccgtgaactgtggagaatgtggcctgtccttcagcaagatgaccaacctgctgagccaccagaggatccacagcggggagaagccctacgtgtgtggggtgtgtgagaagggcttcagcctgaagaagagcctggcccggcaccagaaggcccacagcggggagaagcccatcgtgtgcagagaatgtggccggggcttcaacaggaagagcaccctcatcatccacgagaggacccacagcggggagaagccctacatgtgcagtgaatgtggccggggcttcagccagaagagcaacctgatcatccaccagaggacccacagcggggagaagccctacgtgtgcagagaatgtgggaagggcttcagccagaagtctgctgtggtgcgccaccagaggacccacctggaggagaagaccatcgtgtgcagcgactgtggcctgggcttcagtgacaggagcaacctgatcagccaccagaggacccacagcggggagaagccctatgcctgcaaggaatgtggccgctgcttccggcagaggaccaccctggtgaaccaccagaggacccacagcaaggagaagccctacgtgtgtggggtgtgtggccacagcttcagccagaacagcaccctcatcagccacaggaggacccacactggagagaagccctacgtgtgtggggtgtgtggccggggcttcagcctgaagagccacctgaacagacaccagaacatccacagcggggagaagcccatcgtgtgcaaggactgtggccggggcttcagccagcagagcaacctgatccgccaccagaggacccacagcggggagaagcccatggtgtgtggagaatgtggccggggcttcagccagaagagcaacctggtggcccaccagaggacccacagcggggagcggccctacgtgtgcagagaatgtggccggggcttcagccaccaggccggcctcatccgccacaagaggaagcacagccgggagaagccctacatgtgccggcagtgtggcctgggcttcggcaacaagagcgccctgatcacccacaagagggcccacagcgaggagaagccctgtgtgtgcagagaatgtggccagggcttcctgcagaagagccacctgaccctgcaccagatgacccacactggagagaagccctacgtgtgcaagacctgtggccggggcttcagcctgaagagccacctgagccgccacaggaagaccacctctgtgcaccaccggctgcctgtgcagcctgaccctgagccctgtgccggccagcccagcgacagcctgtacagcctgtag

SEQ ID NO: 295288 - DNA, 1776 bp, Artificial Sequence
  derived and/or modified sequence
atgtgcaacggccggaagaccgtgctggccgaccccgagcccgagctgtatctggatccattctgccccccaggcttctcatcacagaaattccccatgcagcacgtgttatgtaaccaccccccgtggatctttacctgtttatgtgctgagggcaacattcagccaggtgaccccggtcctggagatcaggagaagcaacagcaggccagcgaaggccggccttggtcagatcaggcagaggggcccgagggcgagggcgctatgccactgtttggtaggaccaagaaacgaaccctcggagcctttagtcgacctccacagcgccagcctgtgtcgagtcggaacggcctacgcggcgtcgaacttgaggctagccctgcacaatcaggcaatccagaagagaccgacaaactgctgaaacgaatcgaggttctggggttcggaactgtaaactgcggtgagtgtggtttaagtttcagcaagatgactaatcttctgagccaccagaggatccactcgggcgagaaaccatatgtctgcggtgtttgcgagaaaggcttctcgcttaaaaagtcactcgctaggcaccagaaggcccattcgggcgagaagcccatagtgtgtcgggaatgcggaagaggtttcaatcggaaatcaaccttgataatccacgagagaactcatagcggtgaaaagccatatatgtgctccgagtgtgggcggggattctcccagaagtcaaatctgattattcaccagaggacacattctggggagaagccgtacgtttgtagggagtgtggtaaagggttttcccagaaatctgccgtggtccggcaccagaggacgcacctggaagagaagacaatcgtttgttccgactgtgggctgggcttctcagatagaagcaacctgatctcccatcagagaacccacagtggggaaaaaccctacgcttgcaaagagtgcgggcgctgcttcagacagaggaccacactcgtgaaccatcaacggactcactcaaaagaaaaaccttatgtatgcggcgtctgcggtcatagtttctcgcagaattctactctgatctctcatcggcgcacccacactggtgagaaaccctatgtctgtggggtgtgtggacgagggttttctttgaagtcccacctcaatcgccaccagaacattcactctggtgagaagccaatcgtgtgcaaagattgtgggagggggttctctcagcaatcaaatctgattcggcaccagcgcactcattctggagagaaacccatggtgtgcggggaatgcggcagagggttctctcagaaaagcaatttagtggcacatcagcgaacacactctggtgagcgaccctacgtgtgccgcgagtgcggcagggggttcagccaccaggcgggtttaatcagacataagcgcaaacactcgcgtgagaagccatacatgtgcagacagtgtggcttagggttcggcaacaagtcagccttgatcacacacaaacgagcacattccgaagagaaaccctgcgtgtgtcgagagtgtggccaggggtttttgcagaagtcacatctgactctacaccaaatgacccatactggcgagaagccatatgtgtgtaagacttgtggtcgtggcttcagtctgaagagccacctgagccggcacagaaaaacaacttccgtacaccacagactgcctgtgcaacccgaccccgagccctgcgccggacagcccagcgactcactttatagcctttag

SEQ ID NO: 295289 - DNA, 1776 bp, Artificial Sequence
  derived and/or modified sequence
atgtgcaacggtagaaagacagtactcgcagacccggagcctgaactgtacttggatccgttctgtccgccaggattttcaagtcagaaatttcccatgcagcatgtattgtgcaatcaccccccttggatctttacttgtctgtgtgctgagggcaatattcagccaggagaccctggtcctggggaccaggaaaagcaacaacaggcttcggaggggaggccctggtccgatcaggcagaagggccagaaggagagggcgcaatgccactgttcggccgaacaaaaaagcggactctaggggctttcagccgacccccacagagacagccagtttcaagccgcaacggactgcggggtgtcgagctggaggctagtccggcacagagcgggaatcctgaagaaacagacaagctgctgaagcgcattgaggtgctgggcttcggcaccgtgaattgcggggagtgtggcttgtcgttttccaaaatgactaacttgctgtctcaccagcgtattcatagtggcgagaagccctacgtttgcggcgtctgtgaaaaaggattctcactgaaaaaatccttagcccgacaccaaaaggcccactctggcgaaaagcccatagtgtgtcgcgaatgtggacgaggctttaaccggaagagtaccctcataatccacgagagaactcactcaggggaaaagccttacatgtgctccgagtgtggacgcggattttcccagaagagcaaccttataattcaccaacgtacccattctggggagaaaccttacgtgtgtcgggaatgtggcaaagggtttagccaaaaatccgccgtggtgagacaccaaaggacacacctggaggaaaagacaattgtgtgcagcgactgcgggcttggtttttcggacaggtcaaacttaatctcccatcagagaactcacagcggagaaaaaccctacgcctgtaaggagtgcggtagatgctttcgtcagcgcaccacacttgtgaatcaccaacgaactcatagcaaggagaagccatatgtttgcggagtctgtggccactctttcagtcaaaatagtaccctgatttctcatcgtaggacccacactggcgagaagccatacgtttgcggagtatgcggtaggggcttctcccttaaaagccatctgaatcggcatcagaatatacactcgggtgagaagccaattgtgtgcaaagactgtggccgtggtttctcccaacaatctaacctgatccggcatcagagaactcacagcggagagaagcccatggtgtgcggcgaatgcggccgtggcttctctcagaaaagcaaccttgtggcccatcagcggacccactccggagagcgcccttacgtttgtcgcgaatgcggacggggatttagtcatcaggcaggccttattcgtcacaagcggaaacatagtagagaaaagccatatatgtgccggcagtgtggactgggtttcggtaacaaaagcgccctcatcacacataagagggcgcatagtgaagagaagccatgtgtgtgcagagagtgcggacaggggttcttgcagaagagccatctcacactgcaccagatgacacacacaggagagaaaccatacgtgtgtaaaacttgcggtaggggattctccctgaagtcccatttgtctcggcatcggaagacgacttctgtccaccataggctccccgttcagccagatcctgagccatgtgctgggcagccttccgattcattatacagcctgtag

SEQ ID NO: 295290 - DNA, 1680 bp, Artificial Sequence
  derived and/or modified sequence
atgcagcacgtgctgtgcaaccaccccccctggatcttcacctgcctgtgcgccgagggcaacatccagcccggcgaccccggccccggcgaccaggagaagcagcagcaggccagcgagggcagaccctggagcgaccaggccgagggccccgagggcgagggcgccatgcccctgttcggcagaaccaagaagagaaccctgggcgccttcagcagacccccccagagacagcccgtgagcagcagaaacggcctgagaggcgtggagctggaggccagccccgcccagagcggcaaccccgaggagaccgacaagctgctgaagagaatcgaggtgctgggcttcggcaccgtgaactgcggcgagtgcggcctgagcttcagcaagatgaccaacctgctgagccaccagagaatccacagcggcgagaagccctacgtgtgcggcgtgtgcgagaagggcttcagcctgaagaagagcctggccagacaccagaaggcccacagcggcgagaagcccatcgtgtgcagagagtgcggcagaggcttcaacagaaagagcaccctgatcatccacgagagaacccacagcggcgagaagccctacatgtgcagcgagtgcggcagaggcttcagccagaagagcaacctgatcatccaccagagaacccacagcggcgagaagccctacgtgtgcagagagtgcggcaagggcttcagccagaagagcgccgtggtgagacaccagagaacccacctggaggagaagaccatcgtgtgcagcgactgcggcctgggcttcagcgacagaagcaacctgatcagccaccagagaacccacagcggcgagaagccctacgcctgcaaggagtgcggcagatgcttcagacagagaaccaccctggtgaaccaccagagaacccacagcaaggagaagccctacgtgtgcggcgtgtgcggccacagcttcagccagaacagcaccctgatcagccacagaagaacccacaccggcgagaagccctacgtgtgcggcgtgtgcggcagaggcttcagcctgaagagccacctgaacagacaccagaacatccacagcggcgagaagcccatcgtgtgcaaggactgcggcagaggcttcagccagcagagcaacctgatcagacaccagagaacccacagcggcgagaagcccatggtgtgcggcgagtgcggcagaggcttcagccagaagagcaacctggtggcccaccagagaacccacagcggcgagagaccctacgtgtgcagagagtgcggcagaggcttcagccaccaggccggcctgatcagacacaagagaaagcacagcagagagaagccctacatgtgcagacagtgcggcctgggcttcggcaacaagagcgccctgatcacccacaagagagcccacagcgaggagaagccctgcgtgtgcagagagtgcggccagggcttcctgcagaagagccacctgaccctgcaccagatgacccacaccggcgagaagccctacgtgtgcaagacctgcggcagaggcttcagcctgaagagccacctgagcagacacagaaagaccaccagcgtgcaccacagactgcccgtgcagcccgaccccgagccctgcgccggccagcccagcgacagcctgtacagcctgtag

SEQ ID NO: 295291 - DNA, 1680 bp, Artificial Sequence
  derived and/or modified sequence
atgcaacatgtgctgtgtaatcaccccccctggatctttacctgtctgtgtgcggaaggcaacatccaacctggcgaccctggtccaggggatcaagaaaaacagcagcaggcaagcgagggcaggccctggtctgaccaggccgaggggcccgaaggagagggcgctatgcctctgtttggtcggactaaaaaacggaccctaggcgcttttagtcgccctccccaacgacaacccgtctcctcgcggaacgggctgagaggcgtcgagctcgaagctagcccggcccagagtggtaatccagaagagaccgacaagcttttgaaaagaatcgaggtactcggatttggcaccgtaaactgcggcgaatgcggtcttagtttctcaaaaatgactaatctgctgtcacatcaacggattcactctggtgagaagccttacgtctgtggagtgtgcgaaaagggcttcagccttaaaaagagtttggctcgccatcagaaagctcactcaggtgagaagcccatcgtctgccgggaatgcggacgggggtttaaccgcaagtccactctgataattcacgagaggacacacagcggagaaaaaccctacatgtgtagcgaatgcggccgtggattctcccagaaatcaaacttgatcattcaccaaaggactcacagcggtgagaaaccctacgtgtgcagagaatgcggaaagggcttttctcagaagagcgcagtcgttcggcatcagcggactcacctggaggagaagacaatcgtgtgctctgattgcggcttgggctttagcgataggagtaatctcatttcccaccaaagaacccactcaggagagaaaccttacgcctgtaaggagtgcggaagatgtttccgtcagagaaccacattggtcaatcatcagcggacgcactccaaggaaaagccgtacgtttgtggcgtctgcggccactccttctcccagaatagtacactgatttcccaccgacgcacccacacgggcgagaaaccctacgtttgtggagtctgcggcagaggtttttctctgaaatcccacctgaacaggcaccagaatatccacagcggagagaaaccaatcgtgtgtaaggactgtggtcgcggattttcgcaacagtcaaacttgatacgccaccagagaacgcattctggcgaaaaacccatggtgtgtggcgaatgtggtcggggattcagtcagaagagcaatctggtagcccatcagcgaactcactcaggcgaaagaccttacgtttgccgagaatgcggcagggggtttagtcaccaggccggacttattagacacaaacgtaaacactcccgcgaaaaaccatatatgtgtaggcagtgcggactaggatttggaaataaatcagcgttgataacccacaagcgtgcacactcagaagaaaaaccctgcgtgtgtcgggaatgtggtcaaggttttctgcagaaatcacacctgaccctgcaccaaatgacgcatactggagaaaagccatatgtctgcaaaacttgtggacggggcttttctttaaaaagccacctaagccggcaccgcaaaaccacatccgtgcaccacagactgccagtccaacccgaccctgaaccatgtgccggccagcccagcgatagtctgtactccctttag

SEQ ID NO: 295292 - DNA, 1680 bp, Artificial Sequence
  derived and/or modified sequence
atgcagcacgtgctgtgcaatcacccaccatggatattcacatgcttatgcgccgagggcaatatccagcccggtgatccagggcctggtgaccaggaaaaacagcagcaggcatctgagggacgaccctggtccgaccaggcagaggggcccgagggagaaggggcaatgccactctttgggaggacaaaaaaacggaccctcggtgctttttcacggccccctcaacggcagccagtatcctcaagaaacggcctgaggggagtcgagcttgaagcctccccagcccaaagtgggaatcccgaggagaccgataagctgcttaaacgcatcgaagtgctgggctttggtacagtgaactgcggtgagtgcggtcttagcttcagtaaaatgacgaatctgctgagccaccagcgtattcactctggcgagaagccctatgtgtgcggtgtgtgtgagaaaggattttctcttaagaaatcactggctaggcatcagaaagcgcacagtggagaaaagcccatcgtgtgtagggagtgcggccgcgggttcaaccgcaaatccactcttatcatccatgagaggacgcactccggcgaaaaaccctacatgtgcagtgagtgtggacggggatttagccagaaatctaatctaattatccaccagcgcacacattcaggggaaaaaccctatgtttgtagggagtgtggaaaaggcttctcgcagaagtccgctgtcgttagacaccagagaactcacctggaggagaagaccattgtttgtagcgactgtggtctgggtttttcagatcggagtaacctcatcagccatcagcggacacactcaggggaaaaaccgtatgcttgcaaggaatgcgggcgctgttttagacagcgcacgacattagttaaccatcagcgcacccattccaaagagaagccttacgtttgtggcgtttgcgggcatagtttctcccaaaacagtacactcatatcccatagaaggacacataccggcgaaaagccatacgtgtgcggtgtgtgcggaagaggattttcacttaagtctcacttgaatcggcaccagaacattcactcaggcgagaagcctatcgtgtgcaaagattgtgggagaggattttcccagcagagcaatctgattcgccatcagcgtactcactcaggagagaagcctatggtgtgcggtgagtgcggacggggattctcccagaagtccaatcttgtcgcccaccagaggactcatagcggagagcgcccctatgtctgtcgcgagtgtggacggggtttttcacatcaggcgggtttaatccgacacaagcgcaaacactccagagaaaagccctatatgtgcaggcagtgtggtcttggcttcggcaacaagtccgccctgatcacccacaaaagggcgcactctgaggagaagccatgcgtgtgtcgcgaatgtggccagggatttctgcagaaatctcacctgaccttgcaccaaatgacacatacaggagaaaaaccttacgtctgtaaaacatgcggacgaggattttcccttaaatctcatttgagcagacatagaaagactacaagcgtgcatcacagactgcctgtccaaccagatccagagccttgtgcaggccagccttcagactccctctactcactttag

SEQ ID NO: 295293 - DNA, 1680 bp, Artificial Sequence
  derived and/or modified sequence
atgcagcacgtgctgtgcaaccaccccccctggatcttcacctgcctgtgtgccgagggcaacatccagcccggggaccccggccctggggaccaggagaagcagcagcaggccagcgagggccggccctggagcgaccaggccgagggccctgagggggagggcgccatgcccctgtttggccgcaccaagaagaggaccctgggcgccttcagccggcccccccagaggcagcctgtgagcagcagaaatggcctgcggggcgtggagctggaggccagccctgcccagagcggcaaccctgaggagacagacaagctgctgaagagaattgaggtgctgggcttcggcaccgtgaactgtggagaatgtggcctgtccttcagcaagatgaccaacctgctgagccaccagaggatccacagcggggagaagccctacgtgtgtggggtgtgtgagaagggcttcagcctgaagaagagcctggcccggcaccagaaggcccacagcggggagaagcccatcgtgtgcagagaatgtggccggggcttcaacaggaagagcaccctcatcatccacgagaggacccacagcggggagaagccctacatgtgcagtgaatgtggccggggcttcagccagaagagcaacctgatcatccaccagaggacccacagcggggagaagccctacgtgtgcagagaatgtgggaagggcttcagccagaagtctgctgtggtgcgccaccagaggacccacctggaggagaagaccatcgtgtgcagcgactgtggcctgggcttcagtgacaggagcaacctgatcagccaccagaggacccacagcggggagaagccctatgcctgcaaggaatgtggccgctgcttccggcagaggaccaccctggtgaaccaccagaggacccacagcaaggagaagccctacgtgtgtggggtgtgtggccacagcttcagccagaacagcaccctcatcagccacaggaggacccacactggagagaagccctacgtgtgtggggtgtgtggccggggcttcagcctgaagagccacctgaacagacaccagaacatccacagcggggagaagcccatcgtgtgcaaggactgtggccggggcttcagccagcagagcaacctgatccgccaccagaggacccacagcggggagaagcccatggtgtgtggagaatgtggccggggcttcagccagaagagcaacctggtggcccaccagaggacccacagcggggagcggccctacgtgtgcagagaatgtggccggggcttcagccaccaggccggcctcatccgccacaagaggaagcacagccgggagaagccctacatgtgccggcagtgtggcctgggcttcggcaacaagagcgccctgatcacccacaagagggcccacagcgaggagaagccctgtgtgtgcagagaatgtggccagggcttcctgcagaagagccacctgaccctgcaccagatgacccacactggagagaagccctacgtgtgcaagacctgtggccggggcttcagcctgaagagccacctgagccgccacaggaagaccacctctgtgcaccaccggctgcctgtgcagcctgaccctgagccctgtgccggccagcccagcgacagcctgtacagcctgtag

SEQ ID NO: 295294 - DNA, 1680 bp, Artificial Sequence
  derived and/or modified sequence
atgcagcacgtgctgtgcaaccaccccccctggatcttcacctgcctttgtgctgagggcaatatccagcccggagacccgggtcccggcgaccaggagaagcagcagcaggcctcagagggtcggccttggtctgatcaggcggaggggccagaaggggagggagccatgccactgttcggcagaaccaagaaaaggaccttgggcgccttcagtcgcccaccccagcgccagcctgtcagctcacggaatggcttgcggggagtcgagctagaagcctcacctgcgcagtccgggaaccccgaagagacagacaagttactgaaacgcatcgaggtactcggtttcggcaccgtcaattgcggggagtgtggtctgtctttttccaaaatgacaaatctgctgagccatcagcgcatccactctggagaaaaaccttacgtgtgtggcgtgtgcgaaaaaggattctctttaaagaaaagtttagccaggcatcagaaggcccacagcggcgagaaacctatagtttgccgcgaatgtggccgcggatttaatcgcaagtctacgttgattattcatgagagaacccattctggcgagaagccttatatgtgttccgaatgtggccgagggtttagccagaagagtaatttaatcatccatcaacggactcatagtggcgaaaagccgtatgtatgtagggagtgtggaaagggattcagccagaagtccgccgtcgtgaggcaccagcgaacgcatctggaggagaaaactattgtgtgttcagactgtggacttggcttctccgatcgctccaacctgatctcccatcagcggacacattcaggagagaagccctatgcctgtaaggaatgcggccggtgctttcgccagcgtaccaccctggttaatcatcaacgtactcactctaaggagaaaccctacgtgtgcggcgtttgtgggcacagcttcagccagaacagcaccttaatcagccaccgacggacacacacgggagagaagccgtatgtgtgcggcgtttgtggtcgcgggttctctctgaagtcacatctcaatcgccaccaaaacatacattctggggagaagccaatcgtttgcaaagattgcggccgcgggttctctcaacagagcaatctcattcgccatcagcggacgcacagcggtgaaaaaccgatggtctgcggggagtgtggtcgggggtttagccagaaatctaacttggtcgcccatcagagaacacacagtggcgagcgaccttacgtgtgcagagaatgtggccgtggtttttcacaccaggcaggtttgatcagacacaaacggaaacacagcagagagaagccttacatgtgccgtcaatgtgggttgggcttcgggaataagagcgcacttatcacacacaagagggcgcattccgaagagaagccatgtgtgtgtcgggagtgtgggcagggtttcttgcaaaaatctcacctgaccttacatcagatgacccatacaggcgaaaagccatacgtgtgtaagacctgcggtcgaggatttagcttgaagtcccacctctccagacataggaagaccacctccgtgcaccatcgcctgcccgtacagcccgaccccgagccatgtgccggtcagccctccgattccctatatagcctgtag

SEQ ID NO: 295295 - DNA, 1680 bp, Artificial Sequence
  derived and/or modified sequence
atgcagcacgtgctgtgcaaccaccccccctggatcttcacctgcctgtgtgctgaggggaacatacagccaggggatcccggccccggggaccaagagaaacagcagcaggcctccgaggggagaccatggtctgaccaggccgagggtccagagggcgagggggcgatgcctttgtttggcaggactaagaagcgaacattgggtgccttttctcgaccccctcagcgtcagccagtctccagcaggaatgggctgaggggcgtggagttggaagccagtccagcacaaagcggaaatccggaagagacagacaaattgctaaagcggattgaggtgctaggctttgggacagttaattgcggagaatgtgggctcagctttagcaagatgaccaaccttctatcgcatcaacgcattcactccggcgaaaagccctatgtgtgcggagtttgcgaaaagggcttctccctcaaaaaaagtctggcccggcaccagaaagcacacagcggggagaagcctatagtctgccgggaatgcggaagaggctttaatcgcaaatctaccctgatcatccacgaaaggactcacagcggcgaaaagccctatatgtgttccgaatgtggaaggggcttctcacaaaaatcaaacctgattatacaccagcgtacacactccggagaaaagccatacgtctgtcgtgaatgtgggaaggggttttcacagaagtcggccgtggttcggcaccaacggacacacttggaggagaagacaattgtgtgctccgattgcggcctgggattctcagaccgatcaaatcttatctcacaccagagaactcactctggcgagaaaccatacgcctgcaaagagtgtggaaggtgtttccgccagcgaacaactctcgttaatcaccaacgcactcacagcaaagaaaaaccgtacgtttgcggcgtgtgcggacattcattctctcagaatagcactctcatttcgcacaggcgaacacataccggcgagaaaccctacgtgtgtggcgtctgcggacgcgggttttctttaaagtcccatctgaatcggcaccagaacatccatagtggcgagaagcccattgtgtgtaaggactgcgggaggggcttcagtcagcaaagcaatctcataaggcatcagcgaacccatagcggtgaaaaacccatggtctgtggcgagtgcgggaggggctttagtcagaagagtaatcttgtggctcaccagcgcacccactcaggggagcggccgtacgtgtgtcgtgaatgtggaagggggtttagccaccaagctggcttgattaggcataagcggaaacattccagagaaaaaccatatatgtgtcggcagtgcggcctcggattcggaaacaagagcgctctgatcacgcacaaacgagcacattctgaggaaaaaccatgcgtctgcagggaatgtggacagggattcctccagaaaagccacttaacgttacaccaaatgacacacactggcgagaaaccatacgtctgcaagacatgcgggcgcggcttctctctgaagagccatctgtcacgacatcgcaagacgactagtgtccaccataggctccccgtacagccagatcctgagccttgtgctggacagccttctgactcactgtactccttgtag

SEQ ID NO: 295296 - DNA, 1680 bp, Artificial Sequence
  derived and/or modified sequence
atgcagcacgtgctctgcaatcacccaccctggatattcacctgcctttgtgccgagggcaacattcagcccggagatcccggtcctggtgaccaggaaaagcagcagcaggcttctgaaggtcggccatggtcagaccaggcagagggcccagagggtgagggcgctatgccgttatttggtcgcactaagaaacgaactctcggcgcattctcaagacctcctcagaggcagcctgtgtctagtcggaatggtctgaggggcgtcgaactcgaggcctcacccgctcagtctggcaatccggaggaaacggataagctcctgaagcgaatcgaggtgctgggattcgggaccgtcaactgcggcgagtgtggcctcagtttctctaaaatgactaatctactgtctcatcagcggattcactcaggtgaaaaaccatatgtgtgtggcgtgtgcgagaaggggtttagcctgaaaaaaagccttgcacgacatcagaaggcccacagtggtgagaagcctatcgtctgtagagagtgcggtagggggtttaataggaagtcgacattgatcatccacgagcgtacacattctggcgaaaaaccatacatgtgtagcgagtgcggcaggggcttctctcagaagtccaatctgattatccaccagcggacacactccggcgaaaaaccctacgtatgcagggaatgcgggaagggcttctcccagaagagcgcggtagtgcgccatcaaaggacgcacctggaagagaagactattgtgtgtagcgattgtggacttggtttttcagacagaagtaacctgataagccatcagcgcacccatagcggagagaagccctacgcctgcaaagaatgtggcaggtgcttccgccagcggacaaccctggtgaatcatcaacggacccattccaaggaaaaaccctacgtctgtggagtctgtgggcatagcttctcacagaacagtacgttgattagccatcgcagaactcacacgggggaaaagccctatgtgtgcggagtatgtggtagaggattctctttgaagagtcacctaaatcgccaccagaatatacacagcggggagaaacccatcgtgtgtaaagattgtggacggggattctcccagcagtctaacttgattcgacaccaacgaacccactccggggaaaaaccgatggtctgcggcgaatgtggccgagggttctctcaaaaaagcaatctcgttgcgcaccagcggacacattctggcgaaaggccttacgtgtgccgcgagtgtgggcgagggttctcacaccaagcaggtctgatcagacacaagagaaaacatagccgggaaaagccttacatgtgccgccagtgtggcctagggtttggcaacaagtccgcccttattacacacaaacgtgcccactccgaggaaaaaccttgcgtctgtcgcgagtgtggccagggtttcctccagaagagtcacctgacattgcaccagatgactcataccggcgagaaaccctatgtgtgtaaaacttgtggacgtggattctctctcaagagccatttgtcccgacatagaaagactacctcggtgcaccaccgcttgcctgtacagccagatccagaaccatgcgccggacaaccctctgatagtctgtattctttgtag

SEQ ID NO: 295297 - DNA, 1680 bp, Artificial Sequence
  derived and/or modified sequence
atgcagcatgtgctctgtaatcacccaccatggatcttcacgtgtctgtgcgcggagggaaatatacaacctggggatccaggacctggcgaccaagagaagcagcagcaggcctcagagggacgcccatggagcgatcaggcagagggacctgagggcgaaggcgctatgccgctgtttggacgaactaaaaagcgcacacttggggcattctcacgcccacctcagagacagcccgtgtctagtcggaacggattgcgcggagtagagttagaggccagccccgcacaaagcggaaatcctgaagagactgacaagctgcttaagagaatcgaggttctggggttcggtactgtcaattgcggtgaatgtggcctctcctttagcaagatgaccaacctgctgagccatcagcgcattcattctggggaaaagccatatgtttgtggtgtctgtgaaaagggcttctctctcaagaagtctttggcgaggcaccagaaagcacatagcggcgaaaagccaatcgtttgcagagagtgcgggaggggattcaacaggaagagtactttgataattcatgaacggacccactctggcgaaaagccttatatgtgcagcgagtgtggaaggggattctcacaaaaatctaacctcattattcaccaacgaacccattccggggaaaagccatatgtctgtagggaatgtgggaaagggttcagccaaaagagcgccgttgtgcggcatcaaagaactcatctcgaggaaaaaacgatcgtatgctccgattgcggtctaggcttcagcgataggtccaacttgatcagccatcagagaacacatagcggcgagaaaccatacgcgtgtaaggaatgtggcagatgcttccgccagagaactactctggtgaatcatcagcgaacccactccaaagaaaagccatacgtgtgtggggtgtgtgggcatagtttctcccagaatagcaccctcatatcacatcggagaacacatacaggggaaaagccctacgtttgcggcgtctgcggcagaggtttttcgctgaagtcccatctgaatcggcaccaaaatatccatagtggagagaaaccaatcgtgtgcaaagactgcggtcgcggtttttctcaacagtcaaacctcattcggcaccagaggactcatagtggcgagaagccgatggtatgcggagaatgtggtcggggattctcccagaagagcaacctggtggcgcaccagcgtacacactccggagagcgcccttacgtgtgtcgtgagtgtggtagagggttttctcaccaggctggcttgatcagacacaaaaggaaacattctagagaaaagccctatatgtgtagacaatgtgggctgggtttcggaaataaatctgcactgatcacccataagcgtgcacattcagaagaaaaaccatgtgtgtgtagggaatgtgggcagggattccttcagaagagccacctgacgctacaccaaatgacccataccggcgagaagccctacgtgtgcaaaacttgtggtaggggcttttcgcttaaatcgcacttatctcgccaccggaagacgacatccgttcaccacaggcttcccgtgcagcctgatcctgagccttgtgccggacagcctagcgacagtctgtacagtctctag

SEQ ID NO: 295298 - DNA, 2079 bp, Artificial Sequence
  derived and/or modified sequence
atgggctggcgcccaagaagagccagagggacccccttactactcctacttttgctgcttctgttgtggccagtgcctggcgctggggttctgcaagggcatattcctggccagccagttacaccacactgggtgttggacggacaaccatggaggacggtctcacttgaggagcccgtgtctaagccagacatgggcctggttgcactcgaagcagaaggccaggaactgcttctggagcttgagaagaaccaccgtttgcttgcccccggctatattgaaacccactacgggcctgatggccagccagtggtgctggctccaaaccacaccgaccactgccactaccagggcagagtgcgaggttttccagattcctgggtggtcctgtgcacttgcagtggaatgtcgggtctgattaccctcagccgaaacgcaagttattatctccgcccctggccgcctcgcgggagcaaagacttttctacccatgaaatttttcgcatggaacagctcctgacttggaagggcacttgtggtcatcgggatcctggaaataaagcaggaatgaccagcctcccaggtggtccacaaagtagaggccgacgggaggcccgtagaacccgtaagtacttggagctgtacattgtagcagaccacactttattccttaccagacatcgaaatctcaaccatactaaacaacggctgctggaggtcgctaattatgtggaccagctgcttaggaccctggacatacaggtggccctcaccggactggaagtgtggacggaacgcgaccgctcgaggcgtcaactaagggcgttcttccgaaaaggcgggggagcttgtctgtcgaatgcccctgacccaggcctgccggtcccacctgctctctgcggaaacggctttgtcgaagcaggagaagagtgcgactgtggacccggacaggaatgtagggatctctgctgctttgcccataactgctcactccgccctggagcccagtgcgcgcacggtgactgttgtgtgcgatgcttactgaaaccagctggggcgctgtgccgccaagctatgggcgattgtgatctccccgaattctgcacaggtacatcttcccactgtccacccgacgtgtatttgctcgacggatccccttgtgcccggggatctggatactgttgggacggagcctgccccaccctcgagcaacagtgtcagcagctgtggggacctggcagccaccccgccccggaggcgtgttttcaggtggtgaatagtgctggggatgcccacggaaactgtggccaggactctgagggacactttctaccatgcgctggtcgagatgctttgtgcggcaagctgcagtgtcaaggcggcaagccttcactgctcgctcctcacatggttcctgttgacagtacagtccacttggacggacaggaggttacctgtcggggcgctctagccctgccttctgcccagctggatctgctggggctgggccttgtggaacctggcacccagtgcggccccagaatggtatgccagtcccgaagatgtagaaagaacgcattccaggagctgcagagatgtctaaccgcctgccactctcatggagtatgtaacagcaaccataattgccactgtgcccccgggtgggccccacccttttgtgataaacccggtttcgggggatccatggattccgggccagtgcaggcggaaaatcatgacactttcctactcgccatgctcctttctgtactgctgcccctactgcccggcgcgggcctagcatggtgttgctatagactgcccggcgctcacctgcagcgatgttcttggggctgccgacgtgatccggcctgttcaggccctaaggatggccctcatcgggaccacccgctgggaggagtccaccccatggagttaggccctaccgcaaccggccagccctggccactcgatccagagaacagccatgagccatcttctcacccagaaaagccattgcctgccgtttctccagaccctcaggatcaggtccagatgccccgcagctgcctgtggtag

SEQ ID NO: 295299 - DNA, 2079 bp, Artificial Sequence
  derived and/or modified sequence
atgggctggaggccccggcgggcccggggcacccccctgctgctgctgctgctgctgctgctgctgtggcctgtgcctggggccggcgtgctgcagggccacatccctggccagcctgtgaccccccactgggtgctggatggccagccctggaggacagtgtccctggaggagcctgtgtccaagccagacatgggcctggtggccctggaggccgagggccaggagctgctgctggagctggagaagaaccaccggctgctggcccctggctacatcgagacccactacggcccagatggccagcctgtggtgctggcccccaaccacacagaccactgccactaccagggccgggtgcggggcttcccagacagctgggtggtgctgtgcacctgcagcggcatgagcggcctcatcaccctgagcagaaatgccagctactacctgcggccctggccaccccggggcagcaaggacttcagcacccatgagatcttcaggatggagcagctgctgacctggaagggcacctgtggccaccgggaccccggcaacaaggccggcatgaccagcctgcccggcggcccccagagccggggccggcgggaggcccggaggaccaggaagtacctggagctgtacatcgtggccgaccacaccctcttcctgaccaggcacaggaacctgaaccacaccaagcagaggctgctggaggtggccaactacgtggaccagctgctgcggaccctggacatccaggtggccctgaccggcctggaggtgtggacagagcgggacaggagccggcggcagctgcgggccttcttcagaaaaggaggaggagcctgcctgagcaatgccccagaccccggcctgcctgtgcccccagccctgtgtggaaatggatttgtggaggccggggaggagtgtgactgtggccctggccaggagtgccgggacctgtgctgctttgcccacaactgcagcctgcggcctggggcccagtgtgcccatggagactgctgcgtgcgctgcctgctgaagccagctggggccctgtgccggcaggccatgggagactgtgacctgcctgagttctgcaccggcaccagcagccactgccccccagatgtgtacctgctggatggcagcccctgtgcccggggcagcggctactgctgggatggagcctgccccaccctggagcagcagtgccagcagctgtggggccctggcagccacccagcccctgaggcctgcttccaggtggtgaacagcgctggagatgcccacggcaactgtggccaggacagcgagggccacttcctgccctgtgccggcagagatgccctgtgtgggaagctgcagtgccagggcggcaagcccagcctgctggccccccacatggtgcctgtggacagcacagtgcacctggatggccaggaggtgacctgccgcggggccctggccctgcccagcgcccagctggacctgctgggcctgggcctggtggagcccggcacccagtgtggccccaggatggtgtgccagagccgccgctgcaggaagaatgccttccaggagctgcagcgctgcctgacagcctgccacagccacggcgtgtgcaacagcaaccacaactgccactgtgcccctggctgggccccacccttctgtgacaagccaggctttggaggctccatggattctggccctgtgcaggctgaaaatcatgacaccttcctgctggccatgctgctgtctgtgctgctgcccctgctgcccggggccggcctggcctggtgctgctaccgcctgcccggggcccacctgcagcgctgctcctggggctgccggcgggaccctgcctgcagcggccccaaggatggcccccaccgggaccaccccctgggcggcgtgcaccccatggagctgggccccacagccaccggccagccctggcccctggaccctgagaacagccatgagcccagcagccaccctgagaagcccctgcctgctgtgtccccagacccccaggaccaggtgcagatgcccaggagctgcctgtggtag

SEQ ID NO: 295300 - DNA, 2079 bp, Artificial Sequence
  derived and/or modified sequence
atgggctggcggccccggcgggcccggggcacccccctgctgctgttgttgctgctgctgctattatggccagtccccggggccggcgtcctgcagggtcatattcccggccaaccagtgaccccccattgggtgctcgatgggcagccctggagaactgtgtcactggaggaacccgtgtccaagcctgacatgggcttggttgcactagaagccgagggtcaagagctgttgctggagctcgagaagaaccatcgcttgctcgctccaggctatatcgagacacactatgggcctgatggtcaacccgtagttttagcacccaatcataccgaccactgtcactaccagggcagggtgcgcgggttcccggattcctgggtggtcctctgtacctgtagcggcatgtccgggcttattacactgagcagaaatgcttcttattatctgaggccctggcccccacggggctccaaggatttcagtacccacgagatctttcggatggagcagctcttaacgtggaaaggaacttgtggccatcgcgacccaggcaacaaggctggcatgacgtccctgccaggcggtccgcaatcccgcggccggcgagaagctcgaagaacaagaaaatacctcgagctgtacatcgtggccgatcacactctgtttctcaccaggcatcgcaatttaaaccacaccaaacagcgtttgcttgaagttgcaaactacgtcgaccagctgctgaggactctagatatccaagtcgcccttactgggctggaagtgtggacagaacgggacagatctaggcgccagctgagagcattctttcgcaagggtggtggtgcctgtctgtcgaatgcccctgacccagggctgcccgtgccaccagcactctgcggtaacggcttcgtggaagccggtgaggagtgtgactgtggccccgggcaagagtgccgagatctctgttgttttgcacataactgttctcttagaccgggcgcccagtgtgcgcacggtgactgttgcgtgagatgcctgctgaaacccgcaggtgccctctgtcgccaagctatgggtgactgcgacttgccggagttctgtactggaactagctctcactgtcctccagatgtgtacctattggatggctccccgtgcgcccgcggaagcggctattgttgggatggtgcctgtccaacgctcgaacagcagtgccaacaactttggggacccggttcacaccccgcccctgaagcatgcttccaggtcgtcaactctgccggtgacgcccatggtaattgcgggcaggacagtgaaggacacttcctcccttgcgccggtcgcgatgcactctgcgggaagctccaatgccagggcggcaagccatccttgctcgctccacacatggttcctgtggactcaaccgttcacctcgatgggcaagaggtcacgtgccgcggtgcactagccctcccatcagcccagcttgatctcctgggactggggcttgtcgagccagggactcaatgcggcccgaggatggtgtgccaaagtcgtaggtgcagaaagaatgcatttcaggagctgcagagatgtttaaccgcctgccatagccatggggtatgtaactctaaccacaattgccattgcgccccggggtgggctccccccttttgcgataagccaggctttgggggttccatggattctggtcccgtccaggccgaaaatcacgatacattcctcttagcaatgctgctgagcgtgcttctgccactcctgcctggggctggactggcttggtgttgctaccggctgcccggggcgcaccttcagcgctgttcttggggatgcaggagagacccagcatgcagtggtccaaaagacggcccacaccgtgaccaccccctgggcggggtacaccccatggaattaggccctaccgccactggccagccatggcccttggacccagagaattcccatgaaccatctagtcaccccgagaaacccctgccagcggtgagcccagacccacaggatcaagttcaaatgcccagaagctgtctttggtag

SEQ ID NO: 295301 - DNA, 2079 bp, Artificial Sequence
  derived and/or modified sequence
atggggtggcgaccgagacgggctagaggaaccccactgttattactgttactgcttctcctcttatggcccgtccccggagctggggtgcttcaaggccacattccaggacagccagtcaccccccactgggtcttggacggccagccttggagaactgtgtccttggaggagcccgtgtctaaacccgatatgggtctcgtggctcttgaagctgaggggcaggagctcttgttggagctagaaaaaaatcacaggttgctggctccgggatatattgagacccactacggacccgacgggcagcctgtggtgctggcgcctaatcacactgatcattgccactaccagggcagggtaagaggtttccccgactcctgggttgtcttatgtacctgctctggaatgtccggactaattaccctctcccgcaacgcaagttattacctgaggccttggcctccaaggggatctaaggactttagcacacacgaaattttccgcatggagcagctgctgacctggaaaggaacgtgtggccacagggatcctggcaacaaggcaggcatgacttcactcccaggcggtccacagtcgcgcggacggcgagaggccagaaggacccgcaaatatttagaattgtacattgtggcagaccacaccctgtttctgactagacataggaaccttaaccacaccaagcagcgcttgctggaggtggctaattacgtggaccagttacttcgcaccctcgacattcaggtggcattaaccgggcttgaggtgtggacagaaagggaccgctcgcggcgtcaattgcgcgcttttttccggaaaggcggtggagcctgtctgtccaacgcccctgatccaggcctgcctgtccctccagcactttgcggcaatggtttcgtagaggctggcgaggagtgcgattgcggtccaggtcaggaatgcagggatctctgctgtttcgcacacaactgctcactacggcctggagcacagtgcgcacacggggactgctgtgtccgttgtttgttgaagcctgcgggtgccctgtgtcgccaagcaatgggtgattgcgacctgcctgaattttgcacaggtacttcttcacactgcccacctgacgtgtacttgcttgatggctccccgtgtgcaaggggtagtggttattgttgggacggagcatgtcctaccctcgagcagcagtgccaacagctctggggcccaggtagccaccccgctcccgaggcctgtttccaagtggtgaacagtgccggtgacgcgcacgggaattgcggccaggattccgagggacacttcctaccctgcgctggccgtgatgctttgtgcggaaagctgcagtgccaggggggtaaaccatcccttctggcaccccatatggtgccggtggattctacggtccacctcgacggtcaagaggtaacttgtagaggggctctcgccctcccgagcgcccagcttgatttgcttggtctggggctggtagagccaggcacccagtgtgggcctaggatggtctgtcaaagccggagatgcagaaaaaacgcctttcaagagttgcagcgttgcctgacggcctgccactcgcacggcgtctgcaacagcaatcataattgccactgtgcgcctggctgggcgccaccattttgcgataaaccaggattcggcggtagcatggactcaggtccagtacaggctgagaatcatgacacgtttctgctggccatgctgttaagtgtcttgctccctttgctcccgggagccggacttgcatggtgttgttataggctgcctggcgctcatctgcaacgctgctcttggggctgtcgcagggacccagcatgtagcggccctaaagatggtccacacagagaccatcctctgggcggagtccacccaatggaattgggtccaaccgccactgggcagccttggcccctggatcctgaaaactcccatgaaccctcatcccaccctgagaaacctctccccgctgtttcccccgatccccaggatcaggtgcagatgccaaggtcatgcctgtggtag

SEQ ID NO: 295302 - DNA, 2079 bp, Artificial Sequence
  derived and/or modified sequence
atgggctggagacccagaagagccagaggcacccccctgctgctgctgctgctgctgctgctgctgtggcccgtgcccggcgccggcgtgctgcagggccacatccccggccagcccgtgaccccccactgggtgctggacggccagccctggagaaccgtgagcctggaggagcccgtgagcaagcccgacatgggcctggtggccctggaggccgagggccaggagctgctgctggagctggagaagaaccacagactgctggcccccggctacatcgagacccactacggccccgacggccagcccgtggtgctggcccccaaccacaccgaccactgccactaccagggcagagtgagaggcttccccgacagctgggtggtgctgtgcacctgcagcggcatgagcggcctgatcaccctgagcagaaacgccagctactacctgagaccctggccccccagaggcagcaaggacttcagcacccacgagatcttcagaatggagcagctgctgacctggaagggcacctgcggccacagagaccccggcaacaaggccggcatgaccagcctgcccggcggcccccagagcagaggcagaagagaggccagaagaaccagaaagtacctggagctgtacatcgtggccgaccacaccctgttcctgaccagacacagaaacctgaaccacaccaagcagagactgctggaggtggccaactacgtggaccagctgctgagaaccctggacatccaggtggccctgaccggcctggaggtgtggaccgagagagacagaagcagaagacagctgagagccttcttcagaaagggcggcggcgcctgcctgagcaacgcccccgaccccggcctgcccgtgccccccgccctgtgcggcaacggcttcgtggaggccggcgaggagtgcgactgcggccccggccaggagtgcagagacctgtgctgcttcgcccacaactgcagcctgagacccggcgcccagtgcgcccacggcgactgctgcgtgagatgcctgctgaagcccgccggcgccctgtgcagacaggccatgggcgactgcgacctgcccgagttctgcaccggcaccagcagccactgcccccccgacgtgtacctgctggacggcagcccctgcgccagaggcagcggctactgctgggacggcgcctgccccaccctggagcagcagtgccagcagctgtggggccccggcagccaccccgcccccgaggcctgcttccaggtggtgaacagcgccggcgacgcccacggcaactgcggccaggacagcgagggccacttcctgccctgcgccggcagagacgccctgtgcggcaagctgcagtgccagggcggcaagcccagcctgctggccccccacatggtgcccgtggacagcaccgtgcacctggacggccaggaggtgacctgcagaggcgccctggccctgcccagcgcccagctggacctgctgggcctgggcctggtggagcccggcacccagtgcggccccagaatggtgtgccagagcagaagatgcagaaagaacgccttccaggagctgcagagatgcctgaccgcctgccacagccacggcgtgtgcaacagcaaccacaactgccactgcgcccccggctgggccccccccttctgcgacaagcccggcttcggcggcagcatggacagcggccccgtgcaggccgagaaccacgacaccttcctgctggccatgctgctgagcgtgctgctgcccctgctgcccggcgccggcctggcctggtgctgctacagactgcccggcgcccacctgcagagatgcagctggggctgcagaagagaccccgcctgcagcggccccaaggacggcccccacagagaccaccccctgggcggcgtgcaccccatggagctgggccccaccgccaccggccagccctggcccctggaccccgagaacagccacgagcccagcagccaccccgagaagcccctgcccgccgtgagccccgacccccaggaccaggtgcagatgcccagaagctgcctgtggtag

SEQ ID NO: 295303 - DNA, 2507 bp, Artificial Sequence
  derived and/or modified sequence
gagccggagttgcgagccgctgcctagaggccgaggagctcacagctatgggctggaggccccggagagctcgggggaccccgttgctgctgctgctactactgctgctgctctggccagtgccaggcgccggggtgcttcaaggacatatccctgggcagccagtcaccccgcactgggtcctggatggacaaccctggcgcaccgtcagcctggaggagccggtctcgaagccagacatggggctggtggccctggaggctgaaggccaggagctcctgcttgagctggagaagaaccacaggctgctggccccaggatacatagaaacccactacggcccagatgggcagccagtggtgctggcccccaaccacacggatcattgccactaccaagggcgagtaaggggcttccccgactcctgggtagtcctctgcacctgctctgggatgagtggcctgatcaccctcagcaggaatgccagctattatctgcgtccctggccaccccggggctccaaggacttctcaacccacgagatctttcggatggagcagctgctcacctggaaaggaacctgtggccacagggatcctgggaacaaagcgggcatgaccagccttcctggtggtccccagagcaggggcaggcgagaagcgcgcaggacccggaagtacctggaactgtacattgtggcagaccacaccctgttcttgactcggcaccgaaacttgaaccacaccaaacagcgtctcctggaagtcgccaactacgtggaccagcttctcaggactctggacattcaggtggcgctgaccggcctggaggtgtggaccgagcgggaccgcagccgccgccagctgcgcgccttcttccgcaaggggggcggcgcttgcctctccaatgccccggaccccggactcccggtgccgccggcgctctgcgggaacggcttcgtggaagcgggcgaggagtgtgactgcggccctggccaggagtgccgcgacctctgctgctttgctcacaactgctcgctgcgcccgggggcccagtgcgcccacggggactgctgcgtgcgctgcctgctgaagccggctggagcgctgtgccgccaggccatgggtgactgtgacctccctgagttttgcacgggcacctcctcccactgtcccccagacgtttacctactggacggctcaccctgtgccaggggcagtggctactgctgggatggcgcatgtcccacgctggagcagcagtgccagcagctctgggggcctggctcccacccagctcccgaggcctgtttccaggtggtgaactctgcgggagatgctcatggaaactgcggccaggacagcgagggccacttcctgccctgtgcagggagggatgccctgtgtgggaagctgcagtgccagggtggaaagcccagcctgctcgcaccgcacatggtgccagtggactctaccgttcacctagatggccaggaagtgacttgtcggggagccttggcactccccagtgcccagctggacctgcttggcctgggcctggtagagccaggcacccagtgtggacctagaatggtgtgccagagcaggcgctgcaggaagaatgccttccaggagcttcagcgctgcctgactgcctgccacagccacggggtttgcaatagcaaccataactgccactgtgctccaggctgggctccacccttctgtgacaagccaggctttggtggcagcatggacagtggccctgtgcaggctgaaaaccatgacaccttcctgctggccatgctcctcagcgtcctgctgcctctgctcccaggggccggcctggcctggtgttgctaccgactcccaggagcccatctgcagcgatgcagctggggctgcagaagggaccctgcgtgcagtggccccaaagatggcccacacagggaccaccccctgggcggcgttcaccccatggagttgggccccacagccactggacagccctggcccctggaccctgagaactctcatgagcccagcagccaccctgagaagcctctgccagcagtctcgcctgacccccaagatcaagtccagatgccaagatcctgcctctggtgagaggtagctcctaaaatgaacagatttaaagacaggtggccactgacagccactccaggaacttgaactgcaggggcagagccagtgaatcaccggacctccagcacctgcaggcagcttggaagtttcttccccgagtggagcttcgacccacccactccaggaacccagagccacattagaagttcctgagggctggagaacactgctgggcacactctccagctcaataaaccatcagtcccagaagcaaaggtcacacagcccctgacctccctcaccagtggaggctgggtagtgctggccatcccaaaagggctctgtcctgggagtctggtgtgtctcctacatgcaatttccacggacccagctctgtggagg

SEQ ID NO: 295304 - protein, 179 aa, Artificial Sequence
  derived and/or modified sequence
MGWRPRRARGTPLLLLLLLLLLWPVPGAGVLQGHIPGQPVTPHWVLDGQPWRTVSLEEPVSKPDMGLVALEAEGQELLLELEKNQLLAPGYIETHYGPDGQPVVLAPNHTVRCFHGLWDAPPEGRREARRTRKYLELYIVADHTLFLTRHRNLNHTKQRLLEVANYVDQVVNSAGDAHG

SEQ ID NO: 295305 - protein, 138 aa, Artificial Sequence
  derived and/or modified sequence
MGWRPRRARGTPLLLLLLLLLLWPVPGAGVLQGHIPGQPVTPHWVLDGQPWRTVSLEEPVSKPDMGLVALEAEGQELLLELEKNHRLLAPGYIETHYGPDGQPVVLAPNHTVRCFHGLWDAPPEVPPHHSYPYSSLHS

SEQ ID NO: 295306 - protein, 484 aa, Artificial Sequence
  derived and/or modified sequence
MAARTLGRGVGRLLGSLRGLSGQPARPPCGVSAPRRAASGPSGSAPAVAAAAAQPGSYPALSAQAAREPAAFWGPLARDTLVWDTPYHTVWDCDFSTGKIGWFLGGQLNVSVNCLDQHVRKSPESVALIWERDEPGTEVRITYRELLETTCRLANTLKRHGVHRGDRVAIYMPVSPLAVAAMLACARIGAVHTVIFAGFSAESLAGRINDVGEPINCEAWEWLHRVVGDSRCTLVDTWWQTETGGICIAPRPSEEGAEILPAMAMRPFFGIVPVLMDEKGSVVEGSNVSGALCISQAWPGMARTIYGDHQRFVDAYFKAYPGYYFTGDGAYRTEGGYYQITGRMDDVINISGHRLGTAEIEDAIADHPAVPESAVIGYPHDIKGEAAFAFIVVKDSAGDSDVVVQELKSMVATKIAKYAVPDEILVVKRLPKTRSGKVMRRLLRKIITSEAQELGDTTTLEDPSIIAEILSVYQKCKDKQAAAK

SEQ ID NO: 295307 - DNA, 462 bp, Artificial Sequence
  derived and/or modified sequence
atggctgcgcgaacactgggccgcggagtgggcaggttactggggtcactccgggggctatccgggcaacccgcccgtcctccctgtggcgtctccgctccacggagggctgcgagcggtccatctggttctgcaccagctgtggccgcagcagcagcacagcctggaagctatccagcgcttagtgcacaggccgccagagaaccagcggccttctggggtccactggcgagagatacacttgtgtgggacactccatatcatacagtctgggactgcgacttctcaaccggaaaaatcgggtggttcctcgggggccagctaaacgtatctgtgaactgtctggatcaacacgtcagaaagtccccagagtcagttgctttgatctgggagcgggacgaacccggcactgaggtccgaatcacttactccccctggctccaaatgccttgtggcccatag

SEQ ID NO: 295308 - DNA, 1455 bp, Artificial Sequence
  derived and/or modified sequence
atggccgcccgaactctggggagaggagtcggccgtctgctgggctctctgcgcggactttctgggcagcccgcacggccgccttgtggagtgagcgccccacgtcgcgcagcttcgggcccaagcggatccgcccctgccgtcgccgccgccgcagcgcagcctggctcttacccggccctgtccgctcaggctgccagagaacctgccgccttttggggaccgctcgcccgcgacacactggtatgggatactccatatcatacagtgtgggactgtgacttcagcacaggcaagattgggtggtttctaggaggccagcttaatgtcagtgtgaattgtctggatcaacacgtgaggaaatctccagaatcagtggctctcatctgggagcgggacgagcctgggacagaagtgagaattacatatagagaattgctcgagactacctgtagactggctaatacactgaaaaggcatggcgtgcatagaggggaccgagttgctatctacatgcccgtcagccctcttgccgtggccgccatgctagcctgcgcccggattggggccgtccacaccgttatctttgctggctttagtgccgaatctctagctgggaggattaatgacgttggcgagcccattaactgtgaagcctgggaatggctgcacagggtggtgggagattcccggtgcacactagtagacacctggtggcagacagagaccggtggtatctgtattgccccgagaccctcagaggagggcgcagaaatcttgcctgcaatggctatgcggccttttttcggcatagttcccgttctaatggatgagaaggggtcagtcgtcgaggggagtaatgtgagtggagccctgtgtatttcccaggcgtggccaggtatggctcggactatttatggtgatcatcaacggttcgtcgacgcatattttaaagcttatcccgggtactactttaccggtgacggcgcctacaggactgaggggggctactaccaaatcactggtcgaatggatgacgttatcaacatctcaggccacagactcggcacagcagagattgaggatgcgattgctgaccaccccgccgtgcccgagtctgccgtaatcggttatccacacgatattaaaggcgaggccgccttcgcgttcatcgtggtcaaagacagcgcaggagattcagacgtggtggtgcaagagttgaagtccatggtcgccaccaagatcgcaaaatatgccgtgccagacgagatcctggtagttaaacgtctgcctaagacgaggagtggaaaggtgatgagacgcctgctgaggaaaatcattacaagtgaagcccaggagctcggcgacactactacgttggaggacccatcaataattgctgaaatcttgagcgtgtatcaaaagtgtaaagacaagcaggctgccgccaagtag

SEQ ID NO: 295309 - DNA, 462 bp, Artificial Sequence
  derived and/or modified sequence
atggccgcccggaccctgggccggggcgtgggccgcctgctgggcagcctgcggggcctgagcggccagcctgcccggcccccctgtggggtgtctgcccccaggagagctgccagcggccccagcggcagcgccccagctgtggccgctgctgctgcccagcccggcagctacccagccctgagcgcccaggccgcccgggagcctgctgccttctggggccccctggcccgggacaccctggtgtgggacaccccctaccacacagtgtgggactgtgacttcagcacaggcaagattggctggttcctgggcggccagctgaatgtgtctgtgaactgcctggaccagcacgtgaggaagagccctgagagcgtggccctgatctgggagagagatgagcctggaacagaggtgcgcatcacctacagcccctggctgcagatgccctgtggcccctag

SEQ ID NO: 295310 - DNA, 1455 bp, Artificial Sequence
  derived and/or modified sequence
atggccgcccggaccctgggccggggcgtgggccgcctgctgggcagcctgcggggcctgagcggccagcctgcccggcccccctgtggggtgtctgcccccaggagagctgccagcggccccagcggcagcgccccagctgtggccgctgctgctgcccagcccggcagctacccagccctgagcgcccaggccgcccgggagcctgctgccttctggggccccctggcccgggacaccctggtgtgggacaccccctaccacacagtgtgggactgtgacttcagcacaggcaagattggctggttcctgggcggccagctgaatgtgtctgtgaactgcctggaccagcacgtgaggaagagccctgagagcgtggccctgatctgggagagagatgagcctggaacagaggtgcgcatcacctaccgggagctgctggagaccacctgccgcctggccaacaccctgaagagacatggagtgcacagaggagacagagtggccatctacatgcctgtgagccccctggccgtggccgccatgctggcctgtgcccgcatcggggctgtgcacacagtcatctttgctggcttctctgctgagagcctggccggccgcatcaatgatgtgggggagcccatcaactgtgaggcctgggagtggctgcaccgggtggtgggggacagccgctgcaccctggtggacacctggtggcagacagaaacaggaggcatctgcatcgccccccggcccagcgaggagggcgctgagatcctgcctgccatggccatgaggcccttctttggaattgtgcctgtgctgatggatgagaagggctctgtggtggagggcagcaatgtgtctggggccctgtgcatcagccaggcctggccaggcatggcccggaccatctacggggaccaccagagatttgtggatgcctacttcaaggcctacccaggctactacttcaccggagatggagcctacagaacagaaggaggctactaccagatcactggaaggatggatgatgtgatcaacatcagcggccaccggctgggcacagctgagattgaagatgccatcgctgaccaccctgctgtgcctgagagcgctgtgattggctacccccatgacatcaagggggaggccgcctttgccttcatcgtggtgaaggacagcgctggggacagtgatgtggtggtgcaggagctgaagtccatggtggccaccaagatcgccaagtatgctgtgcctgatgagatcctggtggtgaagaggctgcccaagaccaggtctgggaaggtgatgaggcggctgctgaggaagatcatcaccagcgaggcccaggagctgggggacaccaccaccctggaggaccccagcatcatcgccgagatcctgtctgtgtaccagaagtgcaaggacaagcaggccgccgccaagtag

SEQ ID NO: 295311 - DNA, 462 bp, Artificial Sequence
  derived and/or modified sequence
atggccgcccggaccctgggccggggcgtgggccggctgctgggcagccttcggggacttagtgggcagcccgcccgacccccctgcggggtctccgctcctcgccgtgccgccagtggcccttctgggtctgctccggctgtggcagcagcggctgcacaacctggcagctaccccgccctcagcgcacaggcggcccgtgaacccgctgcattttggggccctttagcgcgtgacacactcgtatgggacacaccgtaccacactgtgtgggattgcgatttcagtacgggcaaaatcgggtggttcctaggagggcaacttaacgtctctgtgaattgtctcgaccagcacgtgcggaagagcccggagagtgtcgcgttgatttgggaaagggacgagccgggaaccgaagtgagaatcacttactctccctggctccaaatgccttgtggaccatag

SEQ ID NO: 295312 - DNA, 1455 bp, Artificial Sequence
  derived and/or modified sequence
atggccgcccggaccctgggccggggcgtgggccggctgctgggctcccttcgtggattgagcggacagcccgctcggcccccatgcggagtgagcgcgcctcgccgcgcggcaagcggaccatccggatctgcccccgctgtggcagccgcagcagcacaaccaggcagttaccccgcattgtctgcccaggcagccagagaacccgctgccttttgggggcctcttgccagagatacactggtatgggataccccctaccacactgtctgggactgtgactttagtacaggcaagattgggtggttccttggtgggcagctgaacgtctccgtgaattgccttgatcaacacgtgaggaagagtcccgaaagcgtggccctcatctgggaacgggatgaacctgggaccgaggtacgaattacttaccgcgaactgctggaaacaacctgtagattagccaacactctcaagcgccatggggtgcaccgcggggatagagtagccatatatatgcccgtgtcccctctggccgttgccgctatgctggcatgtgcaagaatcggcgctgtgcacacagtcatatttgccgggtttagtgctgagagcctggctggaaggatcaacgacgtgggcgagcctatcaattgtgaggcttgggaatggctgcacagggtggtgggggatagtcggtgcacactggtggacacatggtggcagacggagaccggggggatctgcatagctccgcgcccctccgaagaaggagcagaaatattacctgctatggccatgcgtcctttctttgggatcgtgcccgtcctcatggacgagaagggaagcgttgtggaagggagcaacgtttccggagctctgtgtatcagccaggcttggcccgggatggcacgcaccatctatggggaccatcaacgttttgtagatgcctatttcaaggcttacccaggatactatttcacgggtgacggggcctaccgcacagaaggtgggtactaccagattaccggtagaatggacgacgtgatcaatatctcaggccaccgcttgggaactgctgagatcgaagacgctattgccgatcatcccgcagtacctgaaagcgccgtgattgggtacccccacgacattaagggggaggccgcatttgctttcatcgtcgtcaaggactctgctggcgactcagatgtggtggtgcaggagctgaaatccatggttgccacaaaaatcgctaagtacgcggtgcccgatgagattctggtcgtcaaacgacttcctaaaactcggagtggtaaagttatgcgacgtctgttacgaaagatcatcacttcagaagcgcaggagctgggggacactaccactttggaggacccttccattatcgcggaaattctctctgtttaccaaaagtgcaaggacaagcaggctgccgctaaatag

SEQ ID NO: 295313 - DNA, 462 bp, Artificial Sequence
  derived and/or modified sequence
atggcagcgagaacactgggcaggggagttgggaggctcctgggctccctgaggggtctcagtggacaacctgcacgcccaccatgtggggtctcagcgcctcggagagctgctagcggaccttcaggatctgcccctgccgttgctgctgccgctgcgcagccagggtcttatcctgcactctcagcgcaagctgcgagggaacctgctgccttttggggacccctagccagggacaccctcgtatgggataccccctaccatacagtttgggattgcgacttttcgactggaaagattggttggttccttggaggacaacttaacgttagcgttaactgtctggaccagcatgttcgcaaatcaccggagagcgtggccctgatttgggaacgcgacgaacccggtacagaggtccggatcacatattccccgtggctacagatgccctgcggcccatag

SEQ ID NO: 295314 - DNA, 1455 bp, Artificial Sequence
  derived and/or modified sequence
atggcagccaggactctgggaagaggcgttgggagattgctggggagtctgagagggctttcgggacagcctgccaggcctccctgtggtgtcagcgcgcctagaagagccgcttccggaccatccggctccgcccctgcagtcgctgccgctgcggctcagcccggaagctacccagccctgagcgcccaggcggctcgagagccggcagccttctggggacctctggccagagatacactcgtgtgggataccccctatcatacagtgtgggactgcgatttcagcacaggtaaaatcggctggttcctaggaggccagctaaatgtctccgtgaattgtctggaccagcacgttcggaaatcaccagaatctgtggctcttatttgggaacgcgatgagccgggaacagaggttcgcattacctaccgggaactccttgagaccacctgtagactggcaaacacactgaaacgccacggcgtgcatcggggagatcgggtggcaatctatatgcctgtatcccccctggcagttgcagcaatgttggcttgtgcccgtatcggagcagtgcacaccgtgatcttcgccggtttctctgccgaatcactggcgggtcgaataaacgatgtgggggaacccattaactgcgaggcctgggagtggctgcatcgagtggtgggggatagtcggtgtactcttgtggacacttggtggcaaactgagacaggcggtatctgcatcgcccctcgcccttctgaggaaggtgctgagatcctccccgcaatggccatgagaccgttcttcggaatcgtgcccgtgctgatggatgagaaaggcagcgtcgtcgagggatcaaatgtgtccggcgctctttgcatatcccaagcctggcccggtatggctaggacaatatatggtgaccatcagcgcttcgttgacgcctactttaaggcctaccccggttactatttcacaggcgacggggcttatcggaccgagggaggctactaccaaataacggggagaatggatgatgttattaacataagcggtcacagactgggcactgccgagatagaagatgccatcgcggaccatcctgcagtaccagaaagcgctgttattgggtacccccacgacataaagggagaagctgcatttgcctttattgtggtcaaagattccgccggtgattccgacgtggtggtccaggagctcaagagcatggtagctactaaaattgccaaatacgccgtccctgacgaaatcctggtagtaaaaaggctccctaaaacccggagcggaaaggtgatgcggaggctgctcagaaaaattatcacgtcggaggcacaggaattaggcgatacaacaaccctcgaggacccatcgatcattgctgagattctctctgtgtatcagaagtgcaaggacaagcaagcagccgctaaatag

SEQ ID NO: 295315 - DNA, 462 bp, Artificial Sequence
  derived and/or modified sequence
atggccgccagaaccctgggcagaggcgtgggcagactgctgggcagcctgagaggcctgagcggccagcccgccagacccccctgcggcgtgagcgcccccagaagagccgccagcggccccagcggcagcgcccccgccgtggccgccgccgccgcccagcccggcagctaccccgccctgagcgcccaggccgccagagagcccgccgccttctggggccccctggccagagacaccctggtgtgggacaccccctaccacaccgtgtgggactgcgacttcagcaccggcaagatcggctggttcctgggcggccagctgaacgtgagcgtgaactgcctggaccagcacgtgagaaagagccccgagagcgtggccctgatctgggagagagacgagcccggcaccgaggtgagaatcacctacagcccctggctgcagatgccctgcggcccctag

SEQ ID NO: 295316 - DNA, 1455 bp, Artificial Sequence
  derived and/or modified sequence
atggccgccagaaccctgggcagaggcgtgggcagactgctgggcagcctgagaggcctgagcggccagcccgccagacccccctgcggcgtgagcgcccccagaagagccgccagcggccccagcggcagcgcccccgccgtggccgccgccgccgcccagcccggcagctaccccgccctgagcgcccaggccgccagagagcccgccgccttctggggccccctggccagagacaccctggtgtgggacaccccctaccacaccgtgtgggactgcgacttcagcaccggcaagatcggctggttcctgggcggccagctgaacgtgagcgtgaactgcctggaccagcacgtgagaaagagccccgagagcgtggccctgatctgggagagagacgagcccggcaccgaggtgagaatcacctacagagagctgctggagaccacctgcagactggccaacaccctgaagagacacggcgtgcacagaggcgacagagtggccatctacatgcccgtgagccccctggccgtggccgccatgctggcctgcgccagaatcggcgccgtgcacaccgtgatcttcgccggcttcagcgccgagagcctggccggcagaatcaacgacgtgggcgagcccatcaactgcgaggcctgggagtggctgcacagagtggtgggcgacagcagatgcaccctggtggacacctggtggcagaccgagaccggcggcatctgcatcgcccccagacccagcgaggagggcgccgagatcctgcccgccatggccatgagacccttcttcggcatcgtgcccgtgctgatggacgagaagggcagcgtggtggagggcagcaacgtgagcggcgccctgtgcatcagccaggcctggcccggcatggccagaaccatctacggcgaccaccagagattcgtggacgcctacttcaaggcctaccccggctactacttcaccggcgacggcgcctacagaaccgagggcggctactaccagatcaccggcagaatggacgacgtgatcaacatcagcggccacagactgggcaccgccgagatcgaggacgccatcgccgaccaccccgccgtgcccgagagcgccgtgatcggctacccccacgacatcaagggcgaggccgccttcgccttcatcgtggtgaaggacagcgccggcgacagcgacgtggtggtgcaggagctgaagagcatggtggccaccaagatcgccaagtacgccgtgcccgacgagatcctggtggtgaagagactgcccaagaccagaagcggcaaggtgatgagaagactgctgagaaagatcatcaccagcgaggcccaggagctgggcgacaccaccaccctggaggaccccagcatcatcgccgagatcctgagcgtgtaccagaagtgcaaggacaagcaggccgccgccaagtag

SEQ ID NO: 295317 - DNA, 2244 bp, Artificial Sequence
  derived and/or modified sequence
aaaaggaaaacgaggcaccgagaagttaaggaacttgctcaaggtcacagagtttgaactcaggctacagatgctgcagcaactggagaaagtcctcatcgccccatatcacccaccaccgacccccagcaggacgtgacccccgccaggacggaggccggcagctggggggctggagcatgggacccagaacacggactcaggcttgcgcagcctcctggcttctaggcgggagcctagaaaggcgccagcccctttcgcgtgctgctgagactccaggggtggggttcactctcaggggcgcacaaaggcatgaaaaccttggcttcagcctctgagatgcggaactgaccgacctattgtcttgggacccaccagtgcgcttgggtgcaccagcccccttaacgttggtgccggctccctcccggctcctccccatcccagagggtcccctcgccccaggccctgagcctgcgtcctggggtcctgggccgcacgtgcctctggcagctcgaagaagctgtcggggcttgcaggagagcgtgcaaactgaaaccaaaacaggccgactcgaggaacatccgggtgggaccgcagactcaccggagcgcagcgcctgggccagggcctgggaccctgctccgccccgcgctcccctgcaccccttccccacgctgctcccctcttcctaagcggccccccctctcccgggcagcagaagaaggggtgggacccgggcgggctccgggagggggccctggaggaatggatggtggcggaagggcggagcaggggcggggcccgcggagactccacggggcgccccgggcgtgaggcacccactctgggagcacagagagctcaggtagcctgcctagatggcggcgcgcaccctgggccgcggcgtcgggaggctgctgggcagcctgcgagggctctcggggcagcccgcgcggccgccgtgcggggtgagcgcgccgcgcagggcggcctcgggaccctcgggcagcgctcccgcagttgcagcagcagcagcacagccaggctcgtatcccgcgctgagtgcacaggcagcccgggagccggccgccttctgggggcctctggcgcgggacactctcgtgtgggacaccccctaccacaccgtctgggactgcgacttcagcactggcaagatcggctggttcctgggaggccagttaaatgtctctgtcaactgcttggaccagcatgttcggaagtcccccgagagcgttgctttgatctgggagcgcgatgagcctggaacggaagtgaggatcacctacagtccctggttgcagatgccgtgtggcccataggccagcagcattcttctgccctggatcctcgggccccactggacaactgagcggccccccaggtggcccctgcacactggagtgtgcttggctctgaagacccaagctgctgcagctgcccctcgccacggtgggcccagctccatctgcctgcgaacaaagccccttctgagaaggaacttgaggctgctgcccctggagtagttcttcagtaaaagatgaaaaccctctgttgggggtcgggggctaaggagctaactggacacctggaggtccggcagggagggcccagccatggcactccccgaagggccagtttctctccatcagtctctcaggtgtgcctggaccctggggcaggcaggttgtgtgccacgccccctcggctggacgctgcccgtgggagcactgagtgtgtgctaagtagcggttcggtctgtgagcggggctggagccctgtggagacgtgtggttaaacataaaccatgtgagaattctcaggaccacagccagcctgtggaagctaaggacagcttcaggtccatgacactgaaatggccctggcaaagtacttattactctgtctctaaaaataaacaggggccggtcgcagtggctcatgccggtaatcccagcactttgggatggtgaggatcacttgaggacggtgggtggatcgcttgaggtcaggagtttgagaccaacctggccaacatggtgaaaccccgtctctactaaaaatacaaaaattagttgggtgtggtgatgtgcgcctgtagtcccagctacttgggaggctgaagcaggagaactgcttgaaactgggaggtggatgttgcagtgagccaagattgtgccactgcactccatcctgggtgacagagtcagactccatctcaaaaat

SEQ ID NO: 295318 - DNA, 3857 bp, Artificial Sequence
  derived and/or modified sequence
aaaaggaaaacgaggcaccgagaagttaaggaacttgctcaaggtcacagagtttgaactcaggctacagatgctgcagcaactggagaaagtcctcatcgccccatatcacccaccaccgacccccagcaggacgtgacccccgccaggacggaggccggcagctggggggctggagcatgggacccagaacacggactcaggcttgcgcagcctcctggcttctaggcgggagcctagaaaggcgccagcccctttcgcgtgctgctgagactccaggggtggggttcactctcaggggcgcacaaaggcatgaaaaccttggcttcagcctctgagatgcggaactgaccgacctattgtcttgggacccaccagtgcgcttgggtgcaccagcccccttaacgttggtgccggctccctcccggctcctccccatcccagagggtcccctcgccccaggccctgagcctgcgtcctggggtcctgggccgcacgtgcctctggcagctcgaagaagctgtcggggcttgcaggagagcgtgcaaactgaaaccaaaacaggccgactcgaggaacatccgggtgggaccgcagactcaccggagcgcagcgcctgggccagggcctgggaccctgctccgccccgcgctcccctgcaccccttccccacgctgctcccctcttcctaagcggccccccctctcccgggcagcagaagaaggggtgggacccgggcgggctccgggagggggccctggaggaatggatggtggcggaagggcggagcaggggcggggcccgcggagactccacggggcgccccgggcgtgaggcacccactctgggagcacagagagctcaggtagcctgcctagatggcggcgcgcaccctgggccgcggcgtcgggaggctgctgggcagcctgcgagggctctcggggcagcccgcgcggccgccgtgcggggtgagcgcgccgcgcagggcggcctcgggaccctcgggcagcgctcccgcagttgcagcagcagcagcacagccaggctcgtatcccgcgctgagtgcacaggcagcccgggagccggccgccttctgggggcctctggcgcgggacactctcgtgtgggacaccccctaccacaccgtctgggactgcgacttcagcactggcaagatcggctggttcctgggaggccagttaaatgtctctgtcaactgcttggaccagcatgttcggaagtcccccgagagcgttgctttgatctgggagcgcgatgagcctggaacggaagtgaggatcacctacagggaactactggagaccacgtgccgcctggccaacacgctgaagaggcatggagtccaccgtggggaccgtgttgccatctacatgcccgtgtccccattggctgtggcagcaatgctggcctgtgccaggatcggagctgtccacacagtcatctttgctggcttcagtgcagagtccttggctgggaggatcaatgatgtgggagagcccatcaactgtgaggcctgggagtggcttcacagggtggtgggggacagcaggtgcacgctggtggacacctggtggcagacagaaacaggtggcatctgcatcgcaccacggccctcggaagaaggggcggaaatcctccctgccatggcgatgaggcccttctttggcatcgtccccgtcctcatggatgagaagggcagcgtcgtggagggcagcaacgtctccggggccctgtgcatctcccaggcctggccgggcatggccaggaccatctatggcgaccaccagcgatttgtggacgcctacttcaaggcctacccaggctattacttcactggagacggggcttaccgaactgagggcggctattaccagatcacagggcggatggatgatgtcatcaacatcagtggccaccggctggggaccgcagagattgaggacgccatcgccgaccaccctgcagtaccagaaagtgctgtcattggctacccccacgacatcaaaggagaagctgcctttgccttcattgtggtgaaagatagtgcgggtgactcagatgtggtggtgcaggagctcaagtccatggtggccaccaagatcgccaaatatgctgtgcctgatgagatcctggtggtgaaacgtcttccaaaaaccaggtctgggaaggtcatgcggcggctcctgaggaagatcatcactagtgaggcccaggagctgggagacactaccaccttggaggaccccagcatcatcgcagagatcctgagtgtctaccagaagtgcaaggacaagcaggctgctgctaagtgagctggcaccttgtggggctcttgggatgggcgggcacccaagccctggcttgtccttcccagaaggtacccctgaggttggcgtcttcctacgtcccagaagcagcccccaccccacacatgacccacaccgccctcacgtgaagctgggctgagagccctttctcccatccattggaggtcccaggagtgtcacccatggagaggctatgcgacatggctagggctggttctgccatctgagtttggtttcctggaatgaaaaggcattgccatctccattcctctgccctcttgagccagcacaggaaggtgaggccctgggatagcgcgcctgctcagataacacagagctagttagctagtagcaaccgtgttttctccagatctgtctagatacaaaggtcagaaatcttatttttatacttttatattgtggaagaacagcatgcaacactcacatgtagtgtgtggatttacttgaacatgttctttttaacatgtagttatgaaaatctccttttttgcctctactggtgaggaaacatgaggatcagaggccacatttttaattattgttagtgtatttggaagtctgaattggagatgtttgtacctctgtctaaacagttcccttgagaacttccaagcctccggcatcttttcctggtgagtgtttctcctgtgcttggttgtgtataatggagctaactcctaagcggtggggtgaatgtggccgccttagttctgaagctactccagttatgttctgtttcttcaagctgtgatccagaaagatttttgtgcccccagatgcctcttgataggagaggcaacatactccaaatagttgggttcttcagggaagctattagaaactcaggtgacttgttagagcactaacttggtcagagccaaatcctggcaaacgctgcctgaccttcactctgtggttggggcggtgagaaccactgaggtccaatgatgagacttggaggtctggatccagtctctctttgttttaatgtgacttaggtgctgtcaacattagcaagataatggaaatcacgacgccagtgggtgcttacctccctgctaggcatgcaggggctggcggttggcaggggaaggaggcccagtgagccgggtcccttaggggagggagagtttgtcctctttgccccacagtctacccttcagggccttgtggcagtgccagtgttcggggggtgtctgggccactgagtacccactcggtcgtggttgtgctggcctcttgggtgagtgaacctgtgaagcccaggaggtggtgttggctgcagggtacacaaatactgagtggtggtcttttgttacaggcttagcaacaaagctgtgccctgggcatggggggctgtagtgtagctacagttgtgcgtttgtgaaatggcttagctttccatgttgctgagaggaacctggacatggtcccgggcatctgaatgatctgtaggggagggagttcaaataaagctttattttgttc

SEQ ID NO: 295319 - protein, 250 aa, Artificial Sequence
  derived and/or modified sequence
MSRLRHPRTRWKNWWVRGILTLAMIAFFFIIIYLGPMVLMIIVMCVQIKCFHEIITIGYNVYHSYDLPWFRTLSWYFLLCVNYFFYGETVTDYFFTLVQREEPLRILSKYHRFISFTLYLIGFCMFVLSLVKKHYRLQFYMFGWTHVTLLIVVTQSHLVIHNLFEGMIWFIVPISCVICNDIMAYMFGFFFGRTPLIKLSPKKTWEGFIGGFFATVVFGLLLSYVMSGYRCFVCPVEYNNDTNSFTVDCE

SEQ ID NO: 295320 - DNA, 753 bp, Artificial Sequence
  derived and/or modified sequence
atgagccggttacgtcatcccagaactcggtggaaaaattggtgggtcagaggcattctaaccctggccatgatcgctttcttctttataattatctacctaggacctatggtgctcatgattatcgtgatgtgtgtgcagattaaatgtttccacgagataatcacgatcggatacaacgtatatcattcctatgacctgccatggtttagaaccctaagctggtacttcttgctctgcgtgaattacttcttctacggggaaactgttacggactacttctttacattagtgcagcgcgaagaaccattacggatcttatcaaagtaccaccgatttataagctttactctctacttgattggtttctgtatgttcgttctctccttggtgaaaaaacattaccgactccagttctacatgttcggctggacccacgtcaccctattaatcgtcgtgacccagtctcaccttgtgatccataatttgttcgaaggcatgatctggttcatcgtgcccatttcttgcgttatctgtaatgacatcatggcatacatgttcgggttttttttcggacggactccactcattaagctgagtccaaaaaaaacttgggaagggtttattggtggctttttcgctactgtcgtttttggccttctgctctcttacgtgatgtcgggctaccgttgcttcgtgtgtccagtggaatataataacgatacaaattctttcacagtagattgtgaatag

SEQ ID NO: 295321 - DNA, 753 bp, Artificial Sequence
  derived and/or modified sequence
atgagccggctgcggcaccccaggacccgctggaagaactggtgggtgcggggcatcctgaccctggccatgattgccttcttcttcatcatcatctacctgggccccatggtgctgatgatcatcgtgatgtgtgtgcagatcaagtgcttccacgagatcatcaccatcggctacaacgtgtaccacagctatgacctgccctggttccgcaccctgtcctggtacttcctgctgtgtgtgaactacttcttctacggggagaccgtgacagactacttcttcaccctggtgcagcgggaggagcccctgcgcatcctgagcaagtaccaccgcttcatctccttcaccctgtacctgattggcttctgcatgtttgtgctgagcctggtgaagaagcactaccgcctgcagttctacatgtttggctggacccacgtgaccctgctgattgtggtgacccagagccacctggtgatccacaacctgtttgagggcatgatctggttcatcgtgcccatcagctgtgtgatctgcaatgacatcatggcctacatgtttggcttcttctttggaagaacacccctcatcaagctgagccccaagaagacctgggagggcttcatcggcggcttctttgccaccgtggtgtttggcctgctgctgtcctatgtgatgagcggctaccgctgctttgtgtgccctgtggagtacaacaatgacaccaacagcttcaccgtggactgtgagtag

SEQ ID NO: 295322 - DNA, 753 bp, Artificial Sequence
  derived and/or modified sequence
atgagccggctgcggcacccccggacccggtggaagaactggtgggtacgcggtatccttaccctcgccatgatcgcttttttttttattatcatatacctgggtccaatggtgttaatgatcattgtcatgtgcgttcagatcaaatgtttccacgagatcatcaccatcgggtataacgtgtaccactcttacgatctgccctggtttcgcacgttatcctggtattttcttctatgtgtgaactatttcttttatggagagaccgtgaccgactatttcttcactctggttcagagagaggagccgctgcggattcttagcaagtaccacaggttcatcagctttacactgtatctcatagggttttgcatgtttgtcctgagtctagtcaagaagcactaccgccttcaattctacatgtttggttggactcacgtcaccttactgatagttgtgacacaatctcacctggtgatccataatctgtttgaaggtatgatttggttcatagtcccgatctcctgtgttatttgtaatgacatcatggcgtatatgttcggtttcttctttggacgtacccccctgattaagctcagccctaagaaaacatgggagggtttcatcggcggctttttcgcaacagtggtgtttggtctactactgagctacgttatgagtggctaccgatgcttcgtgtgtcccgttgagtataacaatgacaccaattcattcactgtcgactgcgaatag

SEQ ID NO: 295323 - DNA, 753 bp, Artificial Sequence
  derived and/or modified sequence
atgagccggcttcgccatccacggactagatggaaaaactggtgggtgaggggaattctcacactcgctatgatcgccttcttttttattatcatctaccttgggccaatggtcttgatgatcatcgtgatgtgcgtccagatcaaatgtttccatgagattatcaccatcggctacaatgtataccactcctatgatctcccctggtttcgtaccctctcatggtattttctgttgtgcgtgaactactttttttatggagaaacggtgacagactacttcttcacactggtccagagggaggagcccctgcggatactgtccaaataccaccgctttattagttttactctgtatctaatcggtttctgcatgtttgtactatcattagtgaagaaacattatcggcttcagttttatatgtttgggtggacgcacgtcactctgctgatcgtggtgactcagtctcatttagtgattcataacctctttgaggggatgatctggttcatagttcctatctcttgtgtaatatgtaacgacataatggcttatatgttcggtttcttttttgggcgaacccccttgataaagctcagcccgaaaaagacatgggagggcttcattggtgggttcttcgcaacagtcgtattcgggctcttgctctcgtacgtaatgagcgggtaccgctgtttcgtgtgtccagttgaatataataatgataccaattccttcacagtcgattgtgaatag

SEQ ID NO: 295324 - DNA, 945 bp, Artificial Sequence
  derived and/or modified sequence
ccagggctggctgctgggctgctaagggaactgtgagccgctcagagccgcgcgcctcccgggcggggcggggccggccgtgggagtccgcgcgtgcccgcgccgagctgcctgctccggcggcttcgctgctagctcgcggcgacgtcgggccgattttcccaggatgacagagctgaggcagagggtggcccatgagccggttgcgccacccgaggacaagatggaagaactggtgggtgagaggcatcctgactttggccatgattgcatttttcttcatcatcatttacctgggaccaatggttttgatgataatcgtgatgtgcgttcagattaagtgtttccatgagataatcactattggctacaacgtctaccactcatatgatctgccctggttcaggacgctcagctggtactttctcctgtgtgtaaactatttcttctatggtgagacagtgacggattacttcttcaccctggtccagagagaagagcctttgcggattctcagtaaataccaccggttcatttcctttactctctatctaataggattctgcatgtttgtactgagtctggtcaagaagcattatcgactgcagttctacatgtttggctggacccatgtgacattgctgattgttgtaacacagtcacatcttgttatccacaacctatttgaaggaatgatctggttcattgtccccatatcttgtgtgatctgtaatgacatcatggcctatatgtttggctttttctttggtcggaccccactcatcaagctgtccccgaagaagacctgggaaggcttcattgggggcttctttgctactgtggtgtttggccttctgctgtcctatgtgatgtccgggtacagatgctttgtctgccctgtggagtacaacaatgacaccaacagcttcactgtggactgtgagc

SEQ ID NO: 295325 - DNA, 753 bp, Artificial Sequence
  derived and/or modified sequence
atgagcagactgagacaccccagaaccagatggaagaactggtgggtgagaggcatcctgaccctggccatgatcgccttcttcttcatcatcatctacctgggccccatggtgctgatgatcatcgtgatgtgcgtgcagatcaagtgcttccacgagatcatcaccatcggctacaacgtgtaccacagctacgacctgccctggttcagaaccctgagctggtacttcctgctgtgcgtgaactacttcttctacggcgagaccgtgaccgactacttcttcaccctggtgcagagagaggagcccctgagaatcctgagcaagtaccacagattcatcagcttcaccctgtacctgatcggcttctgcatgttcgtgctgagcctggtgaagaagcactacagactgcagttctacatgttcggctggacccacgtgaccctgctgatcgtggtgacccagagccacctggtgatccacaacctgttcgagggcatgatctggttcatcgtgcccatcagctgcgtgatctgcaacgacatcatggcctacatgttcggcttcttcttcggcagaacccccctgatcaagctgagccccaagaagacctgggagggcttcatcggcggcttcttcgccaccgtggtgttcggcctgctgctgagctacgtgatgagcggctacagatgcttcgtgtgccccgtggagtacaacaacgacaccaacagcttcaccgtggactgcgagtag

SEQ ID NO: 295326 - DNA, 968 bp, Artificial Sequence
  derived and/or modified sequence
attgaatgcagcaagggtctggaggctgaggaccaggcagacagacattcagagttgctggaacgcgacagagacagggagtcagactggtcatgcaaggccagctctggggtctcggcaggtggtccgcaacatgacctccgagttcttcgctgcccagctccgggcccagatctctgacgacaccactcacccgatctcctactacaagcccgagttctacacgccggatgacgggggcactgctcacctgtctgtcgtcgcagaggacggcagtgctgtgtccgccaccagcaccatcaacctctactttggctccaaggtccgctccccggtcagcgggatcctgttcaataatgaaatggacgacttcagctctcccagcatcaccaacgagtttggggtacccccctcacctgccaatttcatccagccagggaagcagccgctctcgtccatgtgcccgacgatcatggtgggccaggacggccaggtccggatggtggtgggagctgctgggggcacacagatcaccacggccactgcactggccatcatctacaacctctggttcggctatgacgtgaagcgggccgtggaggagccccggctgcacaaccagcttctgcccaacgtcacgacagtggagagaaacattgaccaggcagtgactgcagccctggagacccggcaccatcacacccagatcgcgtccaccttcatcgctgtggtgcaagccatcgtccgcacggctggtggctgggcagctgcctcggactccaggaaaggcggggagcctgccggctactgagtgctccaggaggacaaggctgacaagcaatccagggacaagatactcaccaggaccaggaaggggactctgggggaccggcttcccctgtgagcagcagagcagcacaataaatgaggccactgtgccaggctccaggtggcctccctggcctgtc

SEQ ID NO: 295327 - DNA, 974 bp, Artificial Sequence
  derived and/or modified sequence
attgaatgcagcaagggtctggaggctgaggaccaggcagacaaacattcagagttgctggaatgcgacagagacagggagtcagactggtcatgcaaggccagctctggggtctcggcaggtggtccgcgacatgacctccgagttcttctctgcccagctccgggcccagatctctgacgacaccactcacccgatctcctactacaagcccgagttctacatgccggatgacgggggcactgctcacctgtctgtggtcgcagaggacggcagtgctgtgtccgccaccagcaccatcaacctctactttggctccaaggtgcgctccccagtcagcgggatcctgctcaataatgaaatggatgacttcagctctaccagcatcaccaacgagtttggggtacccccctcacctgccaatttcatccagccagggaagcagccgctctcgtccatgtgcccgacgatcatggtgggccaggacggccaggtccggatggtggtgggagctgccgggggcacgcagatcaccatggccactgcactggccatcatctacaacctctggttcggctatgacgtgaagtgggccgtggaggagccccggctgcacaaccagcttctgcccaacgtcacgacagtggagagaaacattgaccaggaagtgactgcagccctggagacccggcaccatcacacccagatcacgtccaccttcattgctgtggtgcaagccatcgtccgcatggctggtggctgggcagctgcctcggactccaggaaaggtggggaacctgctggctactgattgctccaggcggacaaggctgacaagcaatccaggaacaaaatactcaccaggacgaggaagaggactttgggggacaggcttctcctgtgagcagcagagcagcacaataaatgaggccactgtgccaggctccaggtggcctccctggcctgtctcccca

SEQ ID NO: 295328 - DNA, 1025 bp, Artificial Sequence
  derived and/or modified sequence
gtcagactggtcatgcaaggtcctgggcctgcccttgggtcctggggagccacggaaggttgtgggtgccagagggttgtggtcagagccacagtcaggggccttctgagacctgtgccccctccccaccctccctccccacctccctaggccagctctggggtctcggcaggtggtccgcgacatgacctccgagttcttctctgcccagctccgggcccagatctctgacgacaccactcacccgatctcctactacaagcccgagttctacatgccggatgacgggggcactgctcacctgtctgtggtcgcagaggacggcagtgctgtgtccgccaccagcaccatcaacctctactttggctccaaggtgcgctccccagtcagcgggatcctgctcaataatgaaatggatgacttcagctctaccagcatcaccaacgagtttggggtacccccctcacctgccaatttcatccagccagggaagcagccgctctcgtccatgtgcccgacgatcatggtgggccaggacggccaggtccggatggtggtgggagctgccgggggcacgcagatcaccatggccactgcactggccatcatctacaacctctggttcggctatgacgtgaagtgggccgtggaggagccccggctgcacaaccagcttctgcccaacgtcacgacagtggagagaaacattgaccaggaagtgactgcagccctggagacccggcaccatcacacccagatcacgtccaccttcattgctgtggtgcaagccatcgtccgcatggctggtggctgggcagctgcctcggactccaggaaaggtggggaacctgctggctactgattgctccaggcggacaaggctgacaagcaatccaggaacaaaatactcaccaggacgaggaagaggactttgggggacaggcttctcctgtgagcagcagagcagcacaataaatgaggccactgtgccaggctccaggtggcctccctggcctgtctcccca

SEQ ID NO: 295329 - DNA, 1046 bp, Artificial Sequence
  derived and/or modified sequence
ctcgagagctgggctctgcgtcctcgtccagccgccaactcggccaaaggcgaagccagcagtttcttctgctgccgggcaacgcgccttttaaacctgagggagtgggcgcgtgagcacttaatggcgccggtgacagagtgagcttaacggattaataagcgcagccaggccagctctggggtctcggcaggtggtccgcgacatgacctccgagttcttctctgcccagctccgggcccagatctctgacgacaccactcacccgatctcctactacaagcccgagttctacatgccggatgacgggggcactgctcacctgtctgtggtcgcagaggacggcagtgctgtgtccgccaccagcaccatcaacctctactttggctccaaggtgcgctccccagtcagcgggatcctgctcaataatgaaatggatgacttcagctctaccagcatcaccaacgagtttggggtacccccctcacctgccaatttcatccagccagggaagcagccgctctcgtccatgtgcccgacgatcatggtgggccaggacggccaggtccggatggtggtgggagctgccgggggcacgcagatcaccatggccactgcactggccatcatctacaacctctggttcggctatgacgtgaagtgggccgtggaggagccccggctgcacaaccagcttctgcccaacgtcacgacagtggagagaaacattgaccaggaagtgactgcagccctggagacccggcaccatcacacccagatcacgtccaccttcattgctgtggtgcaagccatcgtccgcatggctggtggctgggcagctgcctcggactccaggaaaggtggggaacctgctggctactgattgctccaggcggacaaggctgacaagcaatccaggaacaaaatactcaccaggacgaggaagaggactttgggggacaggcttctcctgtgagcagcagagcagcacaataaatgaggccactgtgccaggctccaggtggcctccctggcctgtctcccca

SEQ ID NO: 295330 - DNA, 528 bp, Artificial Sequence
  derived and/or modified sequence
atgatcctgaacgtgctggagtacggcagccagcaggtggccgacctgaccctgaacctggacgactacatcgacgccgagcacctgggcgacttccacagaacctacaagaacagcgaggagctgagaagcagaatcgtgagcggcatcatcacccccatccacgagcagtgggagaaggccaacgtgagcagcccccacagagagttcccccccgccaccgccagagaggtggaccccctgagaatccccccccaccacccccacaccagcagacagcccccctggtgcgaccccctgggccccttcgtggtgggcggcgaggacctggaccccttcggccccagaagaggcggcatgatcgtggaccccctgagaagcggcttccccagagccctgatcgaccccagcagcggcctgcccaacagactgccccccggcgccgtgccccccggcgccagattcgaccccttcggccccatcggcaccagcccccccggccccagacccgacagaagaggccagtag

SEQ ID NO: 295331 - DNA, 552 bp, Artificial Sequence
  derived and/or modified sequence
atggccggcctggaggtgctgttcgccagcgccgcccccgccatcacctgcagacaggacgccctggtgtgcttcctgcactgggaggtggtgacccacggctacttcggcctgggcgtgggcgaccagcccggccccaacgacaagaagagcgagctgctgcccgccggctggaacaacaacaaggacctgtacgtgctgagatacgagtacaaggacggcagcagaaagctgctggtgaaggccatcaccgtggagagcagcatgatcctgaacgtgctggagtacggcagccagcaggtggccgacctgaccctgaacctggacgactacatcgacgccgagcacctgggcgacttccacagaacctacaagaacagcgaggagctgagaagcagaatcgtgagcggcatcatcacccccatccacgagcagtgggagaaggccaacgtgagcagcccccacagagagttcccccccgccaccgccagagaggtggaccccctgagaatccccccccaccacccccacaccagcagacagcccccctag

SEQ ID NO: 295332 - DNA, 324 bp, Artificial Sequence
  derived and/or modified sequence
tgaatccacgagcagtgggagaaggccaacgtgagcagcccccacagagagttcccccccgccaccgccagagaggtggaccccctgagaatccccccccaccacccccacaccagcagacagcccccctggcccagaagaggcggcatgatcgtggaccccctgagaagcggcttccccagagccctgatcgaccccagcagcggcctgcccaacagactgccccccggcgccgtgccccccggcgccagattcgaccccttcggccccatcggcaccagcccccccggccccaaccccgaccacctgcccccccccggctag

SEQ ID NO: 295333 - DNA, 606 bp, Artificial Sequence
  derived and/or modified sequence
atggccggcctggaggtgctgttcgccagcgccgcccccgccatcacctgcagacaggacgccctggtgtgcttcctgcactgggaggtggtgacccacggctacttcggcctgggcgtgggcgaccagcccggccccaacgacaagaagagcgagctgctgcccgccggctggaacaacaacaaggacctgtacgtgctgagatacgagtacaaggacggcagcagaaagctgctggtgaaggccatcaccgtggagagcagcatgatcctgaacgtgctggagtacggcagccagcaggtggccgacctgaccctgaacctggacgactacatcgacgccgagcacctgggcgacttccacagatgcgaccccctgggccccttcgtggtgggcggcgaggacctggaccccttcggccccagaagaggcggcatgatcgtggaccccctgagaagcggcttccccagagccctgatcgaccccagcagcggcctgcccaacagactgccccccggcgccgtgccccccggcgccagattcgaccccttcggccccatcggcaccagcccccccggccccagacccgacagaagaggccagtag

SEQ ID NO: 295334 - DNA, 792 bp, Artificial Sequence
  derived and/or modified sequence
atggcaggactggaggtgctgtttgcctctgccgcccccgcgatcacatgtagacaggacgccctggtttgttttcttcactgggaagtggtgacccatgggtactttggactcggggtgggtgaccaacctgggcccaacgacaaaaagtcagaactgttgcccgctgggtggaataataataaggatctgtatgtgctgaggtatgagtataaggatggctctcgtaagctcctcgtgaaggcaattactgtcgagtctagcatgatcttgaacgtcctggaatacggcagtcaacaggtggctgacctaaccctcaacctagatgactacatcgatgccgagcatctgggggacttccatcgcacctataaaaattctgaggagctgcgatcacggatagtcagtggcattataacaccaatccacgaacagtgggagaaagctaatgtttcttcgccacacagagaatttccccccgcaacagcacgggaagttgatcctctgcggattccccctcaccacccgcacacatcccgtcagcctccgtggtgcgatcctttggggcctttcgtcgtgggaggggaggaccttgaccctttcggcccaagacgcgggggaatgattgtcgatccactccgttccggctttccccgtgctctcattgatccctcgtctgggctgcctaatcgactacctcctggagcagtgccacctggggcccgatttgaccccttcggacccattggaacttcgccacccgggccacggcccgaccgtcgcggtcaatag

SEQ ID NO: 295335 - DNA, 528 bp, Artificial Sequence
  derived and/or modified sequence
atgattcttaacgtgttagaatacggcagtcaacaggtcgccgacttgaccctcaacttggacgattatatcgatgcagaacacctgggagattttcacaggacatataagaatagcgaagaactccggagccggatcgtcagtggcatcattaccccaatccacgaacaatgggagaaggcgaatgtcagctcaccccaccgcgagtttcccccagccactgcgcgggaagtggaccctttgcggatccccccccatcacccccacacatccaggcaaccaccatggtgcgatcctctcggaccttttgtcgtgggaggtgaggatttagacccgttcggtccgcgccgcggtggcatgatcgtggacccgcttcgtagtggatttcccagagctctgatcgacccttcctccggcttgcccaaccgactgccacctggcgccgttcccccaggcgctcgcttcgacccattcgggcctataggcacgagccccccgggcccacgccccgaccgaaggggacagtag

SEQ ID NO: 295336 - DNA, 552 bp, Artificial Sequence
  derived and/or modified sequence
atggcagggctggaagtcctcttcgcttcagcagctcctgctatcacctgccgccaagacgctctggtgtgttttctccactgggaggtggtgacacacgggtacttcggcctcggagtcggggaccagcccgggcccaacgataaaaagtccgaacttctgcctgccggatggaacaataataaagacttgtatgtgctaaggtatgaatataaggatggctcgcgaaagcttctcgttaaggccatcaccgtcgagtccagcatgatcctcaatgtgctcgaatacggcagtcagcaagtagccgatcttaccctgaatttggacgattacattgacgctgagcaccttggagacttccacagaacctataagaactccgaagaactccgctccagaatcgtcagcggaatcattacccctatccatgaacaatgggagaaagccaacgtcagctctccccaccgggagttcccacctgcaaccgcgagagaagttgaccccctccggatacctccccaccatccgcacacctctagacagccgccatag

SEQ ID NO: 295337 - DNA, 324 bp, Artificial Sequence
  derived and/or modified sequence
tgaattcatgagcaatgggaaaaggccaatgtctcttctcctcatagggaattcccacccgccacagcccgcgaagtggatcccctccgcataccccctcatcatccccatacaagcaggcagcctccttggccgcgcagagggggaatgatagtggatcctctgcgttctggctttccccgcgccctcattgacccttcctccggcctcccaaatcgtctcccacctggcgcagtcccccccggagctaggtttgacccgtttggacccatcgggacatccccaccagggccgaatccagatcacctgccacctccaggctag

SEQ ID NO: 295338 - DNA, 606 bp, Artificial Sequence
  derived and/or modified sequence
atggccggcctggaagtcctgttcgccagtgcagctcctgctattacctgcaggcaggatgccttagtgtgttttctgcattgggaagtagtcacacacggctacttcggtctgggcgtgggcgaccagcccggccctaacgataaaaagtccgagttgctccccgccggctggaacaataacaaggacctatatgtcctgaggtacgaatataaagacgggagtcgtaagcttctcgtgaaagcgattacagtggagtctagcatgattttaaacgtgctggagtatggtagccagcaggtcgccgacttaacactgaatctggatgactacatcgacgccgaacatctgggggattttcataggtgcgacccactgggtcctttcgtggtgggaggagaggaccttgacccctttggccccaggagggggggaatgattgtcgatccactgcggtcgggattcccacgggctctgatcgacccgagtagcgggctacctaaccgtctgcctccgggtgctgtgccaccgggtgctcgctttgatccatttgggcctattggcaccagcccccccgggccacgcccagacagaaggggccagtag

SEQ ID NO: 295339 - DNA, 792 bp, Artificial Sequence
  derived and/or modified sequence
atggccggcctggaggtgctgtttgccagcgctgccccagccatcacctgccggcaggatgccctggtgtgcttcctgcactgggaggtggtgacccacggctacttcggcctgggcgtgggggaccagcccggccccaatgacaagaagtctgagctgctgcctgctggctggaacaacaacaaggacctgtatgtgctgcgctatgagtacaaggatggcagcaggaagctgctggtgaaggccatcaccgtggagagctccatgatcctgaatgtgctggagtatggcagccagcaggtggccgacctgaccctgaacctggatgactacattgatgctgagcacctgggggacttccacaggacctacaagaacagcgaggagctgcggagccgcatcgtgtctggcatcatcacccccatccacgagcagtgggagaaggccaacgtgagcagcccccaccgggagttccccccagccacagcccgggaggtggaccccctgcgcatccccccccaccacccccacaccagccggcagcccccctggtgtgaccccctgggcccctttgtggtgggcggggaggacctggaccccttcggcccccggcggggcggcatgattgtggaccccctgcggagcggcttcccccgggccctgattgaccccagcagcggcctgcccaaccggctgcccccaggagctgtgcccccaggggccaggtttgaccccttcggccccatcggcaccagccccccaggccccaggccagaccggcggggccagtag

SEQ ID NO: 295340 - DNA, 528 bp, Artificial Sequence
  derived and/or modified sequence
atgatcctgaatgtgctggagtatggcagccagcaggtggccgacctgaccctgaacctggatgactacattgatgctgagcacctgggggacttccacaggacctacaagaacagcgaggagctgcggagccgcatcgtgtctggcatcatcacccccatccacgagcagtgggagaaggccaacgtgagcagcccccaccgggagttccccccagccacagcccgggaggtggaccccctgcgcatccccccccaccacccccacaccagccggcagcccccctggtgtgaccccctgggcccctttgtggtgggcggggaggacctggaccccttcggcccccggcggggcggcatgattgtggaccccctgcggagcggcttcccccgggccctgattgaccccagcagcggcctgcccaaccggctgcccccaggagctgtgcccccaggggccaggtttgaccccttcggccccatcggcaccagccccccaggccccaggccagaccggcggggccagtag

SEQ ID NO: 295341 - DNA, 552 bp, Artificial Sequence
  derived and/or modified sequence
atggccggcctggaggtgctgtttgccagcgctgccccagccatcacctgccggcaggatgccctggtgtgcttcctgcactgggaggtggtgacccacggctacttcggcctgggcgtgggggaccagcccggccccaatgacaagaagtctgagctgctgcctgctggctggaacaacaacaaggacctgtatgtgctgcgctatgagtacaaggatggcagcaggaagctgctggtgaaggccatcaccgtggagagctccatgatcctgaatgtgctggagtatggcagccagcaggtggccgacctgaccctgaacctggatgactacattgatgctgagcacctgggggacttccacaggacctacaagaacagcgaggagctgcggagccgcatcgtgtctggcatcatcacccccatccacgagcagtgggagaaggccaacgtgagcagcccccaccgggagttccccccagccacagcccgggaggtggaccccctgcgcatccccccccaccacccccacaccagccggcagcccccatag

SEQ ID NO: 295342 - DNA, 324 bp, Artificial Sequence
  derived and/or modified sequence
tgaattcatgagcagtgggagaaggccaacgtgagcagcccccaccgggagttccccccagccacagcccgggaggtggaccccctgcgcatccccccccaccacccccacaccagccggcagcccccctggccccggcggggcggcatgattgtggaccccctgcggagcggcttcccccgggccctgattgaccccagcagcggcctgcccaaccggctgcccccaggagctgtgcccccaggggccaggtttgaccccttcggccccatcggcaccagccccccaggccccaacccagaccacctgcccccacctggatag

SEQ ID NO: 295343 - DNA, 606 bp, Artificial Sequence
  derived and/or modified sequence
atggccggcctggaggtgctgtttgccagcgctgccccagccatcacctgccggcaggatgccctggtgtgcttcctgcactgggaggtggtgacccacggctacttcggcctgggcgtgggggaccagcccggccccaatgacaagaagtctgagctgctgcctgctggctggaacaacaacaaggacctgtatgtgctgcgctatgagtacaaggatggcagcaggaagctgctggtgaaggccatcaccgtggagagctccatgatcctgaatgtgctggagtatggcagccagcaggtggccgacctgaccctgaacctggatgactacattgatgctgagcacctgggggacttccaccgctgtgaccccctgggcccctttgtggtgggcggggaggacctggaccccttcggcccccggcggggcggcatgattgtggaccccctgcggagcggcttcccccgggccctgattgaccccagcagcggcctgcccaaccggctgcccccaggagctgtgcccccaggggccaggtttgaccccttcggccccatcggcaccagccccccaggccccaggccagaccggcggggccagtag

SEQ ID NO: 295344 - DNA, 921 bp, Artificial Sequence
  derived and/or modified sequence
agccaagttctttccatcatcctgggccctcacctctggcataggctcttggtagtgggggcccagacagggaggcacctgccacctgcttcccttctcagccacccacagccctcatagggcagaatgggactcttgctgatgtagccgggtcccaatgataagaagtcagaactgctgccagctgggtggaacaacaataaagacctgtatgtcctccggtatgagtataaggatgggtccagaaagctccttgtgaaagccatcaccgtggagagcagcatgatcctcaatgtgctggaatatggctcacagcaagtggcagacttgaccctgaacttggatgattatatcgatgcagaacacctgggtgacttccacaggacctacaagaacagtgaggagcttcggtctcgtattgtgtctggaatcatcacacctatccatgagcagtgggaaaaggctaatgtaagcagtccccaccgggagttcccccctgctaccgccagagaggtggacccactccggattcctccacaccacccacacaccagtcggcagcctccctggtgtgatcccctgggcccgtttgttgtcgggggagaagacttagacccttttgggcctcggagaggtggcatgattgtggatcccctgagatctggcttcccaagagcacttattgacccttcctcaggcctcccgaaccgacttcctccaggcgctgtgcccccaggagctcgctttgacccctttggacccattgggaccagcccacccggcccgaggcctgacagacgcgggcagtgatgagccctgttctggagtggaaagagcacgatagagcaccaggctaagaggcacgagatcaaggcggtagtcacttccgctctgcagctagcatttcaaccatatgtggat

SEQ ID NO: 295345 - DNA, 704 bp, Artificial Sequence
  derived and/or modified sequence
atcatcctgggccctcacctctggcataggctcttggtagtgggggcccagacagggaggcacctgccacctgcttcccttctcagccacccacagccctcatagggcagaatgggactcttgctgatgtagacgccgaagtcgcgggcgctcatggcgggcctggaggtactgttcgcatcggcagcgccggccatcacctgcaggcaggacgcgctcgtctgcttcttgcattgggaagtggtgacacacggttacttcggcttgggtgtcggtgaccagccgggtcccaatgataagaagtcagaactgctgccagctgggtggaacaacaataaagacctgtatgtcctccggtatgagtataaggatgggtccagaaagctccttgtgaaagccatcaccgtggagagcagcatgatcctcaatgtgctggaatatggctcacagcaagtggcagacttgaccctgaacttggatgattatatcgatgcagaacacctgggtgacttccacaggacctacaagaacagtgaggagcttcggtctcgtattgtgtctggaatcatcacacctatccatgagcagtgggaaaaggctaatgtaagcagtccccaccgggagttcccccctgctaccgccagagaggtggacccactccggattcctccacaccacccacacaccagtcggcagcctccctg

SEQ ID NO: 295346 - DNA, 792 bp, Artificial Sequence
  derived and/or modified sequence
atggccggcctggaggtgctgttcgccagcgccgcccccgccatcacctgtagacaagacgccttagtttgctttctccactgggaggtggtaacacacggctacttcgggttaggggtgggtgaccagcccggaccaaatgataagaagagcgagctgctgccagcaggttggaataacaataaggatctgtacgtgctcaggtatgagtacaaggacggcagcagaaaactgctggtgaaggccattactgttgaatcctctatgatccttaatgtgctggaatacggttcacagcaagtcgccgacctgaccttaaacttagacgattatatcgacgctgagcatctaggagattttcacaggacatataaaaattccgaagaactgaggtccagaatcgtgtctggtatcatcacccctatccacgagcagtgggagaaagcaaatgtatcctccccacaccgcgaatttcccccagcaaccgcccgcgaagtggatcctctgcgaattcctccccaccaccctcacaccagccggcagccaccctggtgcgatcccctgggtccattcgtagtcgggggcgaagatctggatccctttggacctcggagagggggaatgatcgtggaccccctgaggagcgggttccccagagcgcttatcgacccttcttcaggactgccaaatcgcctgccccccggtgcagtgccacccggcgcccgattcgatccattcggccctatcgggacttctccacctggaccgagacctgacagaagaggacagtag

SEQ ID NO: 295347 - DNA, 528 bp, Artificial Sequence
  derived and/or modified sequence
atgatcctgaacgtgctggagtacggcagccagcaggtggccgaccttacgctgaacttagacgactacatcgatgctgagcacctgggagacttccaccgcacctataagaacagcgaagagcttcgctcccggattgtgagcgggatcatcacaccaatccacgaacaatgggaaaaagccaatgtatcaagtccccaccgagaattcccccctgcaacggctcgcgaagtcgaccccctacgaatcccaccccaccacccccataccagtcggcagccaccctggtgtgatccactcggacccttcgttgtgggaggcgaagacctcgatcctttcggaccaagacggggaggcatgatcgtcgatccactccggtcaggctttccacgtgctctgattgacccaagttctggcctgcctaaccggttacccccaggcgcagtccccccaggtgcccgcttcgacccatttggcccaatagggacatccccccctgggccccgccccgacaggcgcggtcagtag

SEQ ID NO: 295348 - DNA, 552 bp, Artificial Sequence
  derived and/or modified sequence
atggccggcctggaggtgctgttcgccagcgccgcccccgccatcacttgcagacaggatgcgttggtgtgtttcttgcactgggaggtcgtcactcatggatacttcggcctgggtgtgggtgaccaacccggacccaatgataaaaagagtgagctgctgcctgcaggctggaataacaataaagacctttatgttctgcgatacgagtacaaggatggatccagaaaattgctggtcaaagccattaccgttgaaagtagcatgattttaaatgtgctcgagtacgggagccaacaggtcgctgaccttacactcaacttagatgattacatagatgctgagcatctcggcgattttcacaggacctataagaattctgaagaactgcgatcacggattgtgtccggcatcattactccaatccacgagcagtgggaaaaggccaacgtgagctctccccacagagaattcccacccgccactgcacgcgaagttgaccccctaaggatcccccctcaccacccacacacgtcgcgacagcccccttag

SEQ ID NO: 295349 - DNA, 324 bp, Artificial Sequence
  derived and/or modified sequence
tgaatccacgagcagtgggagaaggccaacgtgagcagcccccaccgggaattcccgccagctaccgccagggaagttgacccactccgtataccccctcaccatccacatacttctcgccaacccccctggcctagacgtggcggaatgattgttgatccactgcgcagcggattcccaagggcattaattgaccctagctcaggactgcccaatagactgcctccaggtgctgttcccccaggggcccggtttgacccctttggccctattggaacttcgcctccaggacccaacccagatcacctgccccctcccggctag

SEQ ID NO: 295350 - DNA, 606 bp, Artificial Sequence
  derived and/or modified sequence
atggccggcctggaggtgctgttcgccagcgccgcccccgccatcacatgtcggcaagatgctctggtgtgcttcttacattgggaagttgttactcacggatatttcggtctgggcgtgggagaccagccagggccgaatgacaaaaagtccgagctgttgccagctggttggaataataacaaagacctatatgttctgcggtatgaatacaaggatggctccaggaagcttttggtcaaggcaataaccgtggaatcttccatgatcctcaatgtcctggaatacggcagccagcaagtagccgatttgaccctgaacttagatgactacatagacgccgaacacttaggagacttccataggtgtgaccctctcggaccatttgtcgtggggggcgaggacttagatcctttcggaccccgccgcggtggcatgattgtagatccactgcggtcaggattcccacgcgcccttattgaccccagttctggtttacccaaccggctgccacctggcgccgtccctccaggcgccaggttcgacccgttcgggcccatcgggactagccctccaggtcctagaccagataggcgaggccagtag

SEQ ID NO: 295351 - DNA, 792 bp, Artificial Sequence
  derived and/or modified sequence
atggccggactggaagtacttttcgcgagcgccgctcctgccattacatgtagacaggacgcgcttgtgtgtttcctacactgggaagttgtcactcatggttactttggattgggagtgggagaccagcctggaccaaatgacaaaaaatctgaattactgcccgctgggtggaataacaacaaggatctgtatgtgctgcgatacgaatacaaagatgggtcacggaaattattggtgaaagccatcaccgttgaaagctccatgatcctgaatgttctcgagtacggaagccagcaagtagcggacctgacgctgaatttagacgattacatagacgcagaacatcttggcgactttcatcgtacgtacaagaactcagaggaacttcggagtcggattgttagcggaattatcacaccaatacatgagcagtgggagaaagcgaatgttagctccccacatagagagtttcctcccgcaactgctcgggaagtggatcctcttcgtattcctccccatcatccgcacacgagtcggcagcccccatggtgtgatccgctaggaccatttgttgtcggcggagaggatcttgatcctttcggccctcgacgtggtggcatgatcgtagatccacttcgtagcgggtttccacgggctctgatcgacccatcttccggcctcccaaacagattaccaccaggtgctgtgcctcctggtgccagattcgacccctttggacctattggcacaagccctccgggacccagaccagaccgacgcggtcaatag

SEQ ID NO: 295352 - DNA, 2042 bp, Artificial Sequence
  derived and/or modified sequence
ttccggcttccccgccccgccccgtccccgggcgtctccattttggtctcaggtgtggactcggcaagaaccagcgcaagagggaagcagagttatagctaccccggccgcggagccggctcactgcactacccccgcccccttctttcctccagacgccgaagtcgcgggcgctcatggcgggcctggaggtactgttcgcatcggcagcgccggccatcacctgcaggcaggacgcgctcgtctgcttcttgcattgggaagtggtgacacacggttacttcggcttgggtgtcggtgaccagccgggtcccaatgataagaagtcagaactgctgccagctgggtggaacaacaataaagacctgtatgtcctccggtatgagtataaggatgggtccagaaagctccttgtgaaagccatcaccgtggagagcagcatgatcctcaatgtgctggaatatggctcacagcaagtggcagacttgaccctgaacttggatgattatatcgatgcagaacacctgggtgacttccacaggacctacaagaacagtgaggagcttcggtctcgtattgtgtctggaatcatcacacctatccatgagcagtgggaaaaggctaatgtaagcagtccccaccgggagttcccccctgctaccgccagagaggtggacccactccggattcctccacaccacccacacaccagtcggcagcctccctggtgtgatcccctgggcccgtttgttgtcgggggagaagacttagacccttttgggcctcggagaggtggcatgattgtggatcccctgagatctggcttcccaagagcacttattgacccttcctcaggcctcccgaaccgacttcctccaggcgctgtgcccccaggagctcgctttgacccctttggacccattgggaccagcccacccggcccgaggcctgacagacgcgggcagtgatgagccctgttctggagtggaaagagcacgatagagcaccaggctaagaggcacgagatcaaggcggtagtcacttccgctctgcagctagcatttcaaccatatgtggatcctttcatttctcagctccctggattccttcccctaaattaggacctattatttacctgtaggtaagcaagctactgtagctcttctgaggtatctgccaggctgttttctgtagcctcagattgcctatctgcttagcctgagaacaggtagatgaaaactaaactgatgcctaggcccagggtcagtctcagatggaagctgggcctgggtggggaggctagcatgcgtggctccctgggtatttctgtcagtccccatggcaagcagtgatttagtaaaacaccccagagtcagggaagccaaccaccttgaaacctttagaacatctctgctttggagaaagacccagagatcaggcagaggtgcagattcaatcattactcataacctttgagagatggcaaatgggaggagtgttagtctttgttttggaattggaccattcttgcaaccaaaaggacttagagcagtttgctcataaagacatcctttattataaaaggaagtatttaaaggatgatagagaccatcagatagaagcagggaaggtagataacttttaggaccttgatgtgaggaaaagataaaatttaaacaataaatttgccacttagattttctagcagcaaagtccgaaaagatagttatatacaaaattctgttttctgaaaacaaaattgtgattcaccttcagaattggccattttttttgtgagtttccttgcatcaaggacactgagaaacacagtcattgtcttaggtgttctatgggaggaagtgaatagagcctttaggaacttcctggtcaagcttatggtgcttattttgatctgggccacttccctccttccagtcatgagtaatcatcaaggagcaagttggagtgtttcaggtgtatattttgtagaacccaaaagattggagccttaacaataaacatcagcactaagtgacctgttc

SEQ ID NO: 295353 - DNA, 528 bp, Artificial Sequence
  derived and/or modified sequence
atgattctgaatgtcctagagtacggaagtcagcaagtggcagacttgacgctgaatctggatgactacatagacgccgagcacttgggcgacttccatcggacctataaaaacagcgaagagctcaggtccaggatcgtctcagggattattacgcctattcacgaacagtgggaaaaagctaatgtgtcatccccccaccgagagtttccgccagccacggctcgggaagttgatcctctgcggataccccctcatcatccacacacaagtagacaaccaccctggtgcgatccactaggtcctttcgtggttggaggcgaggatctcgatccttttggacccagacgcggagggatgattgtcgatccactcagatccggctttcccagagcgctcattgacccatctagcgggttaccaaatcgactacctccaggggctgtgcctccaggagctaggttcgatccatttggcccaatcggcacatcaccgccaggtccccgacccgaccggagggggcagtag

SEQ ID NO: 295354 - DNA, 552 bp, Artificial Sequence
  derived and/or modified sequence
atggctggactcgaagtccttttcgcaagtgccgcacccgcaataacatgtcgccaagatgcactcgtttgcttcctacactgggaagttgttacgcacggctacttcggactgggcgttggcgaccagccaggccctaacgataagaagtcagagctgttaccagccggatggaataataataaggatttgtacgtcttgaggtacgagtataaggatggttccagaaaactgctggttaaggctataactgtagagagttctatgatcctcaatgtgctggagtatggatctcaacaggtggctgatctgacgctgaatttagatgattatatcgacgcggaacacctgggggattttcatcgcacatataaaaactctgaggagctgcgcagcagaattgtaagcgggataataacacctattcacgaacagtgggagaaggccaatgttagcagcccacatagggagtttccaccggctacggcccgtgaggtggatcctctccgcattcctcctcatcacccccacacctcccgccagcccccatag

SEQ ID NO: 295355 - DNA, 324 bp, Artificial Sequence
  derived and/or modified sequence
taaatccacgagcagtgggaaaaagccaacgtgagtagcccccaccgcgaattccccccagccacagcaagagaggtggacccactgaggatccccccacaccaccctcacacttctagacagcctccatggcccaggaggggtggcatgattgtagatccattacggagtggatttccgagagcactgatcgatcctagcagtggactgccaaatcgcctgccacctggcgcagtgcctccaggcgctcgctttgaccctttcggccctattgggaccagcccgccaggcccaaacccagaccacctgcctccgcctggttag

SEQ ID NO: 295356 - DNA, 606 bp, Artificial Sequence
  derived and/or modified sequence
atggccggactagaggtgttattcgcatcagccgcacctgccattacctgccgccaagatgcccttgtgtgctttctccactgggaggttgttacacacggctactttgggctgggcgtgggtgaccagccgggtcctaatgacaagaagtcagaacttttgcccgctggatggaacaacaacaaggatctgtacgtgctgcgttatgagtacaaagacgggtctcgcaagcttttggtgaaggcaatcactgtggagtcatctatgattctcaatgtcctcgagtacggcagccagcaggtggccgacctcacattgaacctggacgactacattgacgccgagcatttgggggattttcaccggtgcgacccacttgggcctttcgttgtgggtggagaggatttggaccccttcggacctcgccgaggcggtatgatcgtagatccactgcgctccggtttcccaagagctctgatcgatccctcctctggtttaccaaacagactccccccaggcgctgttcccccaggagcgcgtttcgatcccttcggcccaatcggcacctcaccaccaggacctcgtcctgatcgtcgcggacaatag

SEQ ID NO: 295357 - DNA, 319 bp, Artificial Sequence
  derived and/or modified sequence
tatccatgagcagtgggaaaaggctaatgtaagcagtccccaccgggagttcccccctgctaccgccagagaggtggacccactccggattcctccacaccacccacacaccagtcggcagcctccctggcctcggagaggtggcatgattgtggatcccctgagatctggcttcccaagagcacttattgacccttcctcaggcctcccgaaccgacttcctccaggcgctgtgcccccaggagctcgctttgacccctttggacccattgggaccagcccacccggacctaacccagaccatctccccccgccgggc

SEQ ID NO: 295358 - DNA, 1179 bp, Artificial Sequence
  derived and/or modified sequence
attttggtctcaggtgtggactcggcaagaaccagcgcaagagggaagcagagttatagctaccccggccgcggagccggctcactgcactacccccgcccccttctttcctccagacgccgaagtcgcgggcgctcatggcgggcctggaggtactgttcgcatcggcagcgccggccatcacctgcaggcaggacgcgctcgtctgcttcttgcattgggaagtggtgacacacggttacttcggcttgggtgtcggtgaccagccgggtcccaatgataagaagtcagaactgctgccagctgggtggaacaacaataaagacctgtatgtcctccggtatgagtataaggatgggtccagaaagctccttgtgaaagccatcaccgtggagagcagcatgatcctcaatgtgctggaatatggctcacagcaagtggcagacttgaccctgaacttggatgattatatcgatgcagaacacctgggtgacttccacaggtgtgatcccctgggcccgtttgttgtcgggggagaagacttagacccttttgggcctcggagaggtggcatgattgtggatcccctgagatctggcttcccaagagcacttattgacccttcctcaggcctcccgaaccgacttcctccaggcgctgtgcccccaggagctcgctttgacccctttggacccattgggaccagcccacccggcccgaggcctgacagacgcgggcagtgatgagccctgttctggagtggaaagagcacgatagagcaccaggctaagaggcacgagatcaaggcggtagtcacttccgctctgcagctagcatttcaaccatatgtggatcctttcatttctcagctccctggattccttcccctaaattaggacctattatttacctgtaggtaagcaagctactgtagctcttctgaggtatctgccaggctgttttctgtagcctcagattgcctatctgcttagcctgagaacaggtagatgaaaactaaactgatgcctaggcccagggtcagtctcagatggaagctgggcctgggtggggaggctagcatgcgtggctccctgggtatttctgtcagtccccatggcaagcagtgatttagtaaaacaccccagagtcagggaagccaaccaccttgaaacctttaga

SEQ ID NO: 295359 - DNA, 792 bp, Artificial Sequence
  derived and/or modified sequence
atggccggcctggaggtgctgttcgccagcgccgcccccgccatcacctgcagacaggacgccctggtgtgcttcctgcactgggaggtggtgacccacggctacttcggcctgggcgtgggcgaccagcccggccccaacgacaagaagagcgagctgctgcccgccggctggaacaacaacaaggacctgtacgtgctgagatacgagtacaaggacggcagcagaaagctgctggtgaaggccatcaccgtggagagcagcatgatcctgaacgtgctggagtacggcagccagcaggtggccgacctgaccctgaacctggacgactacatcgacgccgagcacctgggcgacttccacagaacctacaagaacagcgaggagctgagaagcagaatcgtgagcggcatcatcacccccatccacgagcagtgggagaaggccaacgtgagcagcccccacagagagttcccccccgccaccgccagagaggtggaccccctgagaatccccccccaccacccccacaccagcagacagcccccctggtgcgaccccctgggccccttcgtggtgggcggcgaggacctggaccccttcggccccagaagaggcggcatgatcgtggaccccctgagaagcggcttccccagagccctgatcgaccccagcagcggcctgcccaacagactgccccccggcgccgtgccccccggcgccagattcgaccccttcggccccatcggcaccagcccccccggccccagacccgacagaagaggccagtag

SEQ ID NO: 295360 - protein, 538 aa, Artificial Sequence
  derived and/or modified sequence
METRSPGLNNMKPQSLQLVLEEQVLALQQQMAENQAASWRKLKNSQEAQQRQATLVRKLQAKVLQYRSWCQELEKRLEATGGPIPQRWENVEEPNLDELLVRLEEEQQRCESLAEVNTQLRLHMEKADVVNKALREDVEKLTVDWSRARDELMRKESQWQMEQEFFKGYLKGEHGRLLSLWREVVTFRRHFLEMKSATDRDLMELKAEHVRLSGSLLTCCLRLTVGAQSREPNGSGRMDGREPAQLLLLLAKTQELEKEAHERSQELIQLKSQGDLEKAELQDRVTELSALLTQSQKQNEDYEKMIKALRETVEILETNHTELMEHEASLSRNAQEEKLSLQQVIKDITQVMVEEGDNIAQGSGHENSLELDSSIFSQFDYQDADKALTLVRSVLTRRRQAVQDLRQQLAGCQEAVNLLQQQHDQWEEEGKALRQRLQKLTGERDTLAGQTVDLQGEVDSLSKERELLQKAREELRQQLEVLEQEAWRLRRVNVELQLQGDSAQGQKEEQQEELHLAVRERERLQSSQLQSCRVLKTP

SEQ ID NO: 295361 - protein, 2386 aa, Artificial Sequence
  derived and/or modified sequence
METRSPGLNNMKPQSLQLVLEEQVLALQQQMAENQAASWRKLKNSQEAQQRQATLVRKLQAKVLQYRSWCQELEKRLEATGGPIPQRWENVEEPNLDELLVRLEEEQQRCESLAEVNTQLRLHMEKADVVNKALREDVEKLTVDWSRARDELMRKESQWQMEQEFFKGYLKGEHGRLLSLWREVVTFRRHFLEMKSATDRDLMELKAEHVRLSGSLLTCCLRLTVGAQSREPNGSGRMDGREPAQLLLLLAKTQELEKEAHERSQELIQLKSQGDLEKAELQDRVTELSALLTQSQKQNEDYEKMIKALRETVEILETNHTELMEHEASLSRNAQEEKLSLQQVIKDITQVMVEEGDNIAQGSGHENSLELDSSIFSQFDYQDADKALTLVRSVLTRRRQAVQDLRQQLAGCQEAVNLLQQQHDQWEEEGKALRQRLQKLTGERDTLAGQTVDLQGEVDSLSKERELLQKAREELRQQLEVLEQEAWRLRRVNVELQLQGDSAQGQKEEQQEELHLAVRERERLQEMLMGLEAKQSESLSELITLREALESSHLEGELLRQEQTEVTAALARAEQSIAELSSSENTLKTEVADLRAAAVKLSALNEALALDKVGLNQQLLQLEEENQSVCSRMEAAEQARNALQVDLAEAEKRREALWEKNTHLEAQLQKAEEAGAELQADLRDIQEEKEEIQKKLSESRHQQEAATTQLEQLHQEAKRQEEVLARAVQEKEALVREKAALEVRLQAVERDRQDLAEQLQGLSSAKELLESSLFEAQQQNSVIEVTKGQLEVQIQTVTQAKEVIQGEVRCLKLELDTERSQAEQERDAAARQLAQAEQEGKTALEQQKAAHEKEVNQLREKWMQLETEKERVSLLETLLQTQKELADASQQLERLRQDMKVQKLKEQETTGILQTQLQEAQRELKEAARQHRDDLAALQEESSSLLQDKMDLQKQVEDLKSQLVAQDDSQRLVEQEVQEKLRETQEYNRIQKELEREKASLTLSLMEKEQRLLVLQEADSIRQQELSALRQDMQEAQGEQKELSAQMELLRQEVKEKEADFLAQEAQLLEELEASHITEQQLRASLWAQEAKAAQLQLRLRSTESQLEALAAEQQPGNQAQAQAQLASLYSALQQALGSVCESRPELSGGGDSAPSVWGLEPDQNGARSLFKRGPLLTALSAEAVASALHKLHQDLWKTQQTRDVLRDQVQKLEERLTDTEAEKSQVHTELQDLQRQLSQNQEEKSKWEGKQNSLESELMELHETMASLQSRLRRAELQRMEAQGERELLQAAKENLTAQVEHLQAAVVEARAQASAAGILEEDLRTARSALKLKNEEVESERERAQALQEQGELKVAQGKALQENLALLTQTLAEREEEVETLRGQIQELEKQREMQKAALELLSLDLKKRNQEVDLQQEQIQELEKCRSVLEHLPMAVQEREQKLTVQREQIRELEKDRETQRNVLEHQLLELEKKDQMIESQRGQVQDLKKQLVTLECLALELEENHHKMECQQKLIKELEGQRETQRVALTHLTLDLEERSQELQAQSSQIHDLESHSTVLARELQERDQEVKSQREQIEELQRQKEHLTQDLERRDQELMLQKERIQVLEDQRTRQTKILEEDLEQIKLSLRERGRELTTQRQLMQERAEEGKGPSKAQRGSLEHMKLILRDKEKEVECQQEHIHELQELKDQLEQQLQGLHRKVGETSLLLSQREQEIVVLQQQLQEAREQGELKEQSLQSQLDEAQRALAQRDQELEALQQEQQQAQGQEERVKEKADALQGALEQAHMTLKERHGELQDHKEQARRLEEELAVEGRRVQALEEVLGDLRAESREQEKALLALQQQCAEQAQEHEVETRALQDSWLQAQAVLKERDQELEALRAESQSSRHQEEAARARAEALQEALGKAHAALQGKEQHLLEQAELSRSLEASTATLQASLDACQAHSRQLEEALRIQEGEIQDQDLRYQEDVQQLQQALAQRDEELRHQQEREQLLEKSLAQRVQENMIQEKQNLGQEREEEEIRGLHQSVRELQLTLAQKEQEILELRETQQRNNLEALPHSHKTSPMEEQSLKLDSLEPRLQRELERLQAALRQTEAREIEWREKAQDLALSLAQTKASVSSLQEVAMFLQASVLERDSEQQRLQDELELTRRALEKERLHSPGATSTAELGSRGEQGVQLGEVSGVEAEPSPDGMEKQSWRQRLEHLQQAVARLEIDRSRLQRHNVQLRSTLEQVERERRKLKREAMRAAQAGSLEISKATASSPTQQDGRGQKNSDAKCVAELQKEVVLLQAQLTLERKQKQDYITRSAQTSRELAGLHHSLSHSLLAVAQAPEATVLEAETRRLDESLTQSLTSPGPVLLHPSPSTTQAASR

SEQ ID NO: 295362 - protein, 114 aa, Artificial Sequence
  derived and/or modified sequence
METRSPGLNNMKPQSLQLVLEEQVLALQQQMAENQAASWRKLKNSQEAQQRQATLVRKLQAKVLQYRSWCQELEKRLEATGGPIPQRWENVEEPNLDELLVRLEEEQQRCESLA

SEQ ID NO: 295363 - protein, 684 aa, Artificial Sequence
  derived and/or modified sequence
METRSPGLNNMKPQSLQLVLEEQVLALQQQMAENQAASWRKLKNSQEAQQRQATLVRKLQAKVLQYRSWCQELEKRLEATGGPIPQRWENVEEPNLDELLVRLEEEQQRCESLAEVNTQLRLHMEKADVVNKALREDVEKLTVDWSRARDELMRKESQWQMEQEFFKGYLKGEHGRLLSLWREVVTFRRHFLEMKSATDRDLMELKAEHVRLSGSLLTCCLRLTVGAQSREPNGSGRMDGREPAQLLLLLAKTQELEKEAHERSQELIQLKSQGDLEKAELQDRVTELSALLTQSQKQNEDYEKMIKALRETVEILTNHTELMEHEASLSRNAQEEKLSLQQVIKDITQVMVEEGDNIAQGSGHENSLELDSSIFSQFDYQDADKALTLVRSVLTRRRQAVQDLRQQLAGCQEAVNLLQQQHDQWEEEGKALRQRLQKLTGERDTLAGQTVDLQGEVDSLSKERELLQKAREELRQQLEVLEQEAWRLRRVNVELQLQGDSAQGQKEEQQEELHLAVRERERLQEMLMGLEAKQSESLSELITLREALESSHLEGELLRQEQTEVTAALARAEQSIAELSSSENTLKTEVADLRAAAVKLSALNEALALDKVGLNQQLLQLEEENQSVCSRMEAAEQARNALQVDLAEAEKRREALWEKNTHLEAQLQKAEEAGAELQADLRDI

SEQ ID NO: 295364 - DNA, 7161 bp, Artificial Sequence
  derived and/or modified sequence
atggaaacccggtcccccgggttaaataatatgaaaccacagtcattgcagctagttctggaagagcaggtcttagccctccaacagcagatggctgagaaccaggcagcgagctggagaaagttgaaaaacagtcaagaagcccagcaacgccaggccacattagtgcggaaactccaggctaaggtgctacaatatcgctcctggtgccaggagctagagaagcgactggaagctacaggaggaccaattccccaacggtgggagaacgttgaagaacctaacttagatgagctactggtccgcctggaggaggaacagcagaggtgcgagtctctggctgaggttaacactcagctgcgcttacacatggagaaggctgatgtcgtcaacaaggcactgagggaggacgtggaaaagctgactgtggattggtcccgtgcgcgggatgaactgatgaggaaagaatcacaatggcaaatggagcaggagtttttcaaggggtacctgaaaggggagcatggacggctgctgtccctgtggcgcgaagtcgtcacctttagaaggcacttcttggaaatgaaatctgccacagatagggatctcatggaactaaaagccgaacacgtgcgattgtcaggctctctcttgacctgctgcctgcgcctgactgtgggcgcgcaatctcgggagcctaacggttcaggtcggatggacggccgggagccagctcaattgctgctgctgctggcgaaaacccaggaactcgaaaaagaagctcatgagcggagccaagaactgattcagttgaagagtcagggcgatttggagaaggctgagctgcaggaccgggtgacagagctttctgctctccttacgcagtctcagaagcagaacgaagattacgagaaaatgataaaggccctccgcgagacagtcgagatcctcgagacaaatcacacagagctgatggaacatgaggcttcactttcaagaaacgcacaggaggagaaactgtctctccaacaggtgatcaaggacataacacaggtgatggtggaagagggagataacatcgcccagggttcagggcacgagaattcattagaattggactcttctatcttcagccagtttgactatcaagatgccgacaaggcactgacgctggtgcgtagtgtgctaacgcgccgacgccaggcggtccaagaccttcggcaacagttagctggttgtcaggaggcagtgaatctgctacagcagcagcacgatcagtgggaagaggagggtaaagccttgagacagcggcttcagaagctcacaggggaacgggataccctggccggtcagacggtagacctgcagggcgaggtggactcattgagtaaggagagggagctgctgcagaaggccagggaggagctccggcagcaattagaggtactggagcaggaagcctggcggttgcgtagggtcaatgtggaattgcaattgcagggggatagcgctcaaggccaaaaggaagagcagcaagaggagctgcacttggcagtgagggaacgcgagcgcctgcaggaaatgcttatggggctggaggccaagcagtccgagtctctgagtgagctgatcacactgcgggaagccctggaatcaagtcacttggagggggaactgctgaggcaggagcagactgaggtcaccgcagccctggctagggcagagcagtccatcgcagagcttagcagttccgagaacactctgaagactgaagttgcagatctccgtgcagcagccgtgaagttgtcggcactcaatgaggcactggcgctagataaggtcggcctgaaccagcagctcttacagctggaggaggagaaccaatccgtctgttcccgaatggaagctgcagagcaggccagaaatgcactgcaggtcgaccttgcagaagccgaaaaaagacgtgaggcgctttgggaaaagaatacccatctggaggcccagctgcaaaaggctgaagaagcgggggcagagctacaggcagacctacgggacatacaggaggagaaggaagagattcaaaaaaagctgagtgagagtcgacaccaacaagaagccgccaccacccagcttgaacagcttcaccaagaagccaagcgacaggaagaggtcttggcaagagcagtgcaggaaaaggaggccttggtgcgcgagaaggcagccctagaggtgcgcttacaggccgtcgaaagagatagacaggacttagctgaacagctacagggtctgtcctccgctaaggaactcctggaatcctctttgttcgaggcccagcagcagaactcagttattgaagtcacaaagggacaactggaggtgcagatccagacagtgactcaggccaaggaagtcattcaaggagaggtccggtgcctgaaactcgaactcgataccgagaggagccaggctgagcaggagagagacgcagctgcccggcaactggctcaagcagagcaggaggggaaaaccgctctagaacagcagaaggccgcacatgaaaaggaagttaatcaactccgtgaaaaatggatgcagcttgagacagagaaagagagggtgagcctgttagagaccctgctccagacgcagaaggagctggccgacgcctctcagcaattggagcgcttgaggcaggatatgaaggtgcagaaactgaaggaacaggaaaccaccgggatcctccagacccagctgcaggaggcacagagagaacttaaggaagctgcacggcaacatcgggacgatctggccgcactgcaggaggaatccagttccctgcttcaggataaaatggacttgcaaaagcaggtggaagatctgaagagccagctggttgctcaggatgattctcagcgcctagtagagcaggaggtacaagaaaagcttcgcgagacccaagagtataaccgtatccagaaagagctggaacgcgagaaggcatcccttacactatccctgatggagaaggagcagcggctgcttgtgcttcaggaggccgactcaatccggcaacaagagttaagcgccttgcgtcaggacatgcaggaagcacagggagagcagaaagaacttagcgcccagatggaactccttagacaggaggttaaagagaaggaagctgactttcttgcacaggaagcccagctcttggaagagctggaagcttcccacataacagagcagcagctccgagcctccctttgggctcaggaagctaaggctgcccagctgcagctaaggctgaggtcgacagagtcccaactggaggccctggccgctgagcagcagccgggcaaccaagcacaggcccaagcccagttggcgagcctgtatagcgccctgcaacaagccctcggttcggtatgtgagagtcggcctgagctgtctggcggaggggacagcgcccccagcgtttggggccttgaaccagaccaaaacggggctcggagcctctttaaacgtggaccccttttgactgcgctctccgcggaggccgtggcttctgcacttcataaacttcaccaagatctctggaaaacacagcagactcgagacgtgctccgcgatcaggtgcagaagctagaggagagactgacagacaccgaagccgagaagagccaggtccacaccgagttgcaggacctgcaacgacaactctcacaaaatcaggaagagaagagcaaatgggaaggcaaacagaatagtctggagtccgagcttatggaactgcacgaaacaatggctagcttgcaaagccgtctccgtcgagccgagctccagcggatggaggcgcagggcgaacgggagctactgcaggccgctaaggagaatttaacagcccaggtcgagcacctgcaggctgctgtggtcgaggccagagctcaggcctctgccgccgggatccttgaagaagatttacggaccgcacgatccgccctgaagctcaagaatgaggaggtggagtccgagcgcgaacgggcgcaggcgctgcaagagcagggtgaattgaaagttgcccagggtaaggccctgcaagagaatctggcactcctgacgcagaccttggcggaaagagaagaggaggtcgaaacgctgagggggcagattcaggaacttgagaagcagcgagagatgcagaaggcagccctggaattgctttcactagatctgaaaaaaagaaatcaggaggtggacctacagcaggagcagattcaggaactagagaaatgtcgaagcgtgttggagcacctcccaatggccgtccaagaaagagagcagaagctgactgtgcagagggaacagatccgagagctggaaaaggacagagagacccaacggaacgttctggagcaccagcttcttgagctcgagaaaaaggatcagatgatcgagtcccagagaggccaggttcaagacctgaagaagcagctggtcacccttgagtgcctagcactagagttggaagagaaccaccacaagatggaatgccagcaaaaattgattaaagagctggagggtcagcgcgagacacagcgggtggcgcttacacatctaacactggatttggaagagcgttcccaggaattgcaggctcagtcaagtcagattcatgatctggaatcccacagtactgtcctcgctcgagagctgcaagagcgggaccaggaggtcaagagtcagcgagaacagatcgaggagctccaacggcagaaagagcatctgacacaggatctcgagagacgagatcaggaactaatgctgcagaaggaacggatccaagtactagaggaccaaagaacaagacagaccaaaatactcgaggaagaccttgaacagatcaagctgtccctacgggaaagaggtcgggaactcactacacagcgacaactcatgcaggaacgcgccgaggagggaaaaggtccatctaaggctcagcgaggctccttggaacatatgaagttgattctacgcgacaaagagaaggaagttgaatgccaacaagagcatatacacgagcttcaggagctgaaagaccagctggagcagcagctccaaggcttgcaccgaaaggtgggcgaaacttccctgctcctgtcccagcgggagcaggagatcgttgtgcttcagcagcagcttcaagaggctagagaacaaggcgaactgaaggaacagagtttacagtcccagctcgacgaggcccagagagccctggctcagagggatcaggagctggaggccctgcagcaggagcagcagcaggcccagggacaggaagaaagagtgaaggagaaagccgacgccttgcaaggcgctttggagcaggcgcatatgaccctgaaagaacgacacggggaattgcaggaccataaagagcaagccaggcggttagaagaagaactagcagttgaggggaggagagtgcaagctctagaggaagtactgggagatttgcgggccgaaagcagagaacaggagaaagcgcttcttgctctgcaacagcagtgcgcagagcaagcccaggaacatgaggtggaaaccagggctctccaggacagttggctccaggctcaggcagtgcttaaagagagagaccaggaactggaagccttgcgcgcagagtcacagtctagccgccatcaagaggaggcagctcgggcaagggcagaagcgttgcaggaggccctcggtaaggcccacgcagctcttcagggaaaagagcagcatcttctcgagcaagccgagctttctaggagccttgaagcctcaactgctaccttgcaggcctctctggatgcctgtcaagcccactcccgccagctagaggaggctttgcggatccaggagggggaaatccaggaccaggacttgcgctaccaggaggatgtgcagcaactgcagcaggccttggcccagagagatgaagaactccggcatcagcaggagcgggaacagctcctggaaaaatccctcgctcagcgggttcaggagaacatgatccaggagaagcaaaatctcggccaggagagagaagaggaggaaattcgaggtctgcatcagagtgtgcgggaacttcaactcacactcgctcaaaaagagcaggagattcttgagctgcgagaaacccagcaaagaaacaatctggaggctctgcctcacagccataaaacaagtcctatggaagagcagagcttgaagctggattccctggagcccagactgcagagggagctagaacgactgcaggctgctctgagacagaccgaggctagagagattgaatggcgggagaaagcccaagatttagccttgtcccttgctcagaccaaggcatccgtctcatccctgcaagaggtcgcaatgttcttgcaagcttcagtgctggaaagagacagtgagcagcagcgcctgcaggacgagctggagctgacgcgcagggcccttgagaaagagcgcctccactctcccggtgcgaccagcacagctgaactgggctcgcgtggagagcagggagtgcagctgggtgaggtatcgggagtagaggccgagccgagtcctgatgggatggaaaaacagtcctggcggcagcgcctcgaacacctacagcaagccgtggcgcggcttgagatcgatcgctctcgactccagagacacaatgtgcaacttaggtcgacactagagcaggttgaacgcgaaaggaggaagctcaagagggaagcaatgagggcggcccaggccggatcactggagataagcaaggccactgctagctcccctacccagcaggacgggcgcggtcagaagaattctgatgccaagtgcgtggcagagctacagaaagaggttgtgttactccaggctcaactaaccctggagaggaagcagaagcaggattacatcactaggtcggcccaaacgagccgggagctcgccggtctgcaccactccttatctcacagcttgctggccgtggcccaggccccagaagccaccgttctagaagcagagactagacgcttagatgagtcgctgacacaaagcttgacctcgcccggtcctgtgctgctacatcccagtcccagtacaacccaagccgccagtcgctag

SEQ ID NO: 295365 - DNA, 7161 bp, Artificial Sequence
  derived and/or modified sequence
atggagaccaggagccctggcctgaacaacatgaagccccagagcctgcagctggtgctggaggagcaggtgctggccctgcagcagcagatggccgagaaccaggccgcctcctggaggaagctgaagaacagccaggaggcccagcagaggcaggccaccctggtgaggaagctgcaggccaaggtgctgcagtaccgctcctggtgccaggagctggagaagaggctggaggccaccggcggccccatcccccagcgctgggagaatgtggaggagcccaacctggatgagctgctggtgcggctggaggaggagcagcagagatgtgagagcctggccgaggtgaacacccagctgcggctgcacatggagaaggcagatgtggtgaacaaggccctgcgggaggatgtggagaagctgactgtggactggagccgggccagagatgagctgatgaggaaggagagccagtggcagatggagcaggagttcttcaagggctacctgaagggggagcacggccgcctgctgagcctgtggagggaggtggtgaccttccgccgccacttcctggagatgaagagcgccacagaccgggacctgatggagctgaaggccgagcacgtgcggctgagcggcagcctgctgacctgctgcctgcggctgactgtgggcgcccagagccgggagcccaatggaagtggccgcatggatggccgggagcccgcccagctgctgctgctgctggccaagacccaggagctggagaaggaggcccacgagaggagccaggagctgatccagctgaagagccagggcgacctggagaaggccgagctgcaggacagagtgacagagctgagcgccctgctgacccagagccagaagcagaatgaagattatgagaagatgatcaaggccctgcgggagaccgtggagatcctggagaccaaccacacagagctgatggagcacgaggccagcctgagcagaaatgcccaggaggagaagctgagcctgcagcaggtgatcaaggacatcacccaggtgatggtggaggagggggacaacatcgcccagggcagcggccacgagaacagcctggagctggacagcagcatcttcagccagtttgactaccaggatgctgacaaggccctgaccctggtgcgctctgtgctgacccggcggcggcaggccgtgcaggacctgcggcagcagctggccggctgccaggaggccgtgaacctgctgcagcagcagcacgaccagtgggaggaggagggcaaggccctgcggcagaggctgcagaagctgactggagagcgggacaccctggccggccagacagtggacctgcagggcgaggtggacagcctgagcaaggagcgggagctgctgcagaaggcccgggaggagctgcggcagcagctggaggtgctggagcaggaggcctggaggctgcggcgggtgaatgtggagctgcagctgcagggcgacagcgcccagggccagaaggaggagcagcaggaggagctgcacctggccgtgcgggagcgggagcggctgcaggagatgctgatgggcctggaggccaagcagagcgagagcctgtctgagctgatcaccctgcgggaggccctggagagcagccacctggagggggagctgctgcggcaggagcagacagaggtgacagctgccctggcccgggcagagcagagcattgctgagctgagcagcagcgagaacaccctgaagacagaggtggccgacctgcgggctgctgctgtgaagctgagcgccctgaatgaggccctggccctggacaaggtgggcctgaaccagcagctgctgcagctggaggaggagaaccagagcgtgtgcagcaggatggaggccgctgagcaggccagaaatgccctgcaggtggacctggccgaggccgagaagagaagagaggccctgtgggagaagaacacccacctggaggcccagctgcagaaggccgaggaggccggggctgagctgcaggccgacctgcgggacatccaggaggagaaggaggagatccagaagaagctgtctgagagccgccaccagcaggaggccgccaccacccagctggagcagctgcaccaggaggccaagaggcaggaggaggtgctggcccgggctgtgcaggagaaggaggccctggtgcgggagaaggccgccctggaggtgcggctgcaggccgtggagcgggaccggcaggacctggccgagcagctgcagggcctgagcagcgccaaggagctgctggagagcagcctgtttgaggcccagcagcagaacagcgtgattgaggtgaccaagggccagctggaggtgcagatccagacagtgacccaggccaaggaggtgatccagggcgaggtgcgctgcctgaagctggagctggacacagagaggagccaggccgagcaggagagagatgctgctgcccggcagctggcccaggccgagcaggagggcaagacagccctggagcagcagaaggccgcccacgagaaggaggtgaaccagctgcgggagaagtggatgcagctggagacagagaaggagcgggtgtccctgctggagaccctgctgcagacccagaaggagctggctgatgccagccagcagctggagcggctgcggcaggacatgaaggtgcagaagctgaaggagcaggagaccaccggcatcctgcagacccagctgcaggaggcccagcgggagctgaaggaggccgcccggcagcacagagatgacctggccgccctgcaggaggagagcagcagcctgctgcaggacaagatggacctgcagaagcaggtggaggacctgaagagccagctggtggcccaggatgacagccagaggctggtggagcaggaggtgcaggagaagctgcgggagacccaggagtacaaccgcatccagaaggagctggagcgggagaaggccagcctgaccctgagcctgatggagaaggagcagaggctgctggtgctgcaggaggccgacagcatccggcagcaggagctgagcgccctgcggcaggacatgcaggaggcccagggcgagcagaaggagctgagcgcccagatggagctgctgcggcaggaggtgaaggagaaggaggccgacttcctggcccaggaggcccagctgctggaggagctggaggccagccacatcacagagcagcagctgcgggccagcctgtgggcccaggaggccaaggccgcccagctgcagctgcggctgcggagcacagagagccagctggaggccctggccgctgagcagcagcccggcaaccaggcccaggcccaggcccagctggccagcctgtacagcgccctgcagcaggccctgggctctgtgtgtgagagcaggcctgagctgagcggcggcggggacagcgcccccagcgtgtggggcctggagccagaccagaatggagcccggagcctcttcaagaggggccccctgctgacagccctgtctgctgaggccgtggccagcgccctgcacaagctgcaccaggacctgtggaagacccagcagaccagagatgtgctgcgggaccaggtgcagaagctggaggagcggctgacagacacagaggccgagaagagccaggtgcacacagagctgcaggacctgcagaggcagctgagccagaaccaggaggagaagagcaagtgggagggcaagcagaacagcctggagagcgagctgatggagctgcacgagaccatggccagcctgcagagccggctgcggcgggcagagctgcagaggatggaggcccagggcgagcgggagctgctgcaggccgccaaggagaacctgacagcccaggtggagcacctgcaggccgctgtggtggaggcccgggcccaggccagcgctgctggcatcctggaggaggacctgaggacagcccggagcgccctgaagctgaagaatgaggaggtggagagcgagcgggagcgggcccaggccctgcaggagcagggcgagctgaaggtggcccagggcaaggccctgcaggagaacctggccctgctgacccagaccctggccgagcgggaggaggaggtggagaccctgcggggccagatccaggagctggagaagcagcgggagatgcagaaggccgccctggagctgctgagcctggacctgaagaagaggaaccaggaggtggacctgcagcaggagcagatccaggagctggagaagtgccgctctgtgctggagcacctgcccatggctgtgcaggagcgggagcagaagctgactgtgcagcgggagcagatccgggagctggagaaggaccgggagacccagagaaatgtgctggagcaccagctgctggagctggagaagaaggaccagatgattgagagccagaggggccaggtgcaggacctgaagaagcagctggtgaccctggagtgcctggccctggagctggaggagaaccaccacaagatggagtgccagcagaagctgatcaaggagctggagggccagcgggagacccagagggtggccctgacccacctgaccctggacctggaggagaggagccaggagctgcaggcccagagcagccagatccatgacctggagagccacagcacagtgctggcccgggagctgcaggagcgggaccaggaggtgaagagccagcgggagcagatcgaggagctgcagaggcagaaggagcacctgacccaggacctggagcggcgggaccaggagctgatgctgcagaaggagcgcatccaggtgctggaggaccagaggacccggcagaccaagatcctggaggaggacctggagcagatcaagctgagcctgcgggagcggggccgggagctgaccacccagaggcagctgatgcaggagcgggcagaggagggcaagggccccagcaaggcccagaggggcagcctggagcacatgaagctgatcctgcgggacaaggagaaggaggtggagtgccagcaggagcacatccacgagctgcaggagctgaaggaccagctggagcagcagctgcagggcctgcacaggaaggtgggggagaccagcctgctgctgagccagcgggagcaggagatcgtggtgctgcagcagcagctgcaggaggcccgggagcagggcgagctgaaggagcagagcctgcagagccagctggatgaggcccagagggccctggcccagagggaccaggagctggaggccctgcagcaggagcagcagcaggcccagggccaggaggagcgggtgaaggagaaggcagatgccctgcagggcgccctggagcaggcccacatgaccctgaaggagcggcacggggagctgcaggaccacaaggagcaggcccggcggctggaggaggagctggccgtggagggccggcgggtgcaggccctggaggaggtgctgggggacctgcgggcagagagccgggagcaggagaaggccctgctggccctgcagcagcagtgtgccgagcaggcccaggagcacgaggtggagacccgggccctgcaggacagctggctgcaggcccaggccgtgctgaaggagcgggaccaggagctggaggccctgcgggcagagagccagagcagccgccaccaggaggaggccgcccgggcccgggcagaggccctgcaggaggccctgggcaaggcccatgctgccctgcagggcaaggagcagcacctgctggagcaggccgagctgagccgcagcctggaggccagcacagccaccctgcaggccagcctggatgcctgccaggcccacagccggcagctggaggaggccctgcgcatccaggagggggagatccaggaccaggacctgcgctaccaggaggatgtgcagcagctgcagcaggccctggcccagagagatgaggagctgcggcaccagcaggagcgggagcagctgctggagaagagcctggcccagagggtgcaggagaacatgatccaggagaagcagaacctgggccaggagcgggaggaggaggagatccggggcctgcaccagagcgtgcgggagctgcagctgaccctggcccagaaggagcaggagatcctggagctgcgggagacccagcagaggaacaacctggaggccctgccccacagccacaagaccagccccatggaggagcagagcctgaagctggacagcctggagccccggctgcagcgggagctggagcggctgcaggccgccctgcggcagacagaggcccgggagattgagtggagggagaaggcccaggacctggccctgagcctggcccagaccaaggcctctgtgagcagcctgcaggaggtggccatgttcctgcaggcctctgtgctggagcgggacagcgagcagcagaggctgcaggatgagctggagctgacccggcgggccctggagaaggagcggctgcacagccctggggccaccagcacagctgagctgggcagcagaggagagcagggcgtgcagctgggggaggtgtctggagtggaggccgagcccagcccagatggcatggagaagcagagctggaggcagaggctggagcacctgcagcaggccgtggcccggctggagattgacaggagccggctgcagaggcacaacgtgcagctgcggagcaccctggagcaggtggagcgggagaggaggaagctgaagcgggaggccatgagagctgcccaggccggcagcctggagatcagcaaggccacagccagcagccccacccagcaggacggccggggccagaagaacagtgatgccaagtgtgtggccgagctgcagaaggaggtggtgctgctgcaggcccagctgaccctggagaggaagcagaagcaggactacatcaccaggtctgcccagaccagccgggagctggccggcctgcaccacagcctgagccacagcctgctggccgtggcccaggcccctgaggccaccgtgctggaggccgagacccggcggctggatgagagcctgacccagagcctgaccagccctggccctgtgctgctgcaccccagccccagcaccacccaggccgccagcaggtag

SEQ ID NO: 295366 - DNA, 7161 bp, Artificial Sequence
  derived and/or modified sequence
atggagacccggagccccggcctgaacaacatgaagccccagagcttacagttagtactagaagaacaggttctggctctgcaacaacaaatggctgaaaatcaggcagctagttggcgcaaattgaagaacagccaggaggcgcagcagcgtcaggctaccttggtgcggaaattgcaagctaaggtgctgcaatatcgttcctggtgtcaggaattagaaaagcggttggaggcaaccggaggcccaatcccgcagcgctgggaaaatgtggaagagcctaatctcgacgagctcttggtaaggctggaggaggagcaacagaggtgcgaatcactggccgaagtcaacacacagctgagactgcacatggaaaaagccgatgttgtgaataaagcccttagggaggacgttgagaaactcactgtggactggagccgggctcgcgacgaactgatgcggaaggaatctcagtggcagatggagcaagagttcttcaaaggatatcttaagggagagcacggaagactactgtccttgtggcgggaagtagtgacctttcggagacattttctcgagatgaaaagtgctaccgatagggatctgatggagctgaaagctgaacacgtgcggctcagtggatctctgctcacttgttgcttgcgcctgaccgtcggcgcacagtcgcgggagcccaacggatccggtcgtatggatgggagggagccagcccagctcctcctgttgctggctaagacccaagagctcgagaaggaagcccatgagcgctcccaagagctgatccaactcaaatctcagggggacctggagaaagccgagctccaggaccgcgtcactgaactgtccgccctgctcacacaatctcagaagcaaaatgaggactacgaaaaaatgatcaaggctctgcgggaaactgtggaaatcctcgagacaaatcacaccgaactgatggagcacgaagcctcgctgtcacgaaacgcgcaagaggaaaagctaagcctccagcaggtcatcaaagatattacacaggtgatggtggaggagggggataacatagctcaagggagcggccacgagaattctctggagctggactccagcatattctcccaatttgattaccaggacgccgataaggcccttaccctagtgagaagcgtgctgacccggagaaggcaagcagttcaggatctccgacagcagctggcgggttgtcaggaagcagttaatttgcttcaacaacagcacgatcagtgggaggaggagggcaaggctctcagacagcggctgcagaagctgacaggagaaagagacactctggcaggacagacagtcgacttacagggagaggtggactctctgtccaaagagcgagagctcctgcagaaggccagggaggagctgcgacagcagttggaggtgttagagcaggaagcctggaggctgagaagagtaaatgtggagctgcagctgcagggagattcagcgcagggccagaaagaggaacagcaagaagagctgcacctggccgtcagggagagagagagattgcaggagatgctcatgggtctggaggccaagcagtctgagagtctaagcgaacttattacactgagagaggctcttgaaagtagtcacctcgagggcgagctgctccgacaggagcagactgaagtaaccgccgcgttagcaagagccgaacaatccatagccgaactgtcctcttccgagaacactctgaaaaccgaggttgctgaccttcgcgctgccgcagtgaagctgagtgcgcttaacgaggctctggccctggataaagtaggactcaaccagcagctgctgcagctcgaggaggagaaccagagcgtttgcagccgtatggaggcagctgagcaggctagaaacgcgctccaggtcgacttggctgaggccgaaaagagaagagaggccctatgggagaaaaacacacacctggaagctcagcttcagaaagctgaagaggccggcgctgagcttcaggcagacttgcgcgacatccaggaggagaaagaggagatacaaaagaaattatctgagtcaaggcatcaacaggaggcggctaccactcagctggaacaactgcaccaggaagccaagcgacaggaagaggtgcttgcccgggcagttcaggagaaggaggccctggtacgcgagaaggccgctttggaagttcgtctccaagccgtagagagggatagacaagacctggcggaacagttgcaaggactctcctcagccaaggaacttctagagagcagcctgtttgaggcacaacaacaaaactccgttatcgaggtgaccaaggggcagttggaagtgcagatccagacagtgacccaggccaaggaagtgattcagggagaagtgcgatgcctaaaactggagctagatacagagaggtctcaagccgagcaggagagggacgccgccgcgcggcagttggcccaggctgagcaggaggggaaaacagcactggaacagcagaaagccgctcatgaaaaagaggtcaaccaattacgggaaaaatggatgcaactggagaccgaaaaggagagggtcagcctactcgagaccttactgcagacgcagaaggaactggcagatgccagccaacagcttgaacgactgagacaagacatgaaggttcagaaactgaaggaacaggaaaccactgggattcttcagacgcagcttcaagaggcccagagggaattgaaagaggcagctagacagcaccgcgacgatctcgctgcactgcaggaggagtcatcttccctattacaggataaaatggatctacagaaacaggttgaggacctaaagtcacaattagtggctcaggatgattctcagagactcgttgaacaagaagtgcaggaaaaattacgggagacacaggaatacaacaggatacagaaagaactggagcgcgagaaagcttccctcacactgtcattgatggagaaggaacaaaggttgctcgtgctgcaggaggccgactccatccggcaacaggagctaagcgcgctgaggcaagatatgcaggaagcacaaggcgagcaaaaagagctcagcgcacaaatggaacttctgagacaggaagtaaaagaaaaggaggctgacttcctagcgcaggaggcccaactgctcgaggagctggaagctagccatattactgaacaacaactgcgggcttcattatgggcacaggaggcaaaagcggctcagttgcagctccgactgcggagtacagaatcacagcttgaagccctggccgccgaacagcaacccggcaatcaggcccaggctcaggctcaactcgccagtctgtatagtgccctccaacaggccttaggttctgtttgtgaaagcagaccagagctatcagggggaggggattctgctccttccgtgtggggacttgaaccagatcagaatggggctcgatcactctttaaaaggggccccctgcttaccgccctctcagcagaagccgtggccagcgcgctgcacaaactgcaccaggatttgtggaagacccagcagacccgggacgttctgcgggaccaggtgcagaagctcgaagaaaggctgacagatacagaggccgagaagtcccaggtacacactgaacttcaagatctccaaagacagctcagccagaatcaggaggagaaaagtaagtgggagggcaagcagaattctcttgaatccgagttgatggagctgcacgaaactatggcctcacttcagtctagacttaggagagccgagctccagaggatggaggcccagggtgaaagggaacttttgcaggctgctaaggaaaacctgaccgcacaagtggagcacctgcaggccgccgtagtggaagcaagagctcaggcctcagccgccgggattctggaggaagacctgcgcaccgctcggagcgccctgaagctcaaaaatgaagaggtagaaagcgaacgcgagagggctcaggcactccaggagcagggcgagctgaaagttgcacaaggcaaggctctgcaggaaaacctggccctgttaactcagaccctggcagagagagaagaggaggtagagactctacgcggccagatacaggaactcgagaagcagcgagagatgcagaaagcagccctggaattgctatccttagatctgaaaaaacggaaccaggaggtggacctccagcaagaacagatacaggaacttgagaaatgcagaagcgtccttgagcacctgccaatggccgtccaggagcgggagcaaaagctcactgtacaaagagagcagatccgggaactggagaaggaccgggagactcagcgaaatgtcttggaacatcaactcctggaactcgaaaaaaaggaccagatgatagaatctcaacgaggtcaggtgcaggatcttaaaaagcagttggtgacactcgagtgcctggccctcgagctggaggagaaccatcacaaaatggagtgccagcagaagttaattaaggaactagagggacagcgcgagacacaacgagtcgctctcacccaccttacgctggacttggaggagcgcagccaagaactgcaagctcagagcagtcagatacacgatctcgaaagtcacagcactgtgctggcaagagaactccaggagcgcgatcaagaggtgaaaagccagcgggagcagattgaggagctgcagcggcagaaggagcaccttacgcaggatctcgaaagacgtgaccaggaactgatgctccaaaaggaaaggatccaagtgctggaggaccaacgcaccaggcagaccaagattctcgaggaggatcttgaacagattaaactgtctttgcgggaaagaggaagggagcttaccacccagaggcaactgatgcaagagcgggctgaagagggtaagggtccatcaaaagcacagcgaggctctctggagcatatgaagttgatccttagagacaaggagaaagaagtggagtgtcagcaagagcacattcatgagctccaggaactgaaggaccagctcgaacagcaacttcagggactccatcggaaggttggtgaaaccagtcttctgctctcccagcgggagcaagaaatcgtcgtgctgcagcagcagctgcaagaagctagggaacaaggagagctgaaggagcagtccctgcaatcacagcttgatgaggcccagagggctctggcccagcgcgaccaggaactggaagccctgcagcaggaacagcaacaggcacagggtcaggaagaacgtgtcaaggagaaagccgacgctttgcagggagccctcgaacaggcacacatgaccctgaaagaaaggcacggcgaactacaagaccacaaagagcaggcccgccgcttggaggaagaactcgcggtggaggggcggcgggtgcaggccctcgaggaggtattgggcgatcttcgtgcggaaagtcgggagcaagaaaaggccttgctggctttgcaacagcagtgcgcagagcaggcccaggaacatgaggtggaaacccgagccctccaggatagctggctccaggcccaggccgtgttaaaagagagggaccaggaattagaggccttacgtgctgaaagtcaaagcagtaggcatcaggaagaagctgcccgcgccagagcagaagctttgcaggaggctctaggaaaagctcatgcagcattgcagggaaaggagcagcatttacttgagcaagctgagttgagccggtcactcgaggcatcaactgccaccctccaggcctccttggatgcctgccaggcccacagccgtcagttagaagaggccttaaggatccaggagggagaaatccaagatcaggaccttaggtaccaggaggatgtgcagcagctgcagcaggccctcgctcagagagatgaggaactgaggcatcagcaagaacgcgaacagttgctcgagaagtctttagcgcagagagtgcaggagaacatgattcaggaaaagcagaacttggggcaggagcgcgaggaggaagagatccggggcctacaccagtccgtacgggaactgcagttgacgttggcacagaaggagcaggagatcttggaactcagagagacccaacagagaaacaacctggaagcattgccgcacagtcacaagacatcgcctatggaggaacaatccttgaagctggactctcttgaacctcgcttgcagcgtgagctggagcgtctacaggccgcactccgtcagactgaggcacgggaaatcgagtggagagagaaagcccaggacctggccctaagtcttgcacagactaaggcgtctgtctcatctctgcaggaagtagctatgttccttcaggctagcgtcctcgaaagggattccgaacagcagcggctgcaggacgagctggagttaacgaggcgggccttggagaaggagcggctgcattccccaggtgctacctccacggctgaactgggaagtcggggtgagcagggagtgcaactcggagaggtgtcgggtgtggaagctgaacctagcccagatggaatggagaagcagagttggcgccaacgtctggaacatctacagcaggctgtggctcgcctcgaaatcgatcgctctcggctgcagcggcacaatgtccagctgaggagtaccttagaacaggtcgagcgagagcgacgcaaattgaagcgagaagccatgagagccgctcaagctggctcactggaaataagcaaggccactgcttcttccccgactcagcaggacggccgtgggcaaaagaacagtgacgctaaatgcgtggctgagctgcagaaggaagtggtcctacttcaggcacaactgacattagagcggaagcaaaagcaggactatatcacgagaagcgcccagacaagtagagagcttgccgggttgcatcacagcctgagccactcactcttggccgtggcccaggcccctgaggctacggttctggaggctgaaactcggcgccttgatgagagtcttacccagtctcttacctcacccggtccagtcctgttacacccttctccctctacaactcaggccgcaagtcgctag

SEQ ID NO: 295367 - DNA, 7160 bp, Artificial Sequence
  derived and/or modified sequence
atggagacccgttcccccggtctgaataatatgaagccgcagagcctgcagctcgtacttgaggaacaggtcctagcactccaacagcaaatggctgaaaaccaagcggctagctggcggaaactgaaaaacagtcaagaagcgcagcagcgccaagcaacactcgttcgaaaactgcaagccaaggtactacagtatcggagctggtgtcaggagctcgaaaaaagactggaggctacgggcggacctatcccacagcggtgggagaatgttgaagagccaaatctggatgagctcctggtccggctggaagaagaacagcagaggtgtgaaagcctggccgaggtgaacacccaacttcgactgcacatggagaaagctgatgtcgtgaataaggctctgcgcgaagatgtggaaaaattgacagtcgattggagtagggccagagacgagctcatgcggaaagagagccagtggcaaatggagcaggagttctttaagggatatctcaaaggggaacatggaagacttctctctttgtggagggaggttgtcacatttcggaggcactttctggaaatgaagtctgctacagatcgcgatctgatggaactgaaagcagaacacgtacggttgagcggaagcttgctgacctgttgcctgcggctcaccgtgggtgcccagtctcgcgaaccgaacggctcaggcagaatggacggccgagagcccgctcaattattgctcttactagccaagacccaggagctcgaaaaagaagcacatgagcgttctcaggaactgatccaactgaagtctcagggtgacctcgagaaggcggagctgcaggatagggttaccgagctctctgcgctgctgactcagagccagaagcagaatgaggactatgagaagatgatcaaggctcttcgcgaaacagtcgagatcctggagacaaaccacacagagctgatggagcacgaggcttctctctcccgaaatgcgcaggaagagaagctgtctctgcagcaggtaatcaaggacatcactcaggtcatggtcgaggaaggcgacaacatcgcccagggctccgggcatgaaaacagtctggagctggactcgtcgatcttttctcagttcgattaccaggacgccgacaaagcactcaccctggttcggagcgtgctgactcgcagaaggcaggctgtgcaagacctaagacaacagctggcagggtgtcaggaggctgttaatttgctgcagcagcagcacgatcagtgggaggaggagggaaaggcactgaggcaacgactccagaagcttaccggcgaaagggataccctagctggacagacggtggaccttcagggcgaggtggattcacttagcaaagagagagaactgctgcagaaagcaagagaggagctccggcaacagcttgaggtgctcgagcaagaagcatggaggctgcgtagagtgaacgtggaacttcagcttcaaggagacagcgcgcaggggcagaaagaggaacagcaagaggagctgcacctggccgtccgggaaagggaaagactgcaggagatgttgatgggactggaggcgaagcagagcgaatctttgagcgagctaataacactgcgagaggccttggagtcctcacatctggagggcgagctcctaagacaggagcagacggaggtgactgcggctctcgcgagggcggagcagtcgatcgccgagctgtcctctagtgaaaatacactgaaaactgaagtcgcagatcttcgggcagctgcagtgaagctctctgccctcaacgaagcactggctctcgacaaggtgggactgaaccaacagctgctgcagttagaagaggaaaaccagtcagtgtgttctcggatggaagctgccgagcaagctagaaatgcattacaggtagatctggcggaagccgagaaacgcagagaagctctctgggaaaagaacacccacttagaagcacagctccagaaggccgaggaggccggagccgaactccaagcagacctgcgggacatccaagaagagaaggaggagatacagaagaaattaagcgaatcaagacatcagcaggaagctgctaccacacaactagaacagctccaccaagaggcaaagcggcaggaggaggtcctggcacgggcagttcaggaaaaggaagccctggtcagagaaaaggcagccttggaagtcaggctgcaggctgtggagagggataggcaggacctggccgaacagcttcagggactcagctcggctaaggaactccttgagagttctctgtttgaagcccagcagcaaaactcggtcatcgaggttaccaagggccaattagaggtgcaaatccagaccgtcacccaagcaaaggaggttatccaaggcgaggtgagatgtctcaagctcgaactggatacagaaaggagtcaagcagaacaagagagagatgcagccgcacgccagttggcacaggccgagcaagaagggaaaacggcccttgagcaacagaaagctgctcacgagaaagaagtgaaccagctccgcgaaaagtggatgcaactcgaaacagagaaagagagggttagtctcctcgaaactctccttcagacccaaaaggagctggcggatgcgagccagcaacttgaacgcttgcgtcaggacatgaaggtgcagaaactgaaagagcaggaaactaccggaatcctgcagacccaactgcaggaggctcagagggaattgaaggaagccgcaagacagcatcgggacgacttggcagccctccaggaagagtctagctccctgcttcaggacaaaatggatctgcaaaagcaggtggaggacttaaaatctcagctggtggcccaggatgacagtcagagactggtcgagcaggaagtgcaggagaagctgcgagaaacacaagagtacaacagaattcaaaaggaactcgaacgcgagaaggccagtctcaccctgagtctcatggagaaggaacagcgcctgctagtgctccaggaagcggacagtatacgccagcaggaactctccgcgttacgtcaagacatgcaggaagcacagggggagcaaaaggagctcagtgctcagatggagctgctgaggcaagaagtgaaagaaaaagaagcagacttcttagctcaggaagcacagctgcttgaggagctggaggcgagccatattacggaacaacagctgagagcttcgttgtgggcccaggaggccaaggccgcacagctgcagctgaggttacggtctactgagagccaactcgaagctctcgctgctgaacagcaacccggaaatcaagctcaggctcaagctcagctggccagcctgtattctgctctgcaacaggcactgggttctgtgtgcgaaagtcggccagaattgtctggcggaggtgacagcgctccatctgtttggggcctggagccggaccagaatggcgctagatcgttgtttaaacgcggtccattgctgactgctctctccgcagaggcagttgccagcgcactccataagctgcatcaggatctctggaagacacaacagactcgtgatgtgctcagagaccaggttcagaagcttgaggaacggctcacggacaccgaggcagagaaatctcaggttcacaccgaactgcaagatctccaaagacagctgtcgcagaatcaagaggaaaaaagtaaatgggaaggaaagcagaactcactagagagtgaactgatggaactgcacgaaactatggcgtctctgcagagtcgccttcgcagagccgagcttcagcgaatggaagctcagggcgaacgtgaactcctccaggcagcaaaggagaacctgaccgcacaggtcgagcacctgcaagccgctgtagtggaagctagggctcaggccagcgccgcaggcatccttgaagaagacctcaggaccgctcggagtgcactgaaattgaagaacgaggaggtggaatcagaacgagagagggcccaggcactgcaggagcaaggtgagttaaaagtggcgcaggggaaagccctccaggaaaacctcgcacttctgacacagaccctagccgagagagaggaagaggtggagacactgagaggacagattcaagaacttgagaaacagcgggaaatgcaaaaagctgctctcgaactgctgtctctggatctgaagaagcggaaccaggaggtggacctgcaacaggaacagatccaggagctcgagaagtgcagaagtgttcttgagcacctccctatggcggtgcaagagcgggagcaaaagcttactgttcagagggaacagatcagggaattggagaaggatcgggagacccagcggaatgtcctcgagcaccaactgctggaactggagaaaaaggaccaaatgattgaatcacagcggggtcaggtgcaggacctgaaaaagcaactcgtcaccctcgagtgtctggccctggagctggaggagaaccatcataaaatggaatgtcagcaaaagctgataaaggaactcgagggccaaagggaaactcagcgcgtggctttgacacacctgacactcgatcttgaggagaggagccaggagttacaggcacagtcatctcagattcatgacctagaatcgcattctaccgtcctggcgagagagttgcaggaacgggatcaggaggtgaagtcccagagggaacagatagaagagctccagcggcaaaaggagcatcttacccaagacctcgaacggagagatcaggagcttatgctgcagaaagaacggattcaggtgttagaggatcagcgcacacggcagacaaagattcttgaagaggatctagagcaaattaagttgtccctgagggaacgcggtcgtgaattgactacacagaggcaactcatgcaggaacgagctgaagagggaaaaggccctagcaaggcacagcgcggttcccttgagcatatgaagctaattcttcgggacaaagagaaggaggttgagtgtcagcaggagcacatccatgaattgcaggaactcaaagatcagctcgagcagcagttgcagggactacaccgaaaggtgggcgagacaagcctgttgctcagccagagggaacaggaaattgtagtcctccagcagcaactgcaggaggctagagagcagggggagctcaaggagcagtctctgcagtcccagcttgatgaagcacagagagcactggcgcagagggaccaggaactggaggctcttcaacaggaacaacagcaagcccaagggcaggaagagagagttaaagagaaagcagatgccctacagggagctctcgaacaggcccacatgactcttaaggaacgccatggggagcttcaagatcataaagagcaggccaggaggctcgaggaagaactggctgtggaggggcgacgagtgcaggctctcgaggaggtcctaggtgacttgcgcgctgaaagtcgcgagcaagagaaagccctccttgctctgcagcagcaatgtgccgaacaggctcaggagcacgaggttgaaaccagagccctgcaggatagttggctgcaggcccaggctgtattgaaagagcgcgatcaagaactggaggccctacgggcagagtctcagtcgagccgccatcaggaagaagcagcacgggcaagggcagaggctctccaggaagccctgggaaaggcccacgcagctctgcagggcaaagagcagcacctcctggagcaggccgagctttcccgtagccttgaggccagtaccgctacattgcaggctagcttggatgcctgccaggcccattctagacagttagaagaggctctgcggattcaagagggagaaatccaagatcaggatctccgctatcaggaggatgttcaacagctgcagcaggccctcgcgcaaagagatgaggagttgcgacatcagcaggagcgggagcaactgttggaaaaatctttggctcagcgggttcaggaaaatatgattcaggaaaagcaaaacttgggccaggaaagagaggaggaagaaatccgtggcctgcatcagagcgtcagagaactccagctcaccctcgcgcagaaggaacaggaaatcctggagcttagagaaacgcaacaacggaataatttggaagccctgccgcactcccataagacttcacccatggaagagcagtcactgaagctcgactctttggagcctaggctgcagcgcgagcttgaacgtctacaggctgcactgcgccagacagaagctagggagattgaatggcgcgagaaagctcaggatctggctttatctcttgcccagaccaaagccagcgtctcatccctgcaggaagtggccatgttcctgcaggcttctgttctggagagagactctgagcagcaacggcttcaggatgagctcgagctcacgagaagagctttggagaaagaacgcttgcactctccaggcgctacatccactgccgaacttgggtcaaggggtgagcagggtgtacagctgggcgaggtctccggagtcgaggctgaaccttcccctgatggaatggagaagcagagctggagacagcgcctggaacacttgcaacaggctgttgcccgactggagatcgacaggtctaggctgcagagacacaacgtccagctccgtagcacactcgagcaagtggaacgggagaggcggaagttaaagagggaggctatgcgtgcagcccaagccggatcgttggaaatttcgaaagccactgcctcctctcccactcaacaagacggtcgaggacagaaaaatagcgatgccaaatgcgttgccgaactgcagaaggaggtggttcttttgcaggcccagttgacacttgaaaggaaacagaagcaggactatatcactagatccgctcaaacctcccgagagttggccggacttcaccactcgctgagccattcactactggccgttgcacaggccccagaggctaccgttctggaggccgaaacaaggcgattggacgaatcactgacgcagagtctgacttccccaggacccgtcttgctgcaccctagtccctcaaccacccaggctgcctctaggta

SEQ ID NO: 295368 - DNA, 8155 bp, Artificial Sequence
  derived and/or modified sequence
cccggggcccgcttgcctcagcttcttgctgccgccagcacgctaagctccagtcggcgccgaaggagagcttcccgaccctcgtgtccagtagccgcaatcccaggctgggagggtgaggcgccgcgctctgccgcccccccgcccctcgctccctgtgtcctggcggatttgcacgtaatctatccgaaagcccagtcccacccgccacccgactctggagctcccattcttcaggaccctgctgaagtatcgcttctcagccgccttctccaggcgcagctgcattcgcttctcggtttttgcactcgctgtgcaccgagttactttcccggcccctcgttgacaccgttcacaggtggctgttggtctttagtaagggtgctgtcttccctgtctgatccttagcaaaagtaggaaggtagagttgttggcagaaatcctgggataagagaatagtttcctggaagatctgtgcctccaaccagcagagagggattgagcttcattgaactcaacagagccaacatttcatagcaccatgttcaagaggaggttgaagtggcatggcaatggttagagaccctgctgggcgtgaacaccctctggctacctagggacctgtgggcctaccacctggtgccctcatggagacaagaagccctgggttgaacaacatgaagccccagtcactgcagctggtactggaagagcaggtgctggcactacagcagcagatggcagagaatcaggcagcctcctggcggaagctgaagaactcccaggaggcccagcagagacaagcaacccttgtgaggaagctgcaggccaaggtgctgcagtaccgaagctggtgccaagagctggagaagcggctagaagccactggaggaccaatcccccagaggtgggaaaatgtggaggagccaaacctggatgagctgctggtccgattggaggaggagcaacagaggtgtgagagtctagcagaggtgaacacccagcttcgactgcacatggaaaaagctgacgtggtgaataaagcccttagggaagatgtggaaaaactgacagtggactggagccgggcccgggatgagctaatgaggaaggagagccagtggcagatggagcaggagttcttcaagggctacctgaaaggggagcacggtcgccttctcagtctatggcgggaggttgtgacattccgacgccacttcctggaaatgaagtcagctactgacagagatctgatggagctaaaagctgagcatgtgaggctttcagggtctctgttgacctgttgtctgcgcttgactgtgggagcacagtctcgggaacccaacggatctggaagaatggatgggcgggagccggcccagctgctgctgctactagccaagacccaggagctggagaaggaagcccatgaaaggagccaggagttaatacagctgaagagtcaaggggatctggagaaggctgaacttcaggaccgggtgaccgagctctctgctctgttgacccagtctcagaagcaaaatgaagattatgaaaagatgataaaggctctgagagagacagtggagatcctggagacaaatcacacagaattaatggaacatgaagcatctcttagtaggaatgcgcaagaggagaagttgtctttacagcaggtgatcaaggatataacccaggtcatggtggaagaaggggacaatatagcccaaggctctggtcatgagaactctttggaattggactctagtatcttctcccagtttgattaccaggatgcagacaaggctcttactctggtgcgttcagtgctgactcggagacgccaggctgtgcaggacctaaggcagcagcttgcaggctgtcaagaggctgtgaacttgttgcaacagcagcatgatcagtgggaggaagagggcaaagccttgagacagcggctgcagaagctcactggggagcgggacactctggcagggcagactgtggacctccagggagaggtggactctctcagcaaggagcgagagctgctgcagaaggccagggaagagctgcggcagcagctggaggtgctagagcaggaggcatggcgcctgcgaagggtaaatgtggagcttcagctgcagggggactctgcccagggccagaaggaggaacagcaggaggagctgcacctggctgtccgggagagggagcgtcttcaggagatgctgatgggcctggaagccaaacagtcagaatcactcagtgaactgatcactcttcgggaagccctggagtcaagtcacctggaaggggagttactgaggcaagagcaaacggaagtgaccgcagcgctggctagggcagagcagtcaattgcagagctgtcgagttctgaaaacaccctgaagacagaagtagctgatcttcgggctgcagctgtcaagctcagtgccttaaatgaggctttggcgttagataaagttgggctgaaccagcagcttctccagttagaggaggagaaccagtctgtgtgcagcagaatggaggccgcagagcaggcgagaaatgctttgcaggtcgacctggcggaggcagagaagaggagggaagccctgtgggaaaagaacactcacctggaggctcagctgcagaaagctgaggaggctggggctgagctgcaggcagatctcagggacatccaagaagagaaggaagaaattcaaaagaaactaagtgagtcacgtcaccagcaggaggcagccacgactcagctggagcagctacatcaggaggcaaagcgacaggaagaagtgcttgccagggcagtccaggagaaggaggccctagtacgagagaaagcggctctagaggtgcggctgcaggccgtggagcgtgaccggcaggacctcgctgaacaactacaggggctcagctcagccaaggagctactggagagcagtctgtttgaagcccaacaacaaaattctgtgatagaggtcaccaaggggcagctggaggtccagattcaaactgtcactcaagccaaggaagtaatccaaggggaagtgaggtgcctgaagctggaactggacactgaacggagtcaggcagagcaggagcgggatgctgcagccagacagctggcccaggctgagcaagaagggaagactgccttggagcagcagaaggcagcccatgagaaagaggtgaaccagctccgggagaaatggatgcagctggaaacagagaaggagagagtatccctcctggagacactgctgcagacgcagaaggagctagcagatgccagccaacaactggaacgactgaggcaggacatgaaagtccagaaattaaaggagcaggagaccactgggatactacagacccagctccaggaggctcaacgggagctgaaggaggcagcccggcagcacagagatgaccttgctgccctccaagaagagagcagctccctgctgcaggataagatggacctgcagaagcaggtggaggacttgaagtctcagctggtggcccaggatgactcccagaggctggtggagcaggaggttcaggagaagctgagagagacccaggagtataaccgaattcagaaggagctggagagagagaaagccagcctgactctgtcactgatggaaaaggaacagagactccttgttttacaagaagctgactctattcgacaacaagagctgagtgccctgcgccaggacatgcaggaggcccagggagaacagaaagagctcagtgctcagatggaattactaaggcaagaggtgaaggaaaaggaggctgactttctggcccaggaagcacagctgctggaggagctggaggcgtctcatatcacggagcagcagctgcgagcctccttgtgggcccaggaagccaaggcagcccaactacagctgcgactgcgcagcacagagagccagctagaagcgctggccgcagagcagcagcccgggaaccaggcccaggcccaggcccagctggccagcctctactctgccctgcagcaggccctggggtctgtttgtgagagcaggcctgagctgagtggtgggggagactctgctccttccgtctggggccttgagccagaccagaatggagctaggagcctctttaagagagggcccctgctgactgctctctccgctgaggcagtagcatctgccctccacaagcttcatcaagacctgtggaagactcaacagacccgggatgttctgagggatcaggtccagaaactggaagagcgtctaactgatactgaggctgagaagagccaggtccacacagagttgcaggatctgcagagacagctctcccagaatcaggaagagaaatccaagtgggaaggaaagcagaactccctagaatctgagctgatggaactacatgaaactatggcatccttacagagtcgcctgcggagagcagagctacagcgaatggaagcccagggtgagcgagagttacttcaggcagccaaggagaacctgacagcccaggtggaacacctgcaagcagctgtcgtagaagccagggctcaggcaagtgctgctggcatcctggaagaagacctgagaacggctcgctcagcactgaagctgaaaaatgaggaagtagagagtgagcgtgagagagcccaggctctgcaagagcagggcgaactgaaggtggcccaagggaaggctctgcaagagaatttggccctcctgacccagaccctagctgaaagagaagaggaggtggagactctgcggggacaaatccaggaactggagaagcaacgggaaatgcagaaggctgctttggaattgctgtctctggacctgaagaagaggaaccaagaggtagatctgcagcaagaacagattcaggagctagagaagtgtaggtctgttttagagcatctgcccatggccgtccaggagcgagagcagaagctgactgtgcagagggagcagatcagagagctcgagaaggatcgggagactcagaggaacgtcttggagcatcagcttctagaacttgagaagaaagaccaaatgattgagtcccagagaggacaggttcaggacctgaaaaagcagttggttactctggaatgcctggccctggaactggaggaaaaccatcacaagatggagtgccagcaaaaactgatcaaggagctggagggccagagggaaacccagagagtggctttgacccaccttacgctggacctagaagaaaggagccaggagctgcaggcacaaagcagccagatccatgacctggagagccacagcaccgttctggcaagagagctgcaggagagggaccaggaggtgaagtctcagcgagaacagatcgaggagctgcagaggcagaaagagcatctgactcaggatctcgagaggagagaccaggagctgatgctgcagaaggagaggattcaggttctcgaggatcagaggacccggcagaccaagatcctggaggaggacctggaacagatcaagctgtccttgagagagcgaggccgggagctgaccactcagaggcagctgatgcaggaacgggcagaggaagggaagggcccaagtaaagcacagcgcgggagcctagagcacatgaagctgatcctgcgtgataaggagaaggaggtggaatgtcagcaggagcatatccatgaactccaggagctcaaagaccagctggagcagcagctccagggcctgcacaggaaggtaggtgagaccagcctcctcctgtcccagcgagagcaggaaatagtggtcctgcagcagcaactgcaggaagccagggaacaaggggagctgaaggagcagtcacttcagagtcaactggatgaggcccagagagccctagcccagagggaccaggaactggaggctctgcagcaagaacagcagcaggcccagggacaggaggagagggtgaaggaaaaggcagacgccctccagggagctctggagcaagcccatatgacactgaaggagcgtcatggagagcttcaggaccacaaggaacaggcacgaaggctggaggaagagctggcagtggagggacggcgggtccaggccctggaggaggtgctgggagacctaagggctgagtctcgggaacaggagaaagctctgttggccctccagcagcagtgtgctgagcaggcacaggagcatgaggtggagaccagggccctgcaggacagctggctgcaggcccaggcagtgctcaaggaacgggaccaggagctggaagctctgcgggcagaaagtcagtcctcccggcatcaggaggaggctgcccgggcccgggctgaggctctgcaggaggcccttggcaaggctcatgctgccctgcaggggaaagagcagcatctcctcgagcaggcagaattgagccgcagtctggaggccagcactgcaaccctgcaagcctccctggatgcctgccaggcacacagtcggcagctggaggaggctctgaggatacaagaaggtgagatccaggaccaggatctccgataccaggaggatgtgcagcagctgcagcaggcacttgcccagagggatgaagagctgagacatcagcaggaacgggagcagctgctggagaagtctctggcccagagggtccaagagaatatgatccaagagaagcagaatctggggcaagagagagaagaggaggagataaggggccttcatcagagtgtaagggagctacagctgactctagcccaaaaggaacaggagattctggagctgagggagacccagcaaaggaacaacctggaagccttaccccacagccacaaaacctccccaatggaggaacaatctctaaaacttgattctttagagcccaggctgcagcgggagctggagcggctacaggcagccctgagacagacagaagccagggagattgagtggagggagaaggcccaggacttggcactctccctagcgcagaccaaggccagtgtcagcagtctgcaggaggtagccatgttcctacaagcctctgtcctggagcgggactcagaacagcaaaggctgcaggatgaactggagctcaccagacgggctctggagaaggagcggctacacagcccaggtgcaaccagcacagcagaactggggtccagaggggagcagggtgtgcagctgggagaggtctcaggagtggaggctgagcctagtcctgatggaatggagaagcagtcatggagacaaaggcttgaacacctgcagcaagcagtggcccggctggagattgacaggagcaggctgcagcgccacaatgtccagctgcggagtaccttggagcaggtggagcgagaacggaggaagctgaagagggaggccatgcgtgcggcccaggcagggtccctagagatcagcaaggccacggcttcttcacccacacagcaggatgggagaggacagaagaactcagatgccaagtgtgtggctgaactgcagaaagaggtggtcctgctgcaagctcagctgactttggagcggaagcagaagcaggactacatcacccgctcagcacagaccagccgtgagctagcaggcctgcaccacagcctctcacactcacttcttgccgtggcccaggcccctgaggccactgtcctggaggcagagacccgcaggctggatgagtccctgactcaaagtctgacatccccagggccagtcctgctacaccccagccccagcactacccaagccgcctccaggtagcagccacagccaggagcacacagacagaagactgtgtcatgggtcatggcccctccgcacacctacaggtttgccaaaggaaaagcctggctctgttaggcacccaggagccccaggtcggcgggtgttcccaggaagaggaagtaaatctgcaaccctggggaggaccccaactcacctgggaatgaggcaaattgcatttgcttgctccctatggaatcacccagaggggtgccttgccctggctgagggacatgtactgcctctcatctagaatttattttcctagcacttcaccacctccttcatcttctccttcaacaataaaccctgagatctttgcattc

SEQ ID NO: 295369 - DNA, 7161 bp, Artificial Sequence
  derived and/or modified sequence
atggagaccagaagccccggcctgaacaacatgaagccccagagcctgcagctggtgctggaggagcaggtgctggccctgcagcagcagatggccgagaaccaggccgccagctggagaaagctgaagaacagccaggaggcccagcagagacaggccaccctggtgagaaagctgcaggccaaggtgctgcagtacagaagctggtgccaggagctggagaagagactggaggccaccggcggccccatcccccagagatgggagaacgtggaggagcccaacctggacgagctgctggtgagactggaggaggagcagcagagatgcgagagcctggccgaggtgaacacccagctgagactgcacatggagaaggccgacgtggtgaacaaggccctgagagaggacgtggagaagctgaccgtggactggagcagagccagagacgagctgatgagaaaggagagccagtggcagatggagcaggagttcttcaagggctacctgaagggcgagcacggcagactgctgagcctgtggagagaggtggtgaccttcagaagacacttcctggagatgaagagcgccaccgacagagacctgatggagctgaaggccgagcacgtgagactgagcggcagcctgctgacctgctgcctgagactgaccgtgggcgcccagagcagagagcccaacggcagcggcagaatggacggcagagagcccgcccagctgctgctgctgctggccaagacccaggagctggagaaggaggcccacgagagaagccaggagctgatccagctgaagagccagggcgacctggagaaggccgagctgcaggacagagtgaccgagctgagcgccctgctgacccagagccagaagcagaacgaggactacgagaagatgatcaaggccctgagagagaccgtggagatcctggagaccaaccacaccgagctgatggagcacgaggccagcctgagcagaaacgcccaggaggagaagctgagcctgcagcaggtgatcaaggacatcacccaggtgatggtggaggagggcgacaacatcgcccagggcagcggccacgagaacagcctggagctggacagcagcatcttcagccagttcgactaccaggacgccgacaaggccctgaccctggtgagaagcgtgctgaccagaagaagacaggccgtgcaggacctgagacagcagctggccggctgccaggaggccgtgaacctgctgcagcagcagcacgaccagtgggaggaggagggcaaggccctgagacagagactgcagaagctgaccggcgagagagacaccctggccggccagaccgtggacctgcagggcgaggtggacagcctgagcaaggagagagagctgctgcagaaggccagagaggagctgagacagcagctggaggtgctggagcaggaggcctggagactgagaagagtgaacgtggagctgcagctgcagggcgacagcgcccagggccagaaggaggagcagcaggaggagctgcacctggccgtgagagagagagagagactgcaggagatgctgatgggcctggaggccaagcagagcgagagcctgagcgagctgatcaccctgagagaggccctggagagcagccacctggagggcgagctgctgagacaggagcagaccgaggtgaccgccgccctggccagagccgagcagagcatcgccgagctgagcagcagcgagaacaccctgaagaccgaggtggccgacctgagagccgccgccgtgaagctgagcgccctgaacgaggccctggccctggacaaggtgggcctgaaccagcagctgctgcagctggaggaggagaaccagagcgtgtgcagcagaatggaggccgccgagcaggccagaaacgccctgcaggtggacctggccgaggccgagaagagaagagaggccctgtgggagaagaacacccacctggaggcccagctgcagaaggccgaggaggccggcgccgagctgcaggccgacctgagagacatccaggaggagaaggaggagatccagaagaagctgagcgagagcagacaccagcaggaggccgccaccacccagctggagcagctgcaccaggaggccaagagacaggaggaggtgctggccagagccgtgcaggagaaggaggccctggtgagagagaaggccgccctggaggtgagactgcaggccgtggagagagacagacaggacctggccgagcagctgcagggcctgagcagcgccaaggagctgctggagagcagcctgttcgaggcccagcagcagaacagcgtgatcgaggtgaccaagggccagctggaggtgcagatccagaccgtgacccaggccaaggaggtgatccagggcgaggtgagatgcctgaagctggagctggacaccgagagaagccaggccgagcaggagagagacgccgccgccagacagctggcccaggccgagcaggagggcaagaccgccctggagcagcagaaggccgcccacgagaaggaggtgaaccagctgagagagaagtggatgcagctggagaccgagaaggagagagtgagcctgctggagaccctgctgcagacccagaaggagctggccgacgccagccagcagctggagagactgagacaggacatgaaggtgcagaagctgaaggagcaggagaccaccggcatcctgcagacccagctgcaggaggcccagagagagctgaaggaggccgccagacagcacagagacgacctggccgccctgcaggaggagagcagcagcctgctgcaggacaagatggacctgcagaagcaggtggaggacctgaagagccagctggtggcccaggacgacagccagagactggtggagcaggaggtgcaggagaagctgagagagacccaggagtacaacagaatccagaaggagctggagagagagaaggccagcctgaccctgagcctgatggagaaggagcagagactgctggtgctgcaggaggccgacagcatcagacagcaggagctgagcgccctgagacaggacatgcaggaggcccagggcgagcagaaggagctgagcgcccagatggagctgctgagacaggaggtgaaggagaaggaggccgacttcctggcccaggaggcccagctgctggaggagctggaggccagccacatcaccgagcagcagctgagagccagcctgtgggcccaggaggccaaggccgcccagctgcagctgagactgagaagcaccgagagccagctggaggccctggccgccgagcagcagcccggcaaccaggcccaggcccaggcccagctggccagcctgtacagcgccctgcagcaggccctgggcagcgtgtgcgagagcagacccgagctgagcggcggcggcgacagcgcccccagcgtgtggggcctggagcccgaccagaacggcgccagaagcctgttcaagagaggccccctgctgaccgccctgagcgccgaggccgtggccagcgccctgcacaagctgcaccaggacctgtggaagacccagcagaccagagacgtgctgagagaccaggtgcagaagctggaggagagactgaccgacaccgaggccgagaagagccaggtgcacaccgagctgcaggacctgcagagacagctgagccagaaccaggaggagaagagcaagtgggagggcaagcagaacagcctggagagcgagctgatggagctgcacgagaccatggccagcctgcagagcagactgagaagagccgagctgcagagaatggaggcccagggcgagagagagctgctgcaggccgccaaggagaacctgaccgcccaggtggagcacctgcaggccgccgtggtggaggccagagcccaggccagcgccgccggcatcctggaggaggacctgagaaccgccagaagcgccctgaagctgaagaacgaggaggtggagagcgagagagagagagcccaggccctgcaggagcagggcgagctgaaggtggcccagggcaaggccctgcaggagaacctggccctgctgacccagaccctggccgagagagaggaggaggtggagaccctgagaggccagatccaggagctggagaagcagagagagatgcagaaggccgccctggagctgctgagcctggacctgaagaagagaaaccaggaggtggacctgcagcaggagcagatccaggagctggagaagtgcagaagcgtgctggagcacctgcccatggccgtgcaggagagagagcagaagctgaccgtgcagagagagcagatcagagagctggagaaggacagagagacccagagaaacgtgctggagcaccagctgctggagctggagaagaaggaccagatgatcgagagccagagaggccaggtgcaggacctgaagaagcagctggtgaccctggagtgcctggccctggagctggaggagaaccaccacaagatggagtgccagcagaagctgatcaaggagctggagggccagagagagacccagagagtggccctgacccacctgaccctggacctggaggagagaagccaggagctgcaggcccagagcagccagatccacgacctggagagccacagcaccgtgctggccagagagctgcaggagagagaccaggaggtgaagagccagagagagcagatcgaggagctgcagagacagaaggagcacctgacccaggacctggagagaagagaccaggagctgatgctgcagaaggagagaatccaggtgctggaggaccagagaaccagacagaccaagatcctggaggaggacctggagcagatcaagctgagcctgagagagagaggcagagagctgaccacccagagacagctgatgcaggagagagccgaggagggcaagggccccagcaaggcccagagaggcagcctggagcacatgaagctgatcctgagagacaaggagaaggaggtggagtgccagcaggagcacatccacgagctgcaggagctgaaggaccagctggagcagcagctgcagggcctgcacagaaaggtgggcgagaccagcctgctgctgagccagagagagcaggagatcgtggtgctgcagcagcagctgcaggaggccagagagcagggcgagctgaaggagcagagcctgcagagccagctggacgaggcccagagagccctggcccagagagaccaggagctggaggccctgcagcaggagcagcagcaggcccagggccaggaggagagagtgaaggagaaggccgacgccctgcagggcgccctggagcaggcccacatgaccctgaaggagagacacggcgagctgcaggaccacaaggagcaggccagaagactggaggaggagctggccgtggagggcagaagagtgcaggccctggaggaggtgctgggcgacctgagagccgagagcagagagcaggagaaggccctgctggccctgcagcagcagtgcgccgagcaggcccaggagcacgaggtggagaccagagccctgcaggacagctggctgcaggcccaggccgtgctgaaggagagagaccaggagctggaggccctgagagccgagagccagagcagcagacaccaggaggaggccgccagagccagagccgaggccctgcaggaggccctgggcaaggcccacgccgccctgcagggcaaggagcagcacctgctggagcaggccgagctgagcagaagcctggaggccagcaccgccaccctgcaggccagcctggacgcctgccaggcccacagcagacagctggaggaggccctgagaatccaggagggcgagatccaggaccaggacctgagataccaggaggacgtgcagcagctgcagcaggccctggcccagagagacgaggagctgagacaccagcaggagagagagcagctgctggagaagagcctggcccagagagtgcaggagaacatgatccaggagaagcagaacctgggccaggagagagaggaggaggagatcagaggcctgcaccagagcgtgagagagctgcagctgaccctggcccagaaggagcaggagatcctggagctgagagagacccagcagagaaacaacctggaggccctgccccacagccacaagaccagccccatggaggagcagagcctgaagctggacagcctggagcccagactgcagagagagctggagagactgcaggccgccctgagacagaccgaggccagagagatcgagtggagagagaaggcccaggacctggccctgagcctggcccagaccaaggccagcgtgagcagcctgcaggaggtggccatgttcctgcaggccagcgtgctggagagagacagcgagcagcagagactgcaggacgagctggagctgaccagaagagccctggagaaggagagactgcacagccccggcgccaccagcaccgccgagctgggcagcagaggcgagcagggcgtgcagctgggcgaggtgagcggcgtggaggccgagcccagccccgacggcatggagaagcagagctggagacagagactggagcacctgcagcaggccgtggccagactggagatcgacagaagcagactgcagagacacaacgtgcagctgagaagcaccctggagcaggtggagagagagagaagaaagctgaagagagaggccatgagagccgcccaggccggcagcctggagatcagcaaggccaccgccagcagccccacccagcaggacggcagaggccagaagaacagcgacgccaagtgcgtggccgagctgcagaaggaggtggtgctgctgcaggcccagctgaccctggagagaaagcagaagcaggactacatcaccagaagcgcccagaccagcagagagctggccggcctgcaccacagcctgagccacagcctgctggccgtggcccaggcccccgaggccaccgtgctggaggccgagaccagaagactggacgagagcctgacccagagcctgaccagccccggccccgtgctgctgcaccccagccccagcaccacccaggccgccagcagatag

SEQ ID NO: 295370 - protein, 397 aa, Artificial Sequence
  derived and/or modified sequence
MYQSLALAASPRQAAYADSGSFLHAPGAGSPMFVPPARVPSMLSYLSGCEPSPQPPELAARPGWAQTATADSSAFGPGSPHPPAAHPPGATAFPFAHSPSGPGSGGSAGGRDGSAYQGALLPREQFAAPLGRPVGTSYSATYPAYVSPDVAQSWTAGPFDGSVLHGLPGRRPTFVSDFLEEFPGEGRECVNCGALSTPLWRRDGTGHYLCNACGLYHKMNGVNRPLVRPQKRLSSSRRAGLCCTNCHTTNTTLWRRNSEGEPVCNACGLYMKLHGVPRPLAMKKESIQTRKRKPKTIAKARGSSGSTRNASASPSAVASTDSSAATSKAKPSLASPVCPGPSMAPQASGQEDDSLAPGHLEFKFEPEDFAFPSTAPSPQAGLRGALRQEAWCALALA

SEQ ID NO: 295371 - protein, 417 aa, Artificial Sequence
  derived and/or modified sequence
TATAVPCRPPCPLVKTTPGRMYQSLALAASPRQAAYADSGSFLHAPGAGSPMFVPPARVPSMLSYLSGCEPSPQPPELAARPGWAQTATADSSAFGPGSPHPPAAHPPGATAFPFAHSPSGPGSGGSAGGRDGSAYQGALLPREQFAAPLGRPVGTSYSATYPAYVSPDVAQSWTAGPFDGSVLHGLPGRRPTFVSDFLEEFPGEGRECVNCGALSTPLWRRDGTGHYLCNACGLYHKMNGVNRPLVRPQKRLSSSRRAGLCCTNCHTTNTTLWRRNSEGEPVCNACGLYMKLHGVPRPLAMKKESIQTRKRKPKTIAKARGSSGSTRNASASPSAVASTDSSAATSKAKPSLASPVCPGPSMAPQASGQEDDSLAPGHLEFKFEPEDFAFPSTAPSPQAGLRGALRQEAWCALALA

SEQ ID NO: 295372 - DNA, 2595 bp, Artificial Sequence
  derived and/or modified sequence
ccaccgccaccgccgtgccctgccgccctccctgcccgctggtcaagaccacgcctgggaggatgtaccagagcctggcgctggccgcgagcccccgccaggccgcctacgccgactcgggctccttcctgcacgctccgggcgccggctctccgatgtttgtgccgccggcgcgcgtcccctcgatgctgtcctacctgtccgggtgtgagccgagcccgcagccccccgagctcgctgcgcgccccggctgggcgcagacagccaccgcggattcgtcggccttcggcccgggcagtccgcaccccccagccgcgcacccgcccggggccaccgccttccctttcgcgcacagcccctcggggcccggcagcggcggcagcgcggggggccgagacggcagtgcctaccagggcgcgctgttgcctcgagaacagttcgcggccccgcttgggcggccggtggggacctcgtactccgccacctacccggcctacgtgagccccgacgtggcccagtcctggactgccgggcccttcgatggcagcgtcctgcacggcctcccaggccgcaggcccaccttcgtgtccgacttcttggaggagttcccgggtgagggtcgtgagtgtgtcaactgcggggccctgtccacaccgctgtggcgccgagacggcaccggccactacctgtgcaatgcctgcggcctctaccacaagatgaatggcgtcaaccggccgctcgttcggcctcagaagcgcctgtcctcgtcccgccgcgccggcctctgctgcaccaactgccacacgaccaacaccacgctgtggcggcggaactcggagggggagcccgtgtgcaatgcctgcggcctctacatgaagctgcacggggtgccgcggcctctggctatgaagaaggaaagcatccagacacggaagcggaagccaaagaccatcgccaaggccaggggctcctcaggatccacaaggaatgcctcggcctccccatctgctgtcgccagcactgacagctcagcagccacttcgaaagccaagcccagcctggcgtccccagtgtgccctgggcccagcatggccccccaggcctctggccaggaggatgactctcttgcccccggccacttggagttcaagttcgagcctgaggactttgccttcccctccacggccccaagcccccaggctggcctcaggggggctctgcgccaagaggcctggtgtgcgctggccttggcctaggtccccaggccagcccatgtcaggggaacagcctggaacagaccacccactgagtcacctccgtgcctgctttgctccagcacagcagagaccagcaggccccccaacccagagactgggtctgctggagtctccacacagtggtggggaggccttctggacagacggcagtcgggccccagagcaagaaggctggtgagggaagggctcagcttcccaccccacgtacagcaagggactccccaggtgcggcccaaggctccggaccacactggccccctgcggcggaggccaacgcagggcaccaccaccaccaacttgaattccgtcatcaatgctcaccgtcaatatgtttacaagttgtagcagttgggggaaaacagtcaacctcccagtgtaaaaccaagattcccagtgaagcacctgaggccaagcaggggagaggaatgaggggagcagctggacatgggcctcctgaggcctcggggctgtccttcattgcccacatggatagacggagctgtggtgcagagaacttttcccgcaacaggtgcaggactgccagggatcggagtgcgggccgcgcacggtgccaggattccgccgaggggaagccgctcacattgcagtcatcacagacttacgcacttgtttggacagtttttccagaggggatgggaaagggccttgttctagctgaatctgtgtatcatgaccatttctgacaggcagaatgaattgtctggtagccctgtcctgacccatccaagcgctgttggggctggtggtgacgtggtcacatgtcctggcatatctggggccacgcagtttagtctcttgtcccaggagaattgttagtgacccctctttctcttgcaagccccctccacactgggttggatgataccttaatgagtgacgctggcgagaggcaccctacccgacgcagctgtgaatggccggtgatgtatgtcaggaggccacagggagcagaggagcggggcaggcagccacagggccctgcggggagcacatcctcgcctccgtccggctgctgcccttcaacaacaagccctgatttttccagcaatgccagaaacctggattttaagtcttccaatttgattcaaaaatatttttaacattgtgagccagctagacccccagtgcaccaccccatattgaaaaacagttgtctggcatcagcttcaggagcgggtccggtcattctgaaactgtccctccagaggttcttccagccccacttctatgcgatgtcatcttttctaaaagagacaaatgaagccacagggaaagtgaaataaagccttgaacctca

SEQ ID NO: 295373 - DNA, 1194 bp, Artificial Sequence
  derived and/or modified sequence
atgtaccagtctctagccctcgccgcctcacctcgccaggctgcgtacgccgactctggaagcttcctgcacgcaccaggagccggctcacctatgtttgtccctccggcccgcgtcccatccatgctgagctatctgtccggatgcgagcctagtcctcagcccccggagctcgccgcccgccccggctgggcccagacagcaaccgcagacagctctgcatttggtcccggttcccctcaccctcctgcagcccaccctcccggagccactgcttttccttttgctcacagtccttctgggcctggatccgggggttccgcgggcggtcgtgacggaagcgcgtatcagggtgcattactgcctcgggagcagtttgccgctccgctcgggcgtcccgtgggcacgtcctactccgccacctaccccgcctatgtgtctcccgatgtagcccagtcgtggaccgccggcccttttgatggaagcgtgttacatggactgccggggcgcagacccacattcgtctcagactttttagaggagttccctggagagggtagggagtgtgtgaattgcggagccctgagtacgcccctttggcggagggacggcacaggtcactacctgtgtaacgcttgcggattatatcacaaaatgaatggcgtcaataggcccctcgtgcgcccccaaaagcggttatcctcaagtaggagggcaggactctgctgtaccaattgccacaccacgaatacaacactgtggagacggaatagtgaaggggaaccagtttgtaatgcttgcgggctgtacatgaagctgcatggcgtgccccgtcctctcgccatgaagaaagaaagcattcaaaccagaaagcggaaacccaaaacaatcgctaaggcccgcgggtctagcgggagcactcgcaacgcttcggcgtctccttcggcagtggcatctaccgactctagcgccgccaccagcaaagccaagccaagcttagctagtcctgtttgtccaggtccgtccatggccccacaggcctccggccaagaggatgattcgctggcccctggccacctggaattcaagttcgaacccgaagatttcgcttttccttcaactgctccctcaccccaggctgggctgagaggggccctgcgccaggaagcttggtgtgctctggccttggcttag

SEQ ID NO: 295374 - DNA, 1194 bp, Artificial Sequence
  derived and/or modified sequence
atgtatcaatctctagctctggccgcaagcccgcgccaggcagcctatgccgactcaggaagtttcttgcacgcaccgggggctggaagtccgatgttcgttcccccagccagggtgccctcaatgttgtcatacctctctgggtgcgagccttccccgcagccgcccgagctcgcggcacgtcccgggtgggcccaaacagctacagcagattccagtgcctttggcccagggtcaccccatcccccagcggctcatcccccgggcgccactgcctttcccttcgcgcattcccctagtggacccgggtctggaggcagtgcaggagggcgagacgggtctgcctatcagggtgcgttgctgccaagagagcagtttgctgcacccctgggaaggcccgtgggcacgtcctacagtgctacctatccagcatatgtgtctcccgacgtggcccagagttggaccgcgggaccctttgacgggagtgtcctccacggcctcccagggcgtcggcctaccttcgtctctgatttcctcgaggaattccccggtgagggcagagagtgtgtgaactgcggcgctttgagtaccccgctgtggcggagggacgggacaggccactacttgtgcaatgcctgcggactgtatcataaaatgaacggtgttaatagacccctcgtcaggccacagaagcggctgtccagcagcagaagggctggcctctgctgcaccaactgtcacactacaaatactactttatggagaagaaacagcgaaggggagccggtctgtaacgcatgcggtctttacatgaagctgcatggagtcccacggcccctcgcaatgaagaaggaatccattcaaaccaggaaacgaaaacctaaaaccatcgctaaggcacgaggctctagcggctctactcgaaacgcctcagcctccccttcagcggtggcttccacagactcctccgcggcgacgtcaaaggctaagccaagcctggcaagccctgtctgccctggaccctccatggccccccaagccagtggtcaagaagacgattcactggcacccgggcatctcgagttcaagttcgagccggaggatttcgctttcccttccactgctccaagcccgcaggctggcctgcggggcgccctccgacaggaagcttggtgcgcactggcactggcatag

SEQ ID NO: 295375 - DNA, 1254 bp, Artificial Sequence
  derived and/or modified sequence
acagcgacagcagtgccttgtagacccccctgccctctcgtaaagaccactcccgggagaatgtaccaaagccttgccttagccgcgtcacccagacaggcggcctacgctgactcgggctcttttctgcatgcccctggcgccgggtcccccatgtttgtccctcctgctagggtcccttctatgctttcctacctttcgggctgtgagccgtcccctcagcctccagaactggccgcgagacccgggtgggctcagactgcaaccgcggattcatctgcatttgggccggggtctccacaccctcccgctgcacaccctccaggtgcaaccgcattcccctttgcgcattctccatcaggccccggcagtggcggtagcgcaggcggtcgagacggcagcgcgtatcaaggggcgctgctcccaagggaacaattcgcagccccgttggggcgccctgtaggcacaagctacagtgctacctacccggcttacgtctccccagatgtagctcagtcctggacagcgggacctttcgacggctctgttctccacggactgcctggaagacgccccacctttgtctcagacttcctcgaagagttccccggcgagggacgggagtgcgtaaattgcggcgccttgtcgacgcctctatggagacgagatggcaccggacattacttgtgtaacgcgtgcggcttgtatcacaaaatgaatggggtcaaccgcccccttgttaggcctcagaagcgcttatcttcatcacgccgggccggactctgttgtactaactgccacaccactaacactaccttgtggcgccgcaattcggagggcgagccagtatgcaacgcttgtgggctttatatgaaattacacggcgtgcctcggccactggctatgaagaaagaaagcatccagacccgcaagcggaagccgaagaccatagccaaggcacggggcagttccggctccactcgcaacgcttcagctagtccttccgcggtggcatccactgattcttccgcagccacgagcaaggccaaacccagcctggcctcacctgtctgcccaggcccctctatggccccccaagcaagtggtcaggaagacgatagtctggcgccaggacacctggagtttaagttcgagccagaggactttgcatttccatcaactgctccaagccctcaggctggcctgcgaggagccctcaggcaggaagcgtggtgtgccttagctttggcttag

SEQ ID NO: 295376 - DNA, 2533 bp, Artificial Sequence
  derived and/or modified sequence
atgtaccagagcctggcgctggccgcgagcccccgccaggccgcctacgccgactcgggctccttcctgcacgctccgggcgccggctctccgatgtttgtgccgccggcgcgcgtcccctcgatgctgtcctacctgtccgggtgtgagccgagcccgcagccccccgagctcgctgcgcgccccggctgggcgcagacagccaccgcggattcgtcggccttcggcccgggcagtccgcaccccccagccgcgcacccgcccggggccaccgccttccctttcgcgcacagcccctcggggcccggcagcggcggcagcgcggggggccgagacggcagtgcctaccagggcgcgctgttgcctcgagaacagttcgcggccccgcttgggcggccggtggggacctcgtactccgccacctacccggcctacgtgagccccgacgtggcccagtcctggactgccgggcccttcgatggcagcgtcctgcacggcctcccaggccgcaggcccaccttcgtgtccgacttcttggaggagttcccgggtgagggtcgtgagtgtgtcaactgcggggccctgtccacaccgctgtggcgccgagacggcaccggccactacctgtgcaatgcctgcggcctctaccacaagatgaatggcgtcaaccggccgctcgttcggcctcagaagcgcctgtcctcgtcccgccgcgccggcctctgctgcaccaactgccacacgaccaacaccacgctgtggcggcggaactcggagggggagcccgtgtgcaatgcctgcggcctctacatgaagctgcacggggtgccgcggcctctggctatgaagaaggaaagcatccagacacggaagcggaagccaaagaccatcgccaaggccaggggctcctcaggatccacaaggaatgcctcggcctccccatctgctgtcgccagcactgacagctcagcagccacttcgaaagccaagcccagcctggcgtccccagtgtgccctgggcccagcatggccccccaggcctctggccaggaggatgactctcttgcccccggccacttggagttcaagttcgagcctgaggactttgccttcccctccacggccccaagcccccaggctggcctcaggggggctctgcgccaagaggcctggtgtgcgctggccttggcctaggtccccaggccagcccatgtcaggggaacagcctggaacagaccacccactgagtcacctccgtgcctgctttgctccagcacagcagagaccagcaggccccccaacccagagactgggtctgctggagtctccacacagtggtggggaggccttctggacagacggcagtcgggccccagagcaagaaggctggtgagggaagggctcagcttcccaccccacgtacagcaagggactccccaggtgcggcccaaggctccggaccacactggccccctgcggcggaggccaacgcagggcaccaccaccaccaacttgaattccgtcatcaatgctcaccgtcaatatgtttacaagttgtagcagttgggggaaaacagtcaacctcccagtgtaaaaccaagattcccagtgaagcacctgaggccaagcaggggagaggaatgaggggagcagctggacatgggcctcctgaggcctcggggctgtccttcattgcccacatggatagacggagctgtggtgcagagaacttttcccgcaacaggtgcaggactgccagggatcggagtgcgggccgcgcacggtgccaggattccgccgaggggaagccgctcacattgcagtcatcacagacttacgcacttgtttggacagtttttccagaggggatgggaaagggccttgttctagctgaatctgtgtatcatgaccatttctgacaggcagaatgaattgtctggtagccctgtcctgacccatccaagcgctgttggggctggtggtgacgtggtcacatgtcctggcatatctggggccacgcagtttagtctcttgtcccaggagaattgttagtgacccctctttctcttgcaagccccctccacactgggttggatgataccttaatgagtgacgctggcgagaggcaccctacccgacgcagctgtgaatggccggtgatgtatgtcaggaggccacagggagcagaggagcggggcaggcagccacagggccctgcggggagcacatcctcgcctccgtccggctgctgcccttcaacaacaagccctgatttttccagcaatgccagaaacctggattttaagtcttccaatttgattcaaaaatatttttaacattgtgagccagctagacccccagtgcaccaccccatattgaaaaacagttgtctggcatcagcttcaggagcgggtccggtcattctgaaactgtccctccagaggttcttccagccccacttctatgcgatgtcatcttttctaaaagagacaaatgaagccacagggaaagtgaaataaagccttgaacctca

SEQ ID NO: 295377 - DNA, 1194 bp, Artificial Sequence
  derived and/or modified sequence
atgtaccagagcctggccctggccgccagcccccggcaggccgcctatgctgacagcggcagcttcctgcacgcccctggggccggcagccccatgtttgtgcccccagcccgggtgcccagcatgctgagctacctgagcggctgtgagcccagcccccagcccccagagctggccgcccggcccggctgggcccagacagccacagctgacagcagcgcctttggacctggcagcccccaccccccagctgcccaccccccaggggccacagccttcccctttgcccacagccccagcggccctggcagcggcggcagcgctgggggcagagatggcagcgcctaccagggcgccctgctgccccgggagcagtttgctgcccccctgggccggcctgtgggcaccagctacagcgccacctacccagcctacgtgtccccagatgtggcccagagctggacagctggcccctttgatggctctgtgctgcacggcctgcccggccggcggcccacctttgtgtctgacttcctggaggagttccctggagagggccgggagtgtgtgaactgtggggccctgagcacccccctgtggaggagagatggcaccggccactacctgtgcaatgcctgtggcctgtaccacaagatgaatggagtgaaccggcccctggtgcggccccagaagaggctgagcagcagcagaagagctggcctgtgctgcaccaactgccacaccaccaacaccaccctgtggaggaggaacagcgagggggagcctgtgtgcaatgcctgtggcctgtacatgaagctgcacggcgtgccccggcccctggccatgaagaaggagagcatccagaccaggaagaggaagcccaagaccatcgccaaggcccggggcagcagcggcagcaccagaaatgccagcgccagccccagcgctgtggccagcacagacagcagcgctgccaccagcaaggccaagcccagcctggccagccctgtgtgccccggccccagcatggccccccaggccagcggccaggaggatgacagcctggcccctggccacctggagttcaagtttgagccagaagattttgccttccccagcacagcccccagcccccaggccggcctgcggggggccctgcggcaggaggcctggtgtgccctggccctggcctag

SEQ ID NO: 295378 - DNA, 1254 bp, Artificial Sequence
  derived and/or modified sequence
acagccacagctgtgccctgcaggcctccctgccccctggtgaagaccaccccaggccgcatgtaccagagcctggccctggccgccagcccccggcaggccgcctatgctgacagcggcagcttcctgcacgcccctggggccggcagccccatgtttgtgcccccagcccgggtgcccagcatgctgagctacctgagcggctgtgagcccagcccccagcccccagagctggccgcccggcccggctgggcccagacagccacagctgacagcagcgcctttggacctggcagcccccaccccccagctgcccaccccccaggggccacagccttcccctttgcccacagccccagcggccctggcagcggcggcagcgctgggggcagagatggcagcgcctaccagggcgccctgctgccccgggagcagtttgctgcccccctgggccggcctgtgggcaccagctacagcgccacctacccagcctacgtgtccccagatgtggcccagagctggacagctggcccctttgatggctctgtgctgcacggcctgcccggccggcggcccacctttgtgtctgacttcctggaggagttccctggagagggccgggagtgtgtgaactgtggggccctgagcacccccctgtggaggagagatggcaccggccactacctgtgcaatgcctgtggcctgtaccacaagatgaatggagtgaaccggcccctggtgcggccccagaagaggctgagcagcagcagaagagctggcctgtgctgcaccaactgccacaccaccaacaccaccctgtggaggaggaacagcgagggggagcctgtgtgcaatgcctgtggcctgtacatgaagctgcacggcgtgccccggcccctggccatgaagaaggagagcatccagaccaggaagaggaagcccaagaccatcgccaaggcccggggcagcagcggcagcaccagaaatgccagcgccagccccagcgctgtggccagcacagacagcagcgctgccaccagcaaggccaagcccagcctggccagccctgtgtgccccggccccagcatggccccccaggccagcggccaggaggatgacagcctggcccctggccacctggagttcaagtttgagccagaagattttgccttccccagcacagcccccagcccccaggccggcctgcggggggccctgcggcaggaggcctggtgtgccctggccctggcctag

SEQ ID NO: 295379 - DNA, 1194 bp, Artificial Sequence
  derived and/or modified sequence
atgtaccagagcctggccctggccgccagcccccggcaggccgcctatgctgattccggatcctttctgcatgcgcctggagctgggagccctatgtttgtcccacccgcgcgggtgcccagtatgttaagctatctctccggatgcgagccctccccgcagccccctgagcttgctgctaggccagggtgggcccagaccgccaccgcagattctagcgccttcggtccaggcagcccacatccaccggccgcacatccccctggcgcaactgcatttccatttgcccattcgccttccgggccagggtccggggggagcgctggcggccgagatgggtcggcctatcagggcgccttactgccccgtgagcagtttgccgccccactcgggcggcccgtgggtacgtcatactctgcgacttaccctgcttacgtgtcgcctgacgtggctcaatcctggactgccggtccattcgatgggtcagtccttcatggactccccggtcgacggccgacttttgtatcggatttcttggaggagtttcctggagaagggcgcgagtgcgtgaattgtggagctctgagtaccccattgtggcgccgggatggcacagggcactatctctgcaacgcctgcggactgtaccataaaatgaacggtgtcaatcgaccattggtgagaccacagaagaggctatctagctcgcgacgtgcaggcttgtgctgcacaaattgtcacactaccaataccacactctggcggcggaattcagagggcgagcctgtgtgtaacgcgtgcgggttgtacatgaagctgcacggggtgccacgaccattggctatgaagaaagagtccattcagactaggaaacggaagccaaagacaattgcaaaggcgaggggttctagcggcagcacacggaatgctagtgcatccccctccgccgtcgccagcaccgactcctctgccgcaacatccaaagctaagccttccctggcctccccagtctgcccaggcccctcgatggctcctcaagcatctggacaggaagacgacagcctagccccgggacacctggagtttaagtttgaacccgaggacttcgcgtttcctagcaccgcgccgtctccccaggccggcttgcggggcgccttgaggcaagaagcctggtgcgctctggccttggcttag

SEQ ID NO: 295380 - DNA, 1194 bp, Artificial Sequence
  derived and/or modified sequence
atgtaccagagcctggccctggccgccagcccccggcaggccgcctatgcagactccggtagttttcttcacgcccctggcgcgggctccccgatgtttgtacctcctgcccgagtgccttctatgctttcctacctctccggctgtgagccctctccccagccacctgaactcgccgccagacccggctgggcacagacagccacggccgactctagtgcttttggccctgggagcccccaccccccggcagctcaccctccaggagccactgcattccctttcgcccactccccttccgggcctggatcagggggatccgcagggggtcgggatgggtccgcttaccagggggctcttttgccaagagagcaattcgctgcaccactcggacggccagtgggtacctcctacagtgcaacatacccggcttatgtgtctcctgatgtggcccagtcatggacggccggacctttcgatggctccgtgctgcatggcttgcctggccgcagacctacttttgtatcagacttcctagaggagttcccaggtgaagggcgggagtgcgtcaattgcggtgccctctcaacccctctgtggcggcgggatggaactggccactacttatgtaacgcttgtggcctctatcacaagatgaacggggtcaatcgacctctagtacggccccagaagaggctctcctcaagtcgaagggccggactctgctgtacgaattgtcataccactaacacaacattgtggagacgcaacagtgagggtgaaccagtgtgcaatgcatgcgggttatacatgaagttgcatggcgtgccccgccccctggccatgaagaaggaaagtattcagacgcgcaagagaaaacctaaaacaatagccaaagcacgcggcagcagtgggtccacacgcaatgcaagcgcttctccctccgctgtcgcttcaacggatagcagcgctgccacatccaaggccaaaccgtcgctggctagtcccgtatgcccaggaccatccatggctcctcaggcttctggccaggaggacgactcgcttgcccctggccacttagaatttaagtttgagccagaggacttcgcctttccatctaccgcaccctcccctcaggctggtctcagaggtgccctcagacaggaggcctggtgtgcactcgctttagcttag

SEQ ID NO: 295381 - DNA, 1254 bp, Artificial Sequence
  derived and/or modified sequence
accgccaccgccgtgccctgccggcccccctgccccctggtgaagaccactcctggtcggatgtatcagagcctcgccctggctgccagcccccgccaggctgcctacgctgacagtggttcatttttacatgcaccaggcgctgggtcccccatgtttgtgccgccagcacgagtgccttccatgttgagctacctgtcgggatgtgaaccttccccacaaccccctgagctcgccgctagaccaggatgggcccagacagcgacagcggacagcagtgcgttcggacctgggtccccccacccccccgccgctcatccacctggtgctaccgccttcccgttcgctcactccccctctggtccaggtagcggcggttctgcgggagggcgcgacgggtctgcctaccagggggcgctcctgcctcgggagcaattcgccgcccctttaggacgtccagtcggaaccagctattccgccacctaccctgcatacgtttcacctgacgttgcccaaagttggacagctggaccattcgatggctctgtgctgcacggcctacccggacgccgccccaccttcgtgtctgacttcctggaggagttcccaggggaaggccgcgagtgtgtgaactgcggtgccctgtcgaccccgctgtggcgtcgggacggaactgggcattacctttgtaatgcgtgcggcctgtaccacaagatgaacggagtcaaccgcccccttgttaggcctcagaagcgacttagctcaagccgcagagctggcctgtgctgcacaaactgtcacaccaccaacacgaccctgtggcgacgaaatagcgagggagagcccgtgtgtaacgcctgcggtctatatatgaagcttcacggagtgcccaggccgctcgctatgaagaaagaatcaatccagacgcgcaaaagaaaacccaaaactattgctaaggctcgcggatccagcgggagcaccaggaatgctagcgcctccccaagtgctgttgcttctactgacagctctgccgctacctccaaagcaaaacctagcttggcttcccctgtatgcccaggaccttccatggccccacaggccagcggccaagaagacgattcgctggctcctggccatctcgagtttaagttcgagccagaggattttgctttccctagcaccgcaccatcccctcaggctggcctccgtggcgccttgcgtcaggaggcatggtgtgctcttgctctagcctag

SEQ ID NO: 295382 - DNA, 1194 bp, Artificial Sequence
  derived and/or modified sequence
atgtatcaaagcctggctctggccgcatctccacgtcaggcagcgtatgccgacagcggctcttttcttcatgctccgggagctggcagcccgatgtttgttcctccagccagagtaccgagtatgttaagttacctgtctggatgcgaaccctctcctcaaccacctgaactggccgcacgccctggttgggcccagactgccacagccgactcaagcgcgttcggacctggttcacctcatccaccggcagcacacccgcctggtgctacggctttcccttttgctcacagccccagcgggcctggcagcggcggttcagcaggcggtcgcgatggctccgcgtatcagggagccttgctgccccgtgaacagtttgccgctccactgggccgaccagtgggcacttcttatagcgcaacatacccagcttatgtgtctcccgacgtcgcacagtcctggacagctgggccatttgacggctctgtgttacatgggctcccagggaggcggcctacttttgtgtctgattttctggaagagttccccggagaaggcagggagtgtgtaaattgcggggctctgtcgacccccctctggcgtcgcgacggtacagggcattatctttgcaatgcctgcgggctgtaccataaaatgaatggggtaaatcgtccactggtgagaccccagaagcgactgagctcatcacggagggctggattgtgctgcactaattgtcatactaccaatacgacactctggcgcagaaactctgagggagaaccggtgtgcaacgcttgtgggctgtatatgaaactgcacggcgtccccagaccccttgctatgaagaaggagtctatccaaaccagaaagagaaaacctaaaacaattgccaaagcgcgaggctcttcagggtctaccagaaatgcttcagctagccccagcgctgttgcttccactgattcttccgctgccacatctaaggccaagcccagcttggcaagccctgtttgtccgggtccaagcatggctccccaggcctccggccaggaagacgacagcctcgctcctggccatctagaatttaagttcgagccagaggactttgcattcccttccacagccccatcaccccaggccggactcagaggcgctcttagacaggaggcttggtgtgcccttgcgttagcttag

SEQ ID NO: 295383 - DNA, 1194 bp, Artificial Sequence
  derived and/or modified sequence
atgtatcagagcctggcgctggccgcttctcccagacaagccgcatacgcggactcgggatcttttttgcacgcaccgggtgcgggatcccctatgttcgtgcctccggcaagagtcccgagtatgcttagctatctcagtgggtgcgagccttcaccacagcctcccgagttggctgcaaggcctggctgggcacagaccgcaaccgccgacagcagcgccttcggccctggcagcccacaccctcctgccgcacatccacctggcgctaccgctttcccctttgcccattctccgagcgggcctggttcgggcggttctgccggtggcagggatggctccgcctatcagggagccctgctccccagggagcagtttgctgcgcctctagggcgtcctgtcgggaccagctactcggcaacctatcctgcatacgtcagccctgacgtggcgcagagctggacagccggtccatttgacggatccgtcctgcatgggctgccgggtaggaggccgacattcgtttctgattttctggaagaattccctggcgagggaagagagtgcgtgaactgtggtgcgttgtccactccgctctggcggagagatggtactggccactacctgtgcaatgcctgtgggctctaccataagatgaacggggttaatcggccattggtaaggcctcaaaagcggctgagttcctcacggagggccggtctatgctgtactaattgtcataccacaaacactaccttgtggagaaggaactcagagggcgagcctgtgtgcaatgcatgcgggctttatatgaaactccatggagtcccacggcctctggccatgaaaaaggaatccattcagacgcgaaagcggaagccaaagaccatcgctaaggctcgtggctcctctgggagtaccaggaacgcgtccgcctcccctagcgccgtggcttccactgactccagtgccgctacctccaaagctaaaccgtccctggcgtctcctgtttgccccggaccctccatggctccccaggcttccgggcaagaggatgacagcctggcaccgggtcatctcgaattcaagtttgagccagaggattttgctttcccgtcgaccgccccatctcctcaggcaggtcttagaggagccctgcggcaggaggcttggtgtgctcttgcactggcttag

SEQ ID NO: 295384 - DNA, 1254 bp, Artificial Sequence
  derived and/or modified sequence
accgccacagctgtgccttgtagaccaccctgcccactggtcaagacaacgcctgggcgtatgtatcaatcactcgccctagcggcaagcccaaggcaggctgcctacgctgattcagggagctttttgcacgctcctggcgcagggtcccctatgtttgtaccccctgcccgtgtcccatctatgctctcgtatttgtccgggtgcgagccgtctccccaacctcccgagctggcagcccgacccggttgggcccagaccgcaacagccgactctagcgcctttggacctggatccccacacccacccgctgcacatccacccggagctaccgccttcccttttgcgcattcaccatccggcccaggttccgggggttctgctgggggtcgagatggcagcgcttaccagggcgcactgctgccaagggaacagttcgctgctccactgggccgacccgttggcaccagttatagcgcaacttacccagcctacgtgtcacccgacgtggctcagtcctggactgccggtccgttcgatggctccgtactacacggtctcccgggaaggcggccaacgtttgtgtccgacttcttggaggagtttcctggtgagggaagagagtgtgtcaattgcggggcactgtccacccccctgtggcggcgagacggtactggtcattacctctgcaacgcctgtggtctctatcacaaaatgaacggagtgaaccggcctttggtaagaccacagaaaaggctaagtagtagcaggcgggctgggctgtgctgtactaattgtcacaccacgaatactacactgtggaggcggaatagcgaaggcgagccagtgtgcaatgcctgcgggctctacatgaagctgcacggggtgcccagaccgctggccatgaagaaagagtcaattcagacaaggaaaagaaagccgaagaccatcgctaaggccagggggtcctccggctcaactagaaatgcgagtgcctcaccttctgctgtggcctctacagatagcagtgcagcaacaagtaaggccaagccgagcttggcctctcccgtatgccctgggccatctatggctccgcaggcgtccggtcaagaggatgactcccttgctcctgggcatttggaatttaagttcgagccagaagactttgctttcccctcaacagctccgtcacctcaggcaggcctgaggggcgctctgagacaggaggcttggtgcgccctggccttggcctag

SEQ ID NO: 295385 - DNA, 1194 bp, Artificial Sequence
  derived and/or modified sequence
atgtaccagagcctggccctggccgccagccccagacaggccgcctacgccgacagcggcagcttcctgcacgcccccggcgccggcagccccatgttcgtgccccccgccagagtgcccagcatgctgagctacctgagcggctgcgagcccagcccccagccccccgagctggccgccagacccggctgggcccagaccgccaccgccgacagcagcgccttcggccccggcagcccccacccccccgccgcccacccccccggcgccaccgccttccccttcgcccacagccccagcggccccggcagcggcggcagcgccggcggcagagacggcagcgcctaccagggcgccctgctgcccagagagcagttcgccgcccccctgggcagacccgtgggcaccagctacagcgccacctaccccgcctacgtgagccccgacgtggcccagagctggaccgccggccccttcgacggcagcgtgctgcacggcctgcccggcagaagacccaccttcgtgagcgacttcctggaggagttccccggcgagggcagagagtgcgtgaactgcggcgccctgagcacccccctgtggagaagagacggcaccggccactacctgtgcaacgcctgcggcctgtaccacaagatgaacggcgtgaacagacccctggtgagaccccagaagagactgagcagcagcagaagagccggcctgtgctgcaccaactgccacaccaccaacaccaccctgtggagaagaaacagcgagggcgagcccgtgtgcaacgcctgcggcctgtacatgaagctgcacggcgtgcccagacccctggccatgaagaaggagagcatccagaccagaaagagaaagcccaagaccatcgccaaggccagaggcagcagcggcagcaccagaaacgccagcgccagccccagcgccgtggccagcaccgacagcagcgccgccaccagcaaggccaagcccagcctggccagccccgtgtgccccggccccagcatggccccccaggccagcggccaggaggacgacagcctggcccccggccacctggagttcaagttcgagcccgaggacttcgccttccccagcaccgcccccagcccccaggccggcctgagaggcgccctgagacaggaggcctggtgcgccctggccctggcctag

SEQ ID NO: 295386 - DNA, 1254 bp, Artificial Sequence
  derived and/or modified sequence
accgccaccgccgtgccctgcagacccccctgccccctggtgaagaccacccccggcagaatgtaccagagcctggccctggccgccagccccagacaggccgcctacgccgacagcggcagcttcctgcacgcccccggcgccggcagccccatgttcgtgccccccgccagagtgcccagcatgctgagctacctgagcggctgcgagcccagcccccagccccccgagctggccgccagacccggctgggcccagaccgccaccgccgacagcagcgccttcggccccggcagcccccacccccccgccgcccacccccccggcgccaccgccttccccttcgcccacagccccagcggccccggcagcggcggcagcgccggcggcagagacggcagcgcctaccagggcgccctgctgcccagagagcagttcgccgcccccctgggcagacccgtgggcaccagctacagcgccacctaccccgcctacgtgagccccgacgtggcccagagctggaccgccggccccttcgacggcagcgtgctgcacggcctgcccggcagaagacccaccttcgtgagcgacttcctggaggagttccccggcgagggcagagagtgcgtgaactgcggcgccctgagcacccccctgtggagaagagacggcaccggccactacctgtgcaacgcctgcggcctgtaccacaagatgaacggcgtgaacagacccctggtgagaccccagaagagactgagcagcagcagaagagccggcctgtgctgcaccaactgccacaccaccaacaccaccctgtggagaagaaacagcgagggcgagcccgtgtgcaacgcctgcggcctgtacatgaagctgcacggcgtgcccagacccctggccatgaagaaggagagcatccagaccagaaagagaaagcccaagaccatcgccaaggccagaggcagcagcggcagcaccagaaacgccagcgccagccccagcgccgtggccagcaccgacagcagcgccgccaccagcaaggccaagcccagcctggccagccccgtgtgccccggccccagcatggccccccaggccagcggccaggaggacgacagcctggcccccggccacctggagttcaagttcgagcccgaggacttcgccttccccagcaccgcccccagcccccaggccggcctgagaggcgccctgagacaggaggcctggtgcgccctggccctggcctag

SEQ ID NO: 295387 - protein, 355 aa, Artificial Sequence
  derived and/or modified sequence
MNTLMDVLRHRPGWVEVKDEGEWDFYWCDVSWLRENFDHTYMDEHVRISHFRNHYELTRKNYMVKNLKRFRKQLEREAGKLEAAKCDFFPKTFEMPCEYHLFVEEFRKNPGITWIMKPDTRSSDDQKDDIPVENYVAQRYIENPYLIGGRKFDLRVYVLVMSYIPLRAWLYRDGFARFSNTRFTLNSIDDQYVHLTNVAVQKTSPDYHPKKGCKWTLQRFRQYLASKHGPEAVETLFRDIDNIFVKSLQSVQKVIISDKHCFELYGYDILIDQDLKPWLLEVNASPSLTASSQEDYELKTCLLEDTLHVVDMEARLRQRSEETTEAALLLPSSSEESFQLIPSCQEEISLSRPCV

SEQ ID NO: 295388 - DNA, 1068 bp, Artificial Sequence
  derived and/or modified sequence
atgaacaccctgatggacgtgctgagacacagacccggctgggtggaggtgaaggacgagggcgagtgggacttctactggtgcgacgtgagctggctgagagagaacttcgaccacacctacatggacgagcacgtgagaatcagccacttcagaaaccactacgagctgaccagaaagaactacatggtgaagaacctgaagagattcagaaagcagctggagagagaggccggcaagctggaggccgccaagtgcgacttcttccccaagaccttcgagatgccctgcgagtaccacctgttcgtggaggagttcagaaagaaccccggcatcacctggatcatgaagcccgacaccagaagcagcgacgaccagaaggacgacatccccgtggagaactacgtggcccagagatacatcgagaacccctacctgatcggcggcagaaagttcgacctgagagtgtacgtgctggtgatgagctacatccccctgagagcctggctgtacagagacggcttcgccagattcagcaacaccagattcaccctgaacagcatcgacgaccagtacgtgcacctgaccaacgtggccgtgcagaagaccagccccgactaccaccccaagaagggctgcaagtggaccctgcagagattcagacagtacctggccagcaagcacggccccgaggccgtggagaccctgttcagagacatcgacaacatcttcgtgaagagcctgcagagcgtgcagaaggtgatcatcagcgacaagcactgcttcgagctgtacggctacgacatcctgatcgaccaggacctgaagccctggctgctggaggtgaacgccagccccagcctgaccgccagcagccaggaggactacgagctgaagacctgcctgctggaggacaccctgcacgtggtggacatggaggccagactgagacagagaagcgaggagaccaccgaggccgccctgctgctgcccagcagcagcgaggagagcttccagctgatccccagctgccaggaggagatcagcctgagcagaccctgcgtgtag

SEQ ID NO: 295389 - DNA, 1068 bp, Artificial Sequence
  derived and/or modified sequence
atgaacacactcatggacgtattgcgacataggcccggatgggtcgaggtaaaagatgagggcgagtgggatttctattggtgcgacgtatcttggctgcgggagaattttgatcatacgtacatggacgaacatgtgcggatctcacatttccggaatcattatgaactcacccgcaaaaattacatggtgaaaaacctgaaaaggtttcggaagcagctggagagagaagccggcaagctcgaagcagcgaagtgcgacttcttccctaaaacttttgagatgccttgcgaatatcacctgttcgtcgaggaattccggaagaaccctgggattacctggataatgaagcccgataccagatcaagtgacgaccaaaaagacgacatcccggtggagaactacgtggctcaacgttacatcgaaaatccttacttaatcgggggcagaaagtttgatcttagggtttacgtgctagtgatgtcctacataccgttgcgcgcatggttatatagagacggtttcgcccgattcagtaacacccggtttaccctcaattcaatcgacgatcagtatgtgcacttaaccaatgtcgccgtgcaaaagacctccccagattaccaccctaagaaaggatgcaagtggacactgcagcgctttaggcagtatctcgcatcgaaacatggcccggaagccgttgaaaccctgttccgagacatcgacaatattttcgtcaaaagtctacagtccgtccagaaggtcattatatctgataagcactgcttcgagctgtatgggtatgacattctcattgaccaggaccttaaaccttggctacttgaggttaatgctagtccaagcctgacagcttcctctcaagaggattatgaactaaaaacctgcttgttggaagacaccttgcacgttgtggatatggaagcaaggcttcgacagagatccgaggagacaaccgaggcagccctgctgttgcctagttcatctgaggagagctttcagctgatcccctcctgtcaggaagaaatatccctttcccgtccgtgcgtttag

SEQ ID NO: 295390 - DNA, 1068 bp, Artificial Sequence
  derived and/or modified sequence
atgaacaccctgatggatgtgctgcggcaccggcccggctgggtggaggtgaaggatgaaggagagtgggacttctactggtgtgatgtgtcctggctgagagaaaattttgaccacacctacatggatgaacatgtgcgcatcagccacttcaggaaccactatgagctgaccaggaagaactacatggtgaagaacctgaagcgcttcaggaagcagctggagcgggaggccggcaagctggaggccgccaagtgtgacttcttccccaagacctttgagatgccctgtgagtaccacctgtttgtggaggagttcaggaagaaccctggcatcacctggatcatgaagccagacaccaggagcagtgatgaccagaaggatgacatccctgtggagaactacgtggcccagcgctacatcgagaacccctacctgattggaggcaggaagtttgacctgcgggtgtatgtgctggtgatgagctacatccccctgcgggcctggctgtacagagatggctttgcccgcttcagcaacacccgcttcaccctgaacagcattgatgaccagtatgtgcacctgaccaacgtggccgtgcagaagaccagcccagactaccaccccaagaagggctgcaagtggaccctgcagcgcttccggcagtacctggccagcaagcacggccctgaggccgtggagaccctcttccgggacatcgacaacatctttgtgaagagcctgcagagcgtgcagaaggtgatcatcagtgacaagcactgctttgagctgtatggctatgacatcctgattgaccaggacctgaagccctggctgctggaggtgaatgccagccccagcctgacagccagcagccaggaggactatgagctgaagacctgcctgctggaggacaccctgcacgtggtggacatggaggcccggctgcggcagaggtctgaggagaccacagaggccgccctgctgctgcccagcagcagcgaggagagcttccagctgatccccagctgccaggaggagatcagcctgagccggccctgtgtgtag

SEQ ID NO: 295391 - DNA, 1068 bp, Artificial Sequence
  derived and/or modified sequence
atgaacaccctgatggacgtgctgcggcaccggcccggctgggtggaagtgaaagacgaaggagaatgggacttctattggtgcgatgtgagctggctgcgggagaatttcgaccacacctacatggatgagcatgtgaggatctcacactttcgcaatcattacgaactgacccggaagaactacatggtgaaaaacctgaagagattccgaaagcagctggaacgggaggccggcaaactcgaagcagctaagtgcgatttcttccctaaaacattcgagatgccctgcgaataccatctgtttgttgaagagtttcgtaagaacccgggaatcacttggatcatgaagcccgatacaaggtcttctgatgaccagaaagacgacattccggttgagaactacgttgcccagcgatatatcgagaatccgtacctaataggagggaggaagttcgatctgcgggtgtacgttctggtcatgagctatattcccctccgtgcttggctgtatcgagatgggttcgctcgctttagcaacacacggttcacactgaatagtatcgatgaccagtacgtccatctcacgaacgttgcagttcagaagacaagcccagattatcaccccaagaagggatgtaaatggaccctgcaaagattccgccagtatttggccagcaagcacggaccagaagccgtggaaactctattccgggacatagataatattttcgtgaaaagcttgcagtctgtgcaaaaagtgatcatcagcgataaacattgctttgagctctacgggtatgatatcttgattgaccaggatttgaaaccatggcttctggaggtcaatgcttccccatcgttaaccgcgtcgtcccaggaggattacgaacttaagacctgcctccttgaagatacactccatgtcgttgacatggaggcacgcctgcgtcagcggagcgaggagacaaccgaagctgccctgctgctgccaagttcctcagaggaatcttttcaattaattccctcctgccaagaggaaatcagcctctcccgcccttgcgtctag

SEQ ID NO: 295392 - DNA, 1068 bp, Artificial Sequence
  derived and/or modified sequence
atgaatacattgatggacgtcttaagacatcgtccgggttgggtggaagtgaaggacgaaggtgaatgggacttctattggtgcgatgtcagctggttgcgggaaaattttgaccacacatacatggatgagcatgttagaatcagccacttccggaatcactacgaactgactcgcaaaaattatatggttaagaacctgaagagattccggaagcagctggaacgcgaggcaggcaagctcgaggcagctaagtgcgactttttccccaagacttttgagatgccatgtgaatatcacttatttgtggaagagttcagaaagaaccccggaataacctggatcatgaagccagatacccgctcttccgatgaccagaaagacgatattcctgtggagaactatgtggctcagcgttatatagagaatccgtatttaattggcggtcgcaagttcgacctgagagtctacgtccttgttatgtcttacattccccttagggcatggctgtatagggatggctttgctaggtttagcaatacacgctttacactgaactctattgacgaccaatacgtgcacctgacaaacgtcgccgtgcaaaaaacgtcccctgactaccatcctaaaaaggggtgtaagtggaccctgcagcgattccgccaatatcttgcctctaagcacggcccagaagccgtggagacgcttttcagggatatagacaatattttcgttaaatctttgcagtctgttcaaaaagtgattatttcagataaacattgtttcgagctgtacggatatgatattttgatcgaccaggacctgaagccgtggttattggaggtgaacgcctctccaagtctcacggccagttcacaggaggattacgagctgaaaacttgtctgcttgaggatacactgcatgtagtcgatatggaggcgagattacggcaacgctccgaagagaccacagaagctgcactactgctcccctctagtagtgaggagtcgttccagctgattccttcatgtcaggaggagatttccctgagcaggccatgtgtgtag

SEQ ID NO: 295393 - DNA, 1044 bp, Artificial Sequence
  derived and/or modified sequence
atgaacacattaatggacgtgctgcgtcaccggcctggctgggtggaagtgaaggacgaaggagaatgggatttctactggtgtgatgtgagctggctccgcgagaacttcgatcacacctatatggatgagcacgtcagaatctcccactttaggaaccactacgagcttaccaggaagaactacatggtcaaaaatctgaaaagattccgaaaacaattagagagggaggctgggaagcttgaggcggctaaatgcgactttttccctaagacattcgaaatgccttgcgagtatcatctctttgtcgaggagtttcgcaaaaatccaggaataacatggatcatgaaacccgtagcccgcagtcaagggaaggggatattcttatttaggcgactgaaagatatagtggattggcggaaagacaccagatcaagcgacgaccaaaaggacgatattccggtggagaattacgtggctcaacgctacattgaaaacccttatctgattggagggcgcaaattcgacctgcgcgtatatgtgttggtgatgtcatacattccccttagagcctggttgtacagagacggattcgccaggttcagcaacacgaggtttacactcaactccatcgatgaccaatacgtccatctgactaatgttgccgtgcagaaaacatcaccagactaccacccgaaaaaagggtgtaagtggactttgcagcggttccggcagtaccttgcatcaaagcacggaccagaggcagtggagacactttttcgggacatagataatatattcgtgaaatcactgcagtctgtgcagaaagtgattatttcagacaagcactgttttgagttgtatggatacgacatcttgatcgaccaagacctgaaaccctggttgcttgaggtaaacgcttctccatccctgactgccagtagtcaggaggactacgagctcaagacctgtctgttagaggatacattgcatgtcgtcgatatggaggctcggtctctgcgggccgatagtccctgttggtag

SEQ ID NO: 295394 - DNA, 1044 bp, Artificial Sequence
  derived and/or modified sequence
atgaacaccctgatggatgtgctgcggcaccggcccggctgggtggaggtgaaggatgaaggagagtgggacttctactggtgtgatgtgtcctggctgagagaaaattttgaccacacctacatggatgaacatgtgcgcatcagccacttcaggaaccactatgagctgaccaggaagaactacatggtgaagaacctgaagcgcttcaggaagcagctggagcgggaggccggcaagctggaggccgccaagtgtgacttcttccccaagacctttgagatgccctgtgagtaccacctgtttgtggaggagttcaggaagaaccctggcatcacctggatcatgaagcctgtggcccggagccagggcaagggcatcttcctgttccggcggctgaaggacatcgtggactggaggaaggacaccaggagcagtgatgaccagaaggatgacatccctgtggagaactacgtggcccagcgctacatcgagaacccctacctgattggaggcaggaagtttgacctgcgggtgtatgtgctggtgatgagctacatccccctgcgggcctggctgtacagagatggctttgcccgcttcagcaacacccgcttcaccctgaacagcattgatgaccagtatgtgcacctgaccaacgtggccgtgcagaagaccagcccagactaccaccccaagaagggctgcaagtggaccctgcagcgcttccggcagtacctggccagcaagcacggccctgaggccgtggagaccctcttccgggacatcgacaacatctttgtgaagagcctgcagagcgtgcagaaggtgatcatcagtgacaagcactgctttgagctgtatggctatgacatcctgattgaccaggacctgaagccctggctgctggaggtgaatgccagccccagcctgacagccagcagccaggaggactatgagctgaagacctgcctgctggaggacaccctgcacgtggtggacatggaggcccggagcctgcgggctgacagcccctgctggtag

SEQ ID NO: 295395 - DNA, 1044 bp, Artificial Sequence
  derived and/or modified sequence
atgaacaccctgatggacgtgctgcggcaccggcccggctgggtggaagtcaaagacgaaggcgagtgggatttttactggtgcgacgtcagttggctccgggagaacttcgaccacacatacatggacgaacacgttcgcatcagccacttcagaaaccactatgagctgactcggaaaaattacatggttaagaacctgaaacgcttccggaaacagttggaaagagaggccggtaaactcgaagccgctaaatgcgacttctttccaaaaacctttgaaatgccctgtgaataccatctattcgttgaggaattcaggaagaaccccggcattacttggataatgaagcccgtagctaggtctcagggaaagggaatcttcttgtttcgccgactcaaggatatcgtggactggcgtaaagacacgcggagttcagacgatcaaaaggacgacatccccgtagagaattacgtcgcccaacgatacattgaaaacccatacttgatcggcggccgcaaatttgatttaagggtctacgtacttgtgatgtcatacatccctcttcgcgcatggctgtaccgcgacggctttgcgcgattcagtaatacccggttcacactgaatagtattgatgaccaatatgtccacctgacaaacgttgctgtgcagaaaacctcccccgattaccaccccaaaaagggctgtaaatggacccttcagcgctttaggcagtacttagctagcaagcacggaccagaagcagtagagacactctttcgcgacatagataacatttttgtgaagagtttacagtccgtccagaaagtcattatttccgacaaacattgttttgagctgtatggttacgacatactgatcgaccaggaccttaagccttggttacttgaagtaaatgcctcacctagcttaaccgcttccagccaagaagactatgagctgaagacttgtctgttggaagacaccctgcacgtcgtagatatggaggctaggtctttgcgagcggattcaccatgctggtag

SEQ ID NO: 295396 - DNA, 1044 bp, Artificial Sequence
  derived and/or modified sequence
atgaatactcttatggatgttctgcgccaccgcccagggtgggtggaggtcaaagatgaaggggagtgggatttctactggtgcgacgtctcatggctgagggagaactttgaccacacatacatggatgaacacgtcagaatcagtcatttcagaaatcactacgagttgaccaggaaaaattatatggtgaagaatctgaagcgattcagaaaacagttagagagagaggccggaaagctggaagcggctaagtgcgatttctttcccaagacattcgagatgccctgcgagtaccacctgttcgtagaagaattccgcaagaatcctggcatcacttggatcatgaaacctgttgctcggagtcaggggaaaggcatcttcctgtttagaagattgaaggacattgtagattggcgcaaggatacccgcagctccgacgaccaaaaagacgatatacctgtggagaactatgtggcccagagatacatcgaaaacccttacctgattggcggaaggaagtttgacttacgagtctacgttctggtgatgtcatatattccccttcgggcatggctttaccgcgacggtttcgccagattcagtaacactcggtttaccctcaatagtatagatgatcagtacgtgcacctgaccaatgttgctgtgcagaagacaagcccagattatcacccgaaaaaaggatgcaaatggaccctgcaaagattccggcagtacctagcctccaaacacggccctgaggctgtcgagaccttatttagggatatcgataatatcttcgtgaaaagcctgcagtcagttcaaaaagttatcatatctgacaaacactgcttcgagctctatggatacgacatccttatagaccaggacttgaaaccttggctccttgaagtgaacgccagtcctagcctgactgcttcctcgcaagaggactacgaattaaagacatgcctgctcgaagacacactgcacgtcgtggatatggaggcaagatcactgagagccgattctccatgttggtag

SEQ ID NO: 295397 - DNA, 1044 bp, Artificial Sequence
  derived and/or modified sequence
atgaacaccctgatggacgtgctgagacacagacccggctgggtggaggtgaaggacgagggcgagtgggacttctactggtgcgacgtgagctggctgagagagaacttcgaccacacctacatggacgagcacgtgagaatcagccacttcagaaaccactacgagctgaccagaaagaactacatggtgaagaacctgaagagattcagaaagcagctggagagagaggccggcaagctggaggccgccaagtgcgacttcttccccaagaccttcgagatgccctgcgagtaccacctgttcgtggaggagttcagaaagaaccccggcatcacctggatcatgaagcccgtggccagaagccagggcaagggcatcttcctgttcagaagactgaaggacatcgtggactggagaaaggacaccagaagcagcgacgaccagaaggacgacatccccgtggagaactacgtggcccagagatacatcgagaacccctacctgatcggcggcagaaagttcgacctgagagtgtacgtgctggtgatgagctacatccccctgagagcctggctgtacagagacggcttcgccagattcagcaacaccagattcaccctgaacagcatcgacgaccagtacgtgcacctgaccaacgtggccgtgcagaagaccagccccgactaccaccccaagaagggctgcaagtggaccctgcagagattcagacagtacctggccagcaagcacggccccgaggccgtggagaccctgttcagagacatcgacaacatcttcgtgaagagcctgcagagcgtgcagaaggtgatcatcagcgacaagcactgcttcgagctgtacggctacgacatcctgatcgaccaggacctgaagccctggctgctggaggtgaacgccagccccagcctgaccgccagcagccaggaggactacgagctgaagacctgcctgctggaggacaccctgcacgtggtggacatggaggccagaagcctgagagccgacagcccctgctggtag

SEQ ID NO: 295398 - protein, 1536 aa, Artificial Sequence
  derived and/or modified sequence
MGVVNFVFRASEDLQVLENYSDAPMTPKQILQVIEAEGLKEMSGTSPLACLNAMLHSNSRGGEGLFYKLPGRISLFTLKKDALQWSRHPATVEGEEPEDTADVESCGSNEASTVSGENDVSLDETSSNASCSTESQSRPLSNPRDSYRASSQANKQKKKTGVMLPRVVLTPLKVNGAHVESASGFSGCHADGESGSPSSSSSGSLALGSAAIRGQAEVTQDPAPLLRGFRKPATGQMKRNRGEEIDFETPGSILVNTNLRALINSRTFHALPSHFQQQLLFLLPEVDRQVGTDGLLRLSSSALNNEFFTHAAQSWRERLADGEFTHEMQVRIRQEMEKEKKVEQWKEKFFEDYYGQKLGLTKEESLQQNVGQEEAEIKSGLCVPGESVRIQRGPATRQRDGHFKKRSRPDLRTRARRNLYKKQESEQAGVAKDAKSVASDVPLYKDGEAKTDPAGLSSPHLPGTSSAAPDLEGPEFPVESVASRIQAEPDNLARASASPDRIPSLPQETVDQEPKDQKRKSFEQAASASFPEKKPRLEDRQSFRNTIESVHTEKPQPTKEEPKVPPIRIQLSRIKPPWVVKGQPTYQICPRIIPTTESSCRGWTGARTLADIKARALQVRGARGHHCHREAATTAIGGGGGPGGGGGGATDEGGGRGSSSGDGGEACGHPEPRGGPSTPGKCTSDLQRTQLLPPYPLNGEHTQAGTAMSRARREDLPSLRKEESCLLQRATVGLTDGLGDASQLPVAPTGDQPCQALPLLSSQTSVAERLVEQPQLHPDVRTECESGTTSWESDDEEQGPTVPADNGPILSLVGDDTLEKGTGQALDSHPTMKDPVNVTPSSTPESSPTDCLQNRAFDDELGLGGSCPPMRESDTRQENLKTKALVSNSSLHWIPIPSNDEVVKQPKPESREHIPSVEPQVGEEWEKAAPTPPALPGDLTAEEGLDPLDSLTSLWTVPSRGGSDSNGSYCQQVDIEKLKINGDSEALSPHGESTDTASDFEGHLTEDSSEADTREAAVTKGSSVDKDEKPNWNQSAPLSKVNGDMRLVTRTDGMVAPQSWVSRVCAVRQKIPDSLLLASTEYQPRAVCLSMPGSSVEATNPLVMQLLQGSLPLEKVLPPAHDDSMSESPQVPLTKDQSHGSLRMGSLHGLGKNSGMVDGSSPSSLRALKEPLLPDSCETGTGLARIEATQAPGAPQKNCKAVPSFDSLHPVTNPITSSRKLEEMDSKEQFSSFSCEDQKEVRAMSQDSNSNAAPGKSPGDLTTSRTPRFSSPNVISFGPEQTGRALGDQSNVTGQGKKLFGSGNVAATLQRPRPADPMPLPAEIPPVFPSGKLGPSTNSMSGGVQTPREDWAPKPHAFVGSVKNEKTFVGGPLKANAENRKATGHSPLELVGHLEGMPFVMDLPFWKLPREPGKGLSEPLEPSSLPSQLSIKQAFYGKLSKLQLSSTSFNYSSSSPTFPKGLAGSVVQLSHKANFGASHSASLSLQMFTDSSTVESISLQCACSLKAMIMCQGCGAFCHDDCIGPSKLCVLCLVVR

SEQ ID NO: 295399 - protein, 84 aa, Artificial Sequence
  derived and/or modified sequence
MKDKQKKKKERTWAEAARLVLENYSDAPMTPKQILQVIEAEGLKEMSGTSPLACLNAMLHSNSRGGEGLFYKLPGRISLFTLKR

SEQ ID NO: 295400 - DNA, 983 bp, Artificial Sequence
  derived and/or modified sequence
cacgcacgcacccgggcgccgaagggaaagccgcgtctcgccctcccgccccgccgtcggtcctgtctcagtccctcagcagagcgggaaagcggaggccggagccgtgacctctgaccccgtggttatgcggagccgccgcattccttagcgatcgcggggcagccgccgctgccgccgtgggcgactgacgcagcgcgggcgcgtggagccgccgccgcccctcccccaccgccgctctcgcgccagccggtccccgcgtgcccgccccttctccccggccgcacccgagacctcgcgcgccgccgctgccacgcgccccccccaccgccgccgccgccccagccccgcgccaccgccccagcccgcccagcccggaggtcccgcgtggagctgccgccgccgccggggagaaggatgaaggacaaacagaagaagaagaaggagcgcacgtgggccgaggccgcgcgcctggtattagaaaactactcggatgctccaatgacaccaaaacagattctgcaggtcatagaggcagaaggactaaaggaaatgagtgggacttcccctctcgcatgcctcaatgctatgctacattccaattcaagaggaggagaggggttgttttataaactgcctggccgaatcagccttttcacgctcaagagatgaagtcttgctatgttggttaaactggtctcaaactcctggcctcaagtgatcttcccaccacagcttcacaaagcactgggatggattacagaaggatgccctgcagtggtctcgccatccagctacagtggagggagaggagccagaggacacggctgatgtggagagctgtgggtctaatgaagccagcactgtgagtggtgaaaacgatgtatctcttgatgaaacatcttcgaacgcatcctgttctacagaatctcagagtcgacctctttccaatcccagggacagctacagagcttcctcacagg

SEQ ID NO: 295401 - protein, 1462 aa, Artificial Sequence
  derived and/or modified sequence
MLSFPNLNQVLENYSDAPMTPKQILQVIEAEGLKEMSSGTSPLACLNAMLHSNSRGGEGLFYKLPGRISLFTLKKDALQWSRHPATVEGEEPEDTADVESCGSNEASTVSGENDVSLDETSSNASCSTESQSRPLSNPRDSYRASSQANKQKKKTGVMLPRVVLTPLKVNGAHVESASGQMKRNRGEEIDFETPGSILVNTNLRALINSRTFHALPSHFQQQLLFLLPEVDRQVGTDGLLRLSSSALNNEFFTHAAQSWRERLADGEFTHEMQVRIRQEMEKEKKVEQWKEKFFEDYYGQKLGLTKEESLQQNVGQEEAEIKSGLCVPGESVRIQRGPATRQRDGHFKKRSRPDLRTRARRNLYKKQESEQAGVAKDAKSVASDVPLYKDGEAKTDPAGLSSPHLPGTSSAAPDLEGPEFPVESVASRIQAEPDNLARASASPDRIPSLPQETVDQEPKDQKRKSFEQAASASFPEKKPRLEDRQSFRNTIESVHTEKPQPTKEEPKVPPIRIQLSRIKPPWVVKGQPTYQICPRIIPTTESSCRGWTGARTLADIKARALQVRGARGHHCHREATDEGGGRGSSSGDGGEACGHPEPRGGPSTPGKCTSDLQRTQLLPPYPLNGEHTQAGTAMSRARREDLPSLRKEESCLLQRATVGLTDGLGDASQLPVAPTGDQPCQALPLLSSQTSVAERLVEQPQLHPDVRTECESGTTSWESDDEEQGPTVPADNGPILSLVGDDTLEKGTGQALDSHPTMKDPVNVTPSSTPESSPTDCLQNRAFDDELGLGGSCPPMRESDTRQENLKTKALVSNSSLHWIPIPSNDEVVKQPKPESREHIPSVEPQVGEEWEKAAPTPPALPGDLTAEEGLDPLDSLTSLWTVPSRGGSDSNGSYCQQVDIEKLKINGDSEALSPHGESTDTASDFEGHLTEDSSEADTREAAVTKGSSVDKDEKPNWNQSAPLSKVNGDMRLVTRTDGMVAPQSWVSRVCAVRQKIPDSLLLASTEYQPRAVCLSMPGSSVEATNPLVMQLLQGSLPLEKVLPPAHDDSMSESPQVPLTKDQSHGSLRMGSLHGLGKNSGMVDGSSPSSLRALKEPLLPDSCETGTGLARIEATQAPGAPQKNCKAVPSFDSLHPVTNPITSSRKLEEMDSKEQFSSFSCEDQKEVRAMSQDSNSNAAPGKSPGDLTTSRTPRFSSPNVISFGPEQTGRALGDQSNVTGQGKKLFGSGNVAATLQRPRPADPMPLPAEIPPVFPSGKLGPSTNSMSGGVQTPREDWAPKPHAFVGSVKNEKTFVGGPLKANAENRKATGHSPLELVGHLEGMPFVMDLPFWKLPREPGKGLSEPLEPSSLPSQLSIKQAFYGKLSKLQLSSTSFNYSSSSPTFPKGLAGSVVQLSHKANFGASHSASLSLQMFTDSSTVESISLQCACSLKAMIMCQGCGAFCHDDCIGPSKLCVLCLVVR

SEQ ID NO: 295402 - DNA, 4389 bp, Artificial Sequence
  derived and/or modified sequence
atgctctctttccccaatctcaaccaagtgctagagaattattcagatgcccccatgactccaaaacagattttgcaggtgatcgaggccgaaggactgaaagaaatgagctcgggcacctctccactcgcctgcttaaacgcgatgctccattcgaactcccggggcggtgagggcctattttacaagcttccgggccgtatcagcctattcacactaaagaaagatgccctgcagtggtcacgccatccagcgaccgttgagggggaagaacccgaggatacagcagatgttgaaagctgtggatcgaacgaggccagtactgtgtcaggggagaatgatgtgtccctcgacgagaccagctctaatgccagctgctcaacggaatcccagtctcgcccactcagcaatccgcgcgactcctatagagcttctagtcaggccaacaaacagaagaagaaaaccggggtgatgctgccaagagtcgtgctgacccccctgaaggtgaacggtgcccatgtggaatcagcttccggccagatgaagcgaaatcggggcgaggaaattgactttgaaacccccgggtccatattagtaaacaccaacctaagagcactgataaattcacgaacctttcacgcactgccatctcacttccagcagcagctattgtttctcttacctgaagtcgacaggcaggtcggtaccgatggattactacgcttgagttcctcggcactgaataatgaatttttcacccacgccgcccaatcctggcgtgagcgactcgcggacggagagttcactcacgagatgcaagtgcgcataaggcaggaaatggagaaagagaagaaggtggagcagtggaaggaaaagttttttgaagactattacggtcagaaactgggcctcacgaaagaagagagcttacaacagaacgtgggccaggaagaggccgaaatcaaaagcggattgtgcgtgccaggagagtcagtaaggatccagcgcggaccggccacgagacagcgcgacgggcatttcaaaaagaggagccgacccgatctgaggactcgagcacgaagaaatctttataagaagcaggagtccgagcaggccggggtggccaaagacgccaaatccgtagcctctgatgtgcctttgtataaagacggcgaggcaaaaaccgatcccgccggactgtcctctcctcacctgcccggtacatccagcgcagctcccgatctggaggggccggagtttcccgtggaatccgtggcttcgcggatacaggccgagcccgataatctggcccgggcgtcggcctcgccggacagaatccccagcctgccccaggagaccgtggaccaggaaccaaaggatcagaagcggaaatctttcgagcaggctgcctccgcaagttttcccgagaaaaagccaagactagaagaccggcaatcatttcgaaacactatcgagtcagtacacactgagaaacctcagcccactaaagaggaacctaaagtgcccccaattcggattcagctgtccaggattaaaccgccatgggtcgtcaagggccagccaacctaccaaatttgccctaggataatacccactacggagtcatcatgccgaggctggaccggcgcaaggactctggccgacattaaagcacgtgctttacaggttaggggcgctagaggccaccattgccacagggaagccacagacgaaggaggcgggcgtgggtcctcctctggggacggcggggaggcctgcgggcatccggagcccagaggcggacccagcacacctggcaagtgcacaagcgacttgcagcggacccaacttttaccgccctatccgctaaacggcgaacacacccaggccggaactgccatgagccgggctcggcgtgaggacctcccgtctctcagaaaagaggagtcttgccttctccaaagagctaccgtgggccttaccgatggtttgggcgatgcgtcccagctccctgtggcccctaccggcgatcagccctgtcaggccctgccgcttcttagctcacagactagcgtagcagagaggttagtggagcagccgcaattacaccccgacgtaagaaccgagtgcgaaagcgggacaacttcttgggagagcgatgatgaagagcagggtccgacagtccccgcagataacggaccaatcctgtcactcgtcggggatgatacgttggagaagggcactgggcaggctttggattctcaccccactatgaaagacccagtaaacgtcacaccgtcaagtacccctgagtccagcccgaccgattgcctccagaatagagccttcgatgatgaactgggcctgggggggtcttgcccaccaatgagagagtctgacactaggcaggagaacctgaagacgaaggctcttgtttcaaacagctccctgcattggatcccaattccctccaacgatgaggtggtaaagcaaccaaaaccggaatctcgggagcacataccatctgtggagccccaggtcggtgaagagtgggagaaagccgctccgactcctccagctctgcctggcgatttaaccgcagaagagggactggaccctttggattcgcttacatccctgtggactgtgccaagcagagggggctccgacagcaacggatcatactgccagcaagtggacatcgagaagctgaaaatcaacggagattccgaggcactgtcaccccatggtgagtctacggacaccgcatccgatttcgaagggcatctaaccgaagattccagcgaggcagacacacgagaggcagcggtaacaaaagggagctctgtcgataaagatgaaaaacctaattggaaccagtcagctccgctgtccaaagtgaatggagacatgcgtctggtaacccgcactgacgggatggtggccccacagagttgggtgtcaagggtatgcgcggttcggcagaaaatcccagatagtttgctgctggcctcaactgaataccagccccgtgcagtctgtctgtctatgccaggaagtagcgttgaggcgacaaacccgttagtaatgcagctgcttcagggctcactgcctttggagaaggtgcttccacccgctcatgacgattctatgagcgaaagcccccaagtacctttaacaaaagaccagagccatggatctctgagaatgggctctctgcacgggctgggtaagaactcaggcatggtggatgggagttccccctcctccctgcgcgccctgaaggagcctctgcttcccgattcatgcgaaacaggcaccgggctggcgcgtatcgaggcaacccaagctcctggtgctccccaaaagaactgtaaggccgtacccagctttgattccctgcacccagtgactaaccccattacctcatctcgtaagcttgaagaaatggattccaaagagcagtttagttcattcagctgtgaggaccagaaggaggtcagagcgatgagtcaggactctaactcgaacgctgccccagggaagagccccggcgacctgactacctcacggacgccaagattctcctcccctaacgttattagcttcggacctgagcagaccggccgagctctcggcgatcaatctaacgtcacaggacaagggaagaagctgttcggcagtggaaatgtggcagcgactctgcagcgtccccgacccgccgatcccatgcctcttccggccgaaattccccccgtgtttccctcaggcaagcttgggccctccacgaatagtatgagcggcggagtgcagacccccagggaagattgggcccccaaaccccatgctttcgtaggaagtgtcaagaacgagaaaacattcgttggaggaccgctgaaggctaacgccgagaatcgcaaggccacgggccattcaccgttggagcttgtgggccatctggaagggatgccctttgtaatggatctccctttctggaagctcccccgtgaaccaggcaagggcctatccgagccactggaacccagctcactgccctcccaactgtctatcaagcaggctttctatggcaagctgagcaagctgcagctgagtagcacctcctttaattactctagcagtagccctacattcccgaagggtttggcaggcagcgtggtgcagctttctcacaaggcaaactttggtgcttctcactctgcctccttatcactccagatgttcacggatagttcaactgtggagagtatttcactgcagtgtgcctgcagtctgaaggcaatgatcatgtgtcagggatgtggagccttctgccacgatgattgtatcgggcctagcaaattgtgtgtgctttgcctggtggtgcggtag

SEQ ID NO: 295403 - DNA, 4389 bp, Artificial Sequence
  derived and/or modified sequence
atgctgtccttccccaacctgaaccaggtgctggagaactacagtgatgcccccatgacccccaagcagatcctgcaggtgattgaggccgagggcctgaaggagatgagcagcggcaccagccccctggcctgcctgaatgccatgctgcacagcaacagccggggcggggagggcctcttctacaagctgcccggccgcatcagcctcttcaccctgaagaaggatgccctgcagtggagccgccacccagccaccgtggagggggaggagcctgaggacacagcagatgtggagagctgtggcagcaatgaggccagcacagtgtctggagaaaatgatgtgtccctggatgagaccagcagcaatgccagctgcagcacagagagccagagccggcccctgagcaacccccgggacagctaccgggccagcagccaggccaacaagcagaagaagaagacaggagtgatgctgccccgggtggtgctgacccccctgaaggtgaatggagcccacgtggagagcgccagcggccagatgaagaggaacagaggagaggagattgactttgagaccccaggcagcatcctggtgaacaccaacctgcgggccctgatcaacagcaggaccttccacgccctgcccagccacttccagcagcagctgctcttcctgctgcctgaggtggaccggcaggtgggcacagatggcctgctgcggctgagcagcagcgccctgaacaatgagttcttcacccatgctgcccagagctggagggagcggctggctgatggagagttcacccatgagatgcaggtgcgcatccggcaggagatggagaaggagaagaaggtggagcagtggaaggagaagttctttgaggactactacggccagaagctgggcctgaccaaggaggagagcctgcagcagaatgtgggccaggaggaggccgagatcaagagcggcctgtgtgtgcctggagagagcgtgcgcatccagaggggccctgccacccggcagagagatggccacttcaagaagaggagcaggccagacctgcggacccgggcccggaggaacctgtacaagaagcaggagagcgagcaggccggcgtggccaaggatgccaagtctgtggccagtgatgtgcccctgtacaaggatggagaggccaagacagatcctgctggcctgagcagcccccacctgcccggcaccagcagcgctgccccagacctggagggccctgagttccctgtggagagcgtggccagccgcatccaggccgagccagacaacctggcccgggccagcgccagcccagaccgcatccccagcctgccccaggagaccgtggaccaggagcccaaggaccagaagaggaagagctttgagcaggccgccagcgccagcttccctgagaagaagccccggctggaggaccggcagagcttcaggaacaccattgaatctgtgcacacagagaagccccagcccaccaaggaggagcccaaggtgccccccatccgcatccagctgagccgcatcaagccaccctgggtggtgaagggccagcccacctaccagatctgcccccgcatcatccccaccacagagagcagctgccggggctggacaggagcccggaccctggccgacatcaaggcccgggccctgcaggtgcggggggcccggggccaccactgccaccgggaggccacagatgaaggaggcggccggggcagcagcagtggagatggaggagaggcctgtggccaccctgagccccggggcggccccagcaccccaggcaagtgcaccagtgacctgcagaggacccagctgctgcccccctaccccctgaatggagagcacacccaggccggcacagccatgagccgggcccggcgggaggacctgcccagcctgaggaaggaggagagctgcctgctgcagagggccaccgtgggcctgacagatggcctgggagatgccagccagctgcctgtggcccccactggagaccagccctgccaggccctgcccctgctgagcagccagacctctgtggccgagcggctggtggagcagccccagctgcacccagatgtgaggacagaatgtgagagcggcaccacctcctgggagagtgatgatgaggagcagggccccaccgtgcctgctgacaatggccccatcctgagcctggtgggagatgacaccctggagaagggcaccggccaggccctggacagccaccccaccatgaaggaccctgtgaatgtgacccccagcagcaccccagagagcagccccacagactgcctgcagaacagagcctttgatgatgagctgggcctgggcggcagctgcccccccatgagggagagtgacacccggcaggagaacctgaagaccaaggccctggtgagcaacagcagcctgcactggatccccatccccagcaatgatgaggtggtgaagcagcccaagccagagagccgggagcacatccccagcgtggagccccaggtgggggaggagtgggagaaggccgcccccaccccaccagccctgcccggggacctgacagctgaggagggcctggaccccctggacagcctgaccagcctgtggacagtgcccagcagaggaggcagtgacagcaatggcagctactgccagcaggtggacatcgagaagctgaagatcaatggagacagcgaggccctgagcccccacggggagagcacagacacagccagtgactttgagggccacctgacagaggacagcagcgaggccgacacccgggaggccgctgtgaccaagggcagctctgtggacaaggatgagaagcccaactggaaccagagcgcccccctgagcaaggtgaatggagacatgaggctggtgaccaggacagatggcatggtggccccccagagctgggtgtcccgggtgtgtgctgtgcggcagaagatcccagacagcctgctgctggccagcacagagtaccagcccagggctgtgtgcctgtccatgcctggcagctctgtggaggccaccaaccccctggtgatgcagctgctgcagggcagcctgcccctggagaaggtgctgcccccagcccatgatgacagcatgtctgagagcccccaggtgcccctgaccaaggaccagagccacggcagcctgaggatgggcagcctgcacggcctgggcaagaacagcggcatggtggatggcagcagccccagcagcctgcgggccctgaaggagcccctgctgcctgacagctgtgaaacaggaacaggcctggcccgcatcgaggccacccaggcccctggggccccccagaagaactgcaaggctgtgcccagctttgacagcctgcaccctgtgaccaaccccatcaccagcagcaggaagctggaggagatggacagcaaggagcagttcagcagcttcagctgtgaggaccagaaggaggtgcgggccatgagccaggacagcaacagcaatgctgcccctgggaagagccctggggacctgaccaccagcaggaccccccgcttcagcagccccaacgtcatcagctttggacctgagcagacaggccgggccctgggggaccagagcaatgtgacaggccagggcaagaagctgtttggcagcggaaatgtggccgccaccctgcagaggcccaggcctgctgaccccatgcccctgcctgctgagatcccccctgtgttccccagcggcaagctgggccccagcaccaacagcatgtctggaggagtgcagaccccccgggaggactgggcccccaagccccacgcctttgtgggctctgtgaagaatgagaagacctttgtgggcggccccctgaaggccaatgctgagaacaggaaggccaccggccacagccccctggagctggtgggccacctggagggcatgccctttgtgatggacctgcccttctggaagctgccccgggagcccgggaagggcctgtctgagcccctggagcccagcagcctgcccagccagctgagcatcaagcaggccttctacggcaagctgagcaagctgcagctgagcagcaccagcttcaactacagcagcagcagccccaccttccccaagggcctggccggctctgtggtgcagctgagccacaaggccaactttggagccagccacagcgccagcctgagcctgcagatgttcacagacagcagcacagtggagagcatcagcctgcagtgtgcctgcagcctgaaggccatgatcatgtgccagggctgtggggccttctgccatgatgactgcatcggccccagcaagctgtgtgtgctgtgcctggtggtgaggtag

SEQ ID NO: 295404 - DNA, 4389 bp, Artificial Sequence
  derived and/or modified sequence
atgctgagcttccccaacctgaaccaggtgctggagaactacagcgacgcccccatgactccaaagcagatactccaggtcattgaggcggaaggtctgaaggaaatgtcttcagggacctccccactggcgtgtctgaatgccatgctgcattcgaactccagagggggtgaaggcctgttttataagctgcctggccgcatcagtctgttcacgctcaagaaggatgctctgcagtggtcccgacacccagccactgttgaaggagaggaacctgaggataccgctgacgttgagtcttgcggtagcaatgaagcctctacagtttcgggtgaaaacgatgttagtctcgacgaaaccagcagcaatgcttcttgcagcactgaaagccagtccagaccactgtccaacccacgcgactcctacagagcatcgagccaggccaacaagcagaagaaaaagactggcgttatgcttccgcgagtcgtactcacaccactcaaagtgaatggcgcgcatgtggagtcggcctctggacagatgaaaagaaatcggggggaggaaattgattttgagacacccgggtcaattttggttaacactaacctcagggccctcatcaactcaaggacttttcacgcactgcctagccatttccagcagcagttgctgttcctacttcctgaggttgacaggcaagtgggaaccgacggccttctcaggctaagcagttctgctcttaacaatgaattcttcacccacgcagcgcaatcatggagagaaaggcttgccgacggggaatttactcacgaaatgcaagtccggattcgacaggaaatggaaaaagagaagaaggtggagcagtggaaagaaaaattcttcgaggattattatggtcagaaactgggactcactaaagaggagtctttgcagcagaacgtcgggcaggaagaggccgagataaagtctggattgtgtgtgcccggagagagtgtccggattcagcgggggcccgccactaggcagagggatgggcacttcaagaaacgcagccgccccgatctgcgcacaagagcgaggcgaaacctgtacaagaagcaggagagcgagcaagctggggtcgcgaaggatgcgaagagcgtcgcctccgacgtgcccctctacaaggacggagaagccaagactgacccagccgggctgtcttctccacacttgcccggcacatccagcgcagctcccgatctcgagggtcctgagttcccagtcgagagtgtggcatccaggatacaagccgaacccgataatcttgcaagggccagcgcctcccctgatagaatcccatcccttccacaagagaccgtggatcaggagcctaaggaccagaagcgaaagagttttgagcaggcagcgtcagctagcttccccgagaagaagccaagactggaggaccgccaatcattccggaataccattgaatcagttcacacggaaaagccacagcccaccaaggaagagcccaaagtgccacccattcgcattcagctgagccgcatcaagcctccttgggtggtcaagggacagcctacttatcagatttgtccgcgtataattcctactaccgagtcttcttgtcggggctggaccggggctaggactctggctgatataaaggcgcgcgctctccaggtacggggagctagaggccatcattgtcatagggaagcaactgacgaagggggtggacgcggatcttcttctggggacggaggtgaggcctgcggccaccccgagccccgcggcggtccatctactcccggcaagtgtacctctgacctacagcggacacagttgctccccccctatcctctcaatggggaacatacgcaggccggaacagcgatgtcccgcgcgcgcagagaggatctgcccagcttacggaaggaagaaagttgtctcctgcagagggctaccgtcggcctgaccgatggcctgggcgatgccagccaactgccagtggcacctacgggggaccagccctgtcaggccctgcccctcttatccagtcagactagcgttgcagaacgcctggtcgaacagccacagctgcacccagatgtgaggacagagtgtgaaagcggaaccaccagttgggagtctgacgatgaagaacagggacctaccgtgcctgccgataatgggcccattctatctctcgtgggggatgacaccctcgagaaggggacaggccaggctctggacagtcacccgaccatgaaagatcctgtcaatgtgacccctagtagtacccccgaaagcagtcccacagactgtctgcagaatagggctttcgacgacgagctgggcctcggcggcagctgcccccccatgcgcgagtcagacactagacaggaaaacctgaagacgaaggccctggtatcgaacagcagtctccactggattccaataccctctaacgatgaggtcgtaaaacaaccaaaaccggaaagcagggaacatattcctagcgtcgagccacaagtgggcgaggagtgggagaaagccgcacccacgccaccagccctgccaggcgacctcaccgcagaagaaggtctggatccccttgactccttgacatctctctggacagtaccttcaaggggtggcagcgattccaacgggtcgtattgccagcaagtcgacatcgagaaattgaagatcaatggcgattctgaggccctcagccctcatggggagagtacggatactgcatctgactttgaaggccaccttacggaagattcaagcgaggcagacacccgcgaggccgctgtgactaaaggatcaagcgtagacaaggatgagaaaccgaactggaatcaatccgccccactcagcaaagtgaacggggacatgagactggttaccaggaccgatggcatggtggcccctcagtcatgggtgtcacgtgtttgtgccgtgaggcagaagattcccgatagtctgctgctggcctctaccgagtatcaaccaagagcggtgtgtttaagcatgcccgggagcagcgtcgaggcgaccaatccactggtgatgcagttgctgcaagggagtctccccctggagaaagtcctgccaccagcccatgacgattctatgtctgagtcacctcaggtccccctaacaaaagaccagtcacacggcagtctgagaatgggatcactgcacggcctcggaaaaaacagtgggatggttgacggctcctcaccctcaagcttgcgcgccctgaaagagcccctacttcctgactcctgcgaaacagggactggcctcgcacggatcgaggccacccaggcaccgggtgcccctcagaagaattgcaaagcggtcccatcgttcgatagcctgcatcctgtcaccaatccaataaccagtagtcggaaactggaggaaatggattccaaggagcagttcagcagcttctcctgcgaggatcagaaggaagtacgggccatgagccaagacagtaattccaatgcggcccctggtaagagtccgggtgatctgacgacctcccggaccccccggttttcttctccgaacgtgatcagcttcggacccgagcagacagggcgggccctgggagatcagagcaatgtcacgggccagggtaaaaagctgttcggcagcggtaatgtggcagccactctccaacgaccgagaccagccgacccaatgccactgcctgctgaaattccgcctgtgttcccatccggcaaactgggtcctagcaccaacagcatgtccggcggggtgcaaacaccgcgggaggattgggcaccgaagccgcacgcttttgtggggagcgtgaaaaatgagaagaccttcgtcggtgggcctctgaaggccaatgcggaaaacagaaaggcaactgggcatagtcctctcgagctcgttggccaccttgaaggcatgccattcgtgatggaccttcctttttggaagttgccccgggaacccgggaagggcctatccgagcccttggaacctagtagtcttccctcacagctctccattaaacaagccttttatggcaagctctccaagctgcagttgagctccaccagcttcaactattcttcctcctccccaacctttcctaagggcttagcgggcagtgtcgtgcagctgtcccacaaggctaacttcggagcctcccattctgcttccctttccctgcagatgttcacggactcttccaccgtcgagtcaatatcccttcagtgcgcatgcagtctgaaggcgatgataatgtgccagggctgcggggctttttgccacgacgattgtatcggaccttcaaagctgtgtgtcctttgccttgtggttcgctag

SEQ ID NO: 295405 - DNA, 4389 bp, Artificial Sequence
  derived and/or modified sequence
atgctgtcttttccaaatctcaatcaggtgttagaaaattattcggatgcacccatgacacctaagcagatactgcaggtcatcgaggcagagggcctgaaggaaatgtcttctgggacttccccgctggcatgcctcaatgccatgttacactccaattctcgtggcggagagggacttttctacaagttacccggtagaatctccctgtttacgctcaagaaagacgccctgcaatggtcgcgacatcccgcaaccgtggagggagaagaaccagaagacaccgcagatgttgaaagttgcggttcaaatgaggcctctacagtcagtggcgagaatgatgtttccttggacgagaccagttccaacgcttcatgttccacagaatctcaatcccgccctctctcaaaccctcgggactcttaccgcgcaagttcgcaggctaacaaacaaaagaagaagaccggtgtgatgctgcccagagtcgtcctgacccccctgaaagtgaatggggctcacgtggagagcgctagtgggcagatgaaaaggaatcgtggagaggagatagacttcgagacccccggttctatccttgtcaatactaatctcagagcactaattaactccagaacatttcacgccctgccgtctcactttcaacagcagctgttgtttctcctgcctgaggtagaccgacaggtcgggactgacggcttactgcgattatcctctagcgcccttaataacgaattcttcacccacgcagcccagtcctggcgcgaaaggctggcggacggcgagttcactcacgaaatgcaggtccggattcgccaggagatggagaaggagaaaaaggttgaacaatggaaggagaagttctttgaggactactatggccagaaacttggcttgaccaaggaggaaagtctgcagcaaaacgtagggcaggaagaggcagaaatcaagtctggtctctgcgttccgggagagtccgtgcgaatccagcggggacccgcaactagacagcgtgacgggcatttcaagaagaggagccgaccagacctaaggaccagagctaggagaaacttgtataagaagcaggaatccgagcaggccggagtggcaaaggatgctaaaagcgtggccagcgacgtgccactgtacaaggatggagaggctaaaaccgatcctgccggacttagttctccccatcttcctggaacctcgtctgccgcacctgacctcgaaggtccggagttccccgtggagtctgtggcctcacggatccaagccgaacctgacaatctggcaagggctagtgcctctcctgatagaataccctcactaccccaggagactgtggaccaagagccaaaagaccaaaagcgcaagtccttcgagcaggcagcatctgcatcatttccagagaaaaaaccacgcctggaggacagacagagtttcagaaacacaatcgagtcggttcacactgaaaaaccccagcccacgaaggaagagcctaaggtcccacctatcagaatccagctttcccgtattaaaccaccctgggtggtgaaaggccagccaacctaccagatctgcccccgaatcatcccgactactgaaagctcatgccgcggatggactggcgctaggacactcgcagacataaaggcacgcgcacttcaggtgaggggcgctcgcggtcaccactgtcaccgtgaggcaacagatgaaggagggggacgcggaagctccagtggcgatggcggagaggcctgcggacaccctgagccacggggaggaccttccactccaggaaagtgtaccagtgatcttcagaggacccagctcctgccgccataccccctgaacggagaacatacacaggccggaacggccatgagcagggccagacgcgaagatctcccctcactccgtaaagaagagtcatgcttgttgcaaagagccaccgtggggctgactgacggattgggggacgctagtcagctgcctgtggctcccaccggggaccaaccatgtcaggcccttcctttgctcagctcacaaacttctgtcgccgagcgcctggtcgaacagccccagctacatccagacgtccgaaccgaatgcgagtctggtaccacatcctgggaatccgatgacgaggaacagggccctaccgtacccgctgataacggacccatcctaagcttagtcggagacgacacgctggagaagggtaccgggcaggcactggattctcaccctacaatgaaagatccagtgaacgtgacaccgtctagcacgccggagtcaagtcctaccgattgcttacagaatcgagcatttgatgatgaactcggactgggtggctcctgtcctccgatgcgggagtcagacactaggcaggagaatctcaagactaaagccctggtgtcgaactcttctctgcactggattccaatcccttccaacgacgaagtggtcaaacaacctaagcccgaaagccgcgaacatatcccctccgtggagccccaggtgggggaagaatgggaaaaggccgcacccacaccacctgctctccctggagaccttaccgcagaagagggactggatcccctggactcactgacttccctctggacagtcccctcaagggggggatccgatagcaacggtagctattgtcaacaggtagacattgagaagctgaaaatcaacggggactcggaagcactcagtccacatggggagtcaactgacaccgcctctgattttgaaggacacctgaccgaggactcctccgaagctgacacacgcgaagcagctgtaacgaaggggagctccgttgacaaggacgaaaagccaaactggaaccagagcgcacctctttcaaaggtaaacggggatatgcgcctggtgacccggaccgatggcatggtagcaccccagagctgggtctccagagtttgcgcagtgcgtcagaaaattcctgattccctgctattagcttccaccgaataccagccacgagccgtgtgtctgtccatgccaggatcttctgtagaagccacgaaccctttggttatgcagctcctgcagggaagtctcccactcgagaaggtgctgcctccggcacatgatgatagtatgagcgaatcccctcaggttccactgactaaggatcaatctcatggcagcctccgtatggggtctctgcatggcctgggaaagaactccggaatggtggatggaagcagtccctcatccctccgagcacttaaggaacccctgctacccgattcttgcgaaacaggaactggcctggctcggatcgaagctacacaggcaccaggagctccccagaagaattgcaaggccgttccgagctttgactctctccaccccgttaccaaccccattacatcttcgcgaaaattagaagagatggacagtaaagaacagttctcctcgttcagttgtgaagatcaaaaggaggtccgtgccatgagccaagattccaactcaaatgcggctccaggaaaatcaccgggtgatctgacaacaagtaggacgccccgattcagtagtcctaatgtgataagcttcgggccagagcagaccggcagagctctgggtgatcagtcgaacgttaccggtcagggcaaaaaactctttggcagcgggaatgtagcggctactctgcagcgtcccaggccggcagacccgatgccactgcccgctgagatccccccagttttcccctccgggaaactcggaccttctaccaatagcatgtccggcggtgtccagactccgagagaagactgggctcccaagcctcatgccttcgtcggtagcgtaaagaatgaaaaaacattcgtcgggggacctttgaaagcaaatgccgaaaacagaaaggcaactggtcatagcccccttgagctggttggacacctggagggcatgcctttcgttatggatctccccttctggaaattaccacgggagccaggaaaagggctaagtgaaccactggagccttcgtcgctgccgagccagctctcaatcaagcaggccttctacggcaaattgagcaagctgcagctatcaagtacctccttcaattactctagttcttcacccacttttcccaagggacttgccggaagtgttgtccagcttagccacaaagcaaacttcggagctagccactcagcttccctgtctctacagatgtttaccgacagttcaacagtggaatcaatcagtctccaatgcgcctgcagcctgaaagccatgatcatgtgtcaggggtgcggagccttctgccatgatgattgtatcggacctagcaagctgtgtgttctctgtctcgtggtgaggtag

SEQ ID NO: 295406 - DNA, 4389 bp, Artificial Sequence
  derived and/or modified sequence
atgctgagcttccccaacctgaaccaggtgctggagaactacagcgacgcccccatgacccccaagcagatcctgcaggtgatcgaggccgagggcctgaaggagatgagcagcggcaccagccccctggcctgcctgaacgccatgctgcacagcaacagcagaggcggcgagggcctgttctacaagctgcccggcagaatcagcctgttcaccctgaagaaggacgccctgcagtggagcagacaccccgccaccgtggagggcgaggagcccgaggacaccgccgacgtggagagctgcggcagcaacgaggccagcaccgtgagcggcgagaacgacgtgagcctggacgagaccagcagcaacgccagctgcagcaccgagagccagagcagacccctgagcaaccccagagacagctacagagccagcagccaggccaacaagcagaagaagaagaccggcgtgatgctgcccagagtggtgctgacccccctgaaggtgaacggcgcccacgtggagagcgccagcggccagatgaagagaaacagaggcgaggagatcgacttcgagacccccggcagcatcctggtgaacaccaacctgagagccctgatcaacagcagaaccttccacgccctgcccagccacttccagcagcagctgctgttcctgctgcccgaggtggacagacaggtgggcaccgacggcctgctgagactgagcagcagcgccctgaacaacgagttcttcacccacgccgcccagagctggagagagagactggccgacggcgagttcacccacgagatgcaggtgagaatcagacaggagatggagaaggagaagaaggtggagcagtggaaggagaagttcttcgaggactactacggccagaagctgggcctgaccaaggaggagagcctgcagcagaacgtgggccaggaggaggccgagatcaagagcggcctgtgcgtgcccggcgagagcgtgagaatccagagaggccccgccaccagacagagagacggccacttcaagaagagaagcagacccgacctgagaaccagagccagaagaaacctgtacaagaagcaggagagcgagcaggccggcgtggccaaggacgccaagagcgtggccagcgacgtgcccctgtacaaggacggcgaggccaagaccgaccccgccggcctgagcagcccccacctgcccggcaccagcagcgccgcccccgacctggagggccccgagttccccgtggagagcgtggccagcagaatccaggccgagcccgacaacctggccagagccagcgccagccccgacagaatccccagcctgccccaggagaccgtggaccaggagcccaaggaccagaagagaaagagcttcgagcaggccgccagcgccagcttccccgagaagaagcccagactggaggacagacagagcttcagaaacaccatcgagagcgtgcacaccgagaagccccagcccaccaaggaggagcccaaggtgccccccatcagaatccagctgagcagaatcaagcccccctgggtggtgaagggccagcccacctaccagatctgccccagaatcatccccaccaccgagagcagctgcagaggctggaccggcgccagaaccctggccgacatcaaggccagagccctgcaggtgagaggcgccagaggccaccactgccacagagaggccaccgacgagggcggcggcagaggcagcagcagcggcgacggcggcgaggcctgcggccaccccgagcccagaggcggccccagcacccccggcaagtgcaccagcgacctgcagagaacccagctgctgcccccctaccccctgaacggcgagcacacccaggccggcaccgccatgagcagagccagaagagaggacctgcccagcctgagaaaggaggagagctgcctgctgcagagagccaccgtgggcctgaccgacggcctgggcgacgccagccagctgcccgtggcccccaccggcgaccagccctgccaggccctgcccctgctgagcagccagaccagcgtggccgagagactggtggagcagccccagctgcaccccgacgtgagaaccgagtgcgagagcggcaccaccagctgggagagcgacgacgaggagcagggccccaccgtgcccgccgacaacggccccatcctgagcctggtgggcgacgacaccctggagaagggcaccggccaggccctggacagccaccccaccatgaaggaccccgtgaacgtgacccccagcagcacccccgagagcagccccaccgactgcctgcagaacagagccttcgacgacgagctgggcctgggcggcagctgcccccccatgagagagagcgacaccagacaggagaacctgaagaccaaggccctggtgagcaacagcagcctgcactggatccccatccccagcaacgacgaggtggtgaagcagcccaagcccgagagcagagagcacatccccagcgtggagccccaggtgggcgaggagtgggagaaggccgcccccaccccccccgccctgcccggcgacctgaccgccgaggagggcctggaccccctggacagcctgaccagcctgtggaccgtgcccagcagaggcggcagcgacagcaacggcagctactgccagcaggtggacatcgagaagctgaagatcaacggcgacagcgaggccctgagcccccacggcgagagcaccgacaccgccagcgacttcgagggccacctgaccgaggacagcagcgaggccgacaccagagaggccgccgtgaccaagggcagcagcgtggacaaggacgagaagcccaactggaaccagagcgcccccctgagcaaggtgaacggcgacatgagactggtgaccagaaccgacggcatggtggccccccagagctgggtgagcagagtgtgcgccgtgagacagaagatccccgacagcctgctgctggccagcaccgagtaccagcccagagccgtgtgcctgagcatgcccggcagcagcgtggaggccaccaaccccctggtgatgcagctgctgcagggcagcctgcccctggagaaggtgctgccccccgcccacgacgacagcatgagcgagagcccccaggtgcccctgaccaaggaccagagccacggcagcctgagaatgggcagcctgcacggcctgggcaagaacagcggcatggtggacggcagcagccccagcagcctgagagccctgaaggagcccctgctgcccgacagctgcgagaccggcaccggcctggccagaatcgaggccacccaggcccccggcgccccccagaagaactgcaaggccgtgcccagcttcgacagcctgcaccccgtgaccaaccccatcaccagcagcagaaagctggaggagatggacagcaaggagcagttcagcagcttcagctgcgaggaccagaaggaggtgagagccatgagccaggacagcaacagcaacgccgcccccggcaagagccccggcgacctgaccaccagcagaacccccagattcagcagccccaacgtgatcagcttcggccccgagcagaccggcagagccctgggcgaccagagcaacgtgaccggccagggcaagaagctgttcggcagcggcaacgtggccgccaccctgcagagacccagacccgccgaccccatgcccctgcccgccgagatcccccccgtgttccccagcggcaagctgggccccagcaccaacagcatgagcggcggcgtgcagacccccagagaggactgggcccccaagccccacgccttcgtgggcagcgtgaagaacgagaagaccttcgtgggcggccccctgaaggccaacgccgagaacagaaaggccaccggccacagccccctggagctggtgggccacctggagggcatgcccttcgtgatggacctgcccttctggaagctgcccagagagcccggcaagggcctgagcgagcccctggagcccagcagcctgcccagccagctgagcatcaagcaggccttctacggcaagctgagcaagctgcagctgagcagcaccagcttcaactacagcagcagcagccccaccttccccaagggcctggccggcagcgtggtgcagctgagccacaaggccaacttcggcgccagccacagcgccagcctgagcctgcagatgttcaccgacagcagcaccgtggagagcatcagcctgcagtgcgcctgcagcctgaaggccatgatcatgtgccagggctgcggcgccttctgccacgacgactgcatcggccccagcaagctgtgcgtgctgtgcctggtggtgagatag

SEQ ID NO: 295407 - DNA, 175 bp, Artificial Sequence
  derived and/or modified sequence
atcaggtgtgggtttcctcccccagccctggataaggatgagggaatgtctttaagcttggctgaagaggaaataaaaacagaacaggaggtggtagagggcatggatatctctactcgctccaaagatcctggctctgcagagagaacagcccagaaaagaaagttccccagcc

SEQ ID NO: 295408 - protein, 615 aa, Artificial Sequence
  derived and/or modified sequence
MVQKSRNGGVYPGPSGEKKLKVGFVGLDPGAPDSTRDGALLIAGSEAPKRGSILSKPRAGGAGAGKPPKRNAFYRKLQNFLYNVLERPRGWAFIYHAYVFLLVFSCLVLSVFSTIKEYEKSSEGALYILEIVTIVVFGVEYFVRIWAAGCCCRYRGWRGRLKFARKPFCVIDIMVLIASIAVLAAGSQGNVFATSALRSLRFLQILRMIRMDRRGGTWKLLGSVVYAHSKELVTAWYIGFLCLILASFLVYLAEKGENDHFDTYADALWWGLITLTTIGYGDKYPQTWNGRLLAATFTLIGVSFFALPAGILGSGFALKVQEQHRQKHFEKRRNPAAGLIQSAWRFYATNLSRTDLHSTWQYYERTVTVPMYRLIPPLNQLELLRNLKSKSGLAFRKDPPPEPSPSQKVSLKDRVFSSPRGVAAKGKGSPQAQTVRRSPSADQSLEDSPSKVPKSWSFGDRSRARQAFRIKGAASRQNSEEASLPGEDIVDDKSCPCEFVTEDLTPGLKVSIRAVCVMRFLVSKRKFKESLRPYDVMDVIEQYSAGHLDMLSRIKSLQSRQEPRLPVQQGTRTGWASGTKPTVAHGGSAGGVWAGPPPHPRRPLSASVVSSQSLF

SEQ ID NO: 295409 - DNA, 1848 bp, Artificial Sequence
  derived and/or modified sequence
atggtccagaagtctcggaatggcggcgtctaccctgggccgtccggggaaaagaagctcaaagtgggcttcgtgggtctcgaccccggagccccagattctacccgggacggtgccctcctcatcgctggctcagaggcgccgaagcgcggatctatcctgagcaaaccccgtgccggaggcgcaggcgccgggaaaccacctaagaggaatgcattctaccggaagctgcagaattttctgtataacgtgctagaacggccacggggttgggcctttatttatcacgcttacgtcttcctcctggtcttcagctgcctggtgctgtctgtcttcagcacgattaaggaatatgaaaagtcttctgagggcgcgttatatatcttagagatcgtgacaattgtggtgtttggggtcgaatattttgtgcggatctgggcagctgggtgttgctgcagatacagaggttggaggggtcggctgaagtttgctagaaaacctttctgcgtgattgacatcatggttctgatagcttctatcgcagtgttggcggccggttcccagggaaacgtctttgcaaccagtgctcttcgctctcttaggttcctgcaaatactccggatgatccgaatggaccgtaggggcggcacctggaaattactggggtcagtggtgtacgcacattccaaggagctagttaccgcatggtacatcgggttcctgtgtctgatcctggccagctttcttgtgtacctggccgagaagggggagaacgaccattttgacacctacgctgatgcattgtggtgggggctgattaccctgacaacgatcggctatggggataaatatccgcagacatggaacggccggcttctggccgcgacttttacgttgatcggggttagctttttcgcactccctgccggcatcctggggagtggatttgccctcaaagtacaagaacagcacagacagaagcatttcgagaagagacgaaacccagcagcagggctaattcagtccgcgtggcggttctatgctacgaatctgagtaggacggacctacacagtacatggcagtattacgagcggacagtgaccgtgccaatgtacagacttattcctcccctgaatcaattagaactactgcgcaaccttaaatcgaagtcagggctagcgttccgtaaggatcccccccctgagccttcaccgtcgcaaaaagtgtctctcaaggaccgcgtgttctcttctccccggggcgtagcggctaagggcaagggcagtcctcaggcacagacagtgaggcgctctccctctgctgaccagagcctcgaggactctcctagcaaagtgcccaagtcgtggagcttcggggaccgctctagagcccggcaggctttccggatcaaaggagctgcctcccgccaaaactcagaggaggcctctctgccgggcgaagacatcgtcgacgacaaatcctgtccatgcgagttcgtgaccgaggatctcacacctggcttgaaggtctctatcagagccgtgtgcgtaatgaggttcctcgtgtccaaaaggaagttcaaggaatccctacggccatatgacgtgatggacgtcattgaacagtatagcgccggccatttggacatgctctcccgcatcaagtccctgcaaagtaggcaggagccaaggctcccagttcagcagggaacccggactggatgggcatctggaacgaagccaactgtcgctcacggtggctccgctggcggagtatgggccgggccccctccacatccgcgcaggcccctcagtgcgagcgtggtctccagccaatccttattctag

SEQ ID NO: 295410 - DNA, 1848 bp, Artificial Sequence
  derived and/or modified sequence
atggtgcagaagagcagaaatggaggagtgtacccaggccccagcggggagaagaagctgaaggtgggctttgtgggcctggaccccggggccccagacagcaccagagatggagccctgctgattgctggcagcgaggcccccaagaggggcagcatcctgagcaagcccagggctggaggagctggggccggcaagccacccaagagaaatgccttctacaggaagctgcagaacttcctgtacaacgtgctggagcggccccggggctgggccttcatctaccacgcctacgtgttcctgctggtgttcagctgcctggtgctgagcgtcttcagcaccatcaaggagtatgagaagagcagcgagggcgccctgtacatcctggagatcgtgaccatcgtggtgtttggagtggagtactttgtgcgcatctgggccgccggctgctgctgccgctaccggggctggaggggccgcctgaagtttgccaggaagcccttctgtgtgattgacatcatggtgctgattgccagcattgctgtgctggccgccggcagccagggcaatgtgtttgccaccagcgccctgcggagcctgcgcttcctgcagatcctgaggatgatccgcatggacagaagaggaggcacctggaagctgctgggctctgtggtgtatgcccacagcaaggagctggtgacagcctggtacatcggcttcctgtgcctgatcctggccagcttcctggtgtacctggccgagaagggagaaaatgaccactttgacacctatgcagatgccctgtggtggggcctcatcaccctgaccaccatcggctacggggacaagtacccccagacctggaatggccgcctgctggccgccaccttcaccctcatcggcgtgtccttctttgccctgcctgctggcatcctgggcagcggctttgccctgaaggtgcaggagcagcaccggcagaagcactttgagaagagaagaaatcctgctgctggcctcatccagagcgcctggaggttctacgccaccaacctgagcaggacagacctgcacagcacctggcagtactatgaaagaacagtgacagtgcccatgtaccgcctcatcccccccctgaaccagctggagctgctgaggaacctgaagagcaagagcggcctggccttcaggaaggaccccccacctgagcccagccccagccagaaggtgtccctgaaggacagagtcttcagcagcccccggggcgtggccgccaagggcaagggcagcccccaggcccagacagtgcggcgcagccccagcgctgaccagagcctggaggacagccccagcaaggtgcccaagtcctggagctttggagacaggagccgggcccggcaggccttccgcatcaagggagctgccagccggcagaacagcgaggaggccagcctgcctggagaagatattgtggatgacaagagctgcccctgtgaatttgtgacagaggacctgaccccaggcctgaaggtgtccatccgggctgtgtgtgtgatgaggttcctggtgtccaagaggaagttcaaggagagcctgcggccctatgatgtgatggatgtgattgagcagtacagcgctggccacctggacatgctgagccgcatcaagagcctgcagagccggcaggagccccggctgcctgtgcagcagggcaccaggacaggctgggccagcggcaccaagcccaccgtggcccatggaggcagcgctggaggagtgtgggccggccccccaccccacccccggcggcccctgagcgcctctgtggtgagcagccagagcctcttctag

SEQ ID NO: 295411 - DNA, 1848 bp, Artificial Sequence
  derived and/or modified sequence
atggtgcagaagagccggaacggcggcgtgtaccccggccccagcggcgagaaaaagcttaaggtcggttttgtcggattggatccgggagcaccggactcaacaagggacggcgccctcctgattgccggcagcgaagccccaaagagggggagcattctaagcaagccgcgtgcgggcggtgcgggtgcaggcaaacctccaaagaggaacgcgttctacaggaagctgcagaacttcctgtataatgtgctggagagacccagaggatgggcatttatttatcacgcctacgttttcttgctggtcttctcctgcctcgtcctcagcgtcttctccactatcaaagaatacgaaaaatcatcagaaggtgcgctctacattttggagattgtcacaatcgtggtcttcggggtcgagtactttgtgaggatttgggccgcaggatgttgctgccggtacaggggttggaggggacgattaaaatttgcacgcaaaccgttttgcgtaattgacatcatggtgctgattgcatctatagccgtgctggccgcaggctcacagggcaatgtgtttgcaacttcagctcttaggtcactgaggtttctccagatcttgcgcatgattagaatggaccgccgaggcgggacctggaaacttctaggcagcgtggtgtacgcccacagcaaggaactcgtgacagcctggtacatcggttttctgtgtttgattttagccagctttctggtctacttggctgagaagggtgagaacgaccatttcgacacttacgcagatgccttatggtggggacttattaccctaacaactatcgggtatggcgacaagtatccccagacctggaacgggaggctgctggccgccaccttcaccctgatcggcgtttcgttctttgccttacccgctgggatccttggctcaggattcgcgctgaaggtacaggaacagcatagacagaaacattttgagaagagaagaaatccagccgctggcctgatacagtcagcttggcgcttttatgcgacaaaccttagtcgaactgacctgcacagcacctggcagtactatgagcggactgtgactgtaccgatgtatcgtctgattccccccctgaatcaattagaactgttgcgcaatcttaagtcaaaaagcggactggcctttcggaaggacccccctccggaaccaagcccttctcagaaagttagcctgaaagatagggtatttagtagcccgagaggcgttgccgccaaaggcaagggcagtccacaggcccagacagtaagaagaagtccctcagcagatcagtctctggaagacagtccatcgaaagtcccaaaatcctggtcctttggtgatcggtctagggctcggcaagcctttcggataaaaggagcagccagccgccagaactctgaggaggcctccctccccggggaagatatcgtggatgacaagagctgcccatgcgagttcgtgaccgaggatctgaccccagggctgaaggtctcaatcagagctgtctgtgtcatgaggtttctcgtatcaaagaggaagtttaaggaatctctaaggccatatgacgtcatggacgtgatcgagcaatattcagcaggccacctcgatatgctcagcagaattaagagccttcagagtcggcaggaaccacgcctgccagtacaacagggaactcggacaggctgggcttcaggtacaaaacctactgtggcccacggtggctctgctggaggtgtttgggctggcccacctccccaccccagacgcccactcagcgcatctgtggtctcctcccagtccttgttctag

SEQ ID NO: 295412 - DNA, 2325 bp, Artificial Sequence
  derived and/or modified sequence
cggagcgaggtggccgcagcgtctccgcgcgcggcccaagcccggcaggagtgcggaaccgccgcctcggccatgcggctcccggccggggggcctgggctggggcccgcgccgccccccgcgctccgcccccgctgagcctgagcccgacccggggcgcctcccgccaggcaccatggtgcagaagtcgcgcaacggcggcgtataccccggcccgagcggggagaagaagctgaaggtgggcttcgtggggctggaccccggcgcgcccgactccacccgggacggggcgctgctgatcgccggctccgaggcccccaagcgcggcagcatcctcagcaaacctcgcgcgggcggcgcgggcgccgggaagccccccaagcgcaacgccttctaccgcaagctgcagaatttcctctacaacgtgctggagcggccgcgcggctgggcgttcatctaccacgcctacgtgttcctcctggttttctcctgcctcgtgctgtctgtgttttccaccatcaaggagtatgagaagagctcggagggggccctctacatcctggaaatcgtgactatcgtggtgtttggcgtggagtacttcgtgcggatctgggccgcaggctgctgctgccggtaccgtggctggagggggcggctcaagtttgcccggaaaccgttctgtgtgattgacatcatggtgctcatcgcctccattgcggtgctggccgccggctcccagggcaacgtctttgccacatctgcgctccggagcctgcgcttcctgcagattctgcggatgatccgcatggaccggcggggaggcacctggaagctgctgggctctgtggtctatgcccacagcaaggagctggtcactgcctggtacatcggcttcctttgtctcatcctggcctcgttcctggtgtacttggcagagaagggggagaacgaccactttgacacctacgcggatgcactctggtggggcctgatcacgctgaccaccattggctacggggacaagtacccccagacctggaacggcaggctccttgcggcaaccttcaccctcatcggtgtctccttcttcgcgctgcctgcaggcatcttggggtctgggtttgccctgaaggttcaggagcagcacaggcagaagcactttgagaagaggcggaacccggcagcaggcctgatccagtcggcctggagattctacgccaccaacctctcgcgcacagacctgcactccacgtggcagtactacgagcgaacggtcaccgtgcccatgtacagacttatccccccgctgaaccagctggagctgctgaggaacctcaagagtaaatctggactcgctttcaggaaggaccccccgccggagccgtctccaagccagaaggtcagtttgaaagatcgtgtcttctccagcccccgaggcgtggctgccaaggggaaggggtccccgcaggcccagactgtgaggcggtcacccagcgccgaccagagcctcgaggacagccccagcaaggtgcccaagagctggagcttcggggaccgcagccgggcacgccaggctttccgcatcaagggtgccgcgtcacggcagaactcagaagaagcaagcctccccggagaggacattgtggatgacaagagctgcccctgcgagtttgtgaccgaggacctgaccccgggcctcaaagtcagcatcagagccgtgtgtgtcatgcggttcctggtgtccaagcggaagttcaaggagagcctgcggccctacgacgtgatggacgtcatcgagcagtactcagccggccacctggacatgctgtcccgaattaagagcctgcagtccaggcaagagccccgcctgcctgtccagcaggggacaagaacggggtgggcttctgggacaaagcccactgtggcccatggtgggagtgcagggggtgtgtgggcggggcctcctccccacccacgtcggcctctgtcagcttctgttgtgtcttcacaaagtctgttttaatatttctgctgtctctcccatctctcccccatccacaccgcggtgggcaagtgcgtgcacctgtgtgtgtgggtccctgaaaatgtgtgtgtgcatgtgtgtgtgtgtaagtcacgcatgcacacatgtatgcttctgcacaggtgtatgtgtgtggttgtatgcacgtgtggctctgctctgccatgtatgcacgtgtgtggggtgcatacatgtgtgtacacatgtgtgcatgtgtgttggggatggaataattctgttcagacatgaagctgcagggttcccgtgggccccaccaggca

SEQ ID NO: 295413 - DNA, 1848 bp, Artificial Sequence
  derived and/or modified sequence
atggtgcagaagagtcgaaacgggggagtttatccgggacctagtggcgagaaaaagctgaaggtgggcttcgtcggactggatcctggggcacccgactcaactcgggacggagccctccttatcgccggaagcgaggctcccaagagaggctcaatcctgtccaaacctcgtgcagggggtgccggagcgggtaaacctcccaaacgcaacgctttctacaggaaacttcagaatttcctctacaatgtgcttgagaggccaaggggatgggcctttatctatcatgcttacgtcttcttgttggtttttagttgcctagtgttgagtgtgttctcaacgataaaagaatatgaaaaatcctctgagggtgcgttgtacattttggagatagtgactatcgtcgtgtttggtgtcgagtacttcgtgaggatctgggctgctggctgctgttgtcggtatcgtgggtggagggggcgactcaagtttgctaggaagcccttttgcgtcattgatatcatggtgctgattgcatccatcgccgtactggccgctggatcccaggggaatgtgtttgcgaccagtgcactgcggtctctacgcttccttcagatcctccgcatgattagaatggatcgacggggaggaacctggaaactgcttggctccgtggtttacgcccacagtaaagagctggtgacggcctggtacatcggcttcctctgcttaatcttagcaagcttcctggtgtatctggcagagaagggagagaacgatcatttcgatacctatgcagatgcgctatggtggggactcatcacgcttacaaccatcggctatggggataaatacccacaaacctggaacggtcggttactggccgcaacttttactctgatcggcgttagctttttcgcactaccagcagggatcctggggagcggttttgctcttaaagtccaggagcagcaccgccagaagcattttgagaagcgaagaaaccctgccgcaggcttgatccaatctgcatggcggttctacgcaacaaacttatcaaggacggatctccacagcacatggcagtactatgagaggaccgttaccgttccgatgtacagattaatccctccgttgaatcaacttgagttattgcggaatctgaagtcaaagagtggcctggcctttcgtaaggacccaccaccggagcctagcccatcgcaaaaggtgtccctgaaagatagggtcttctcttcccctaggggagtggctgcgaagggaaagggaagcccacaggcacagacggtgcggagaagccccagcgcagatcaaagcctggaggattcgccaagtaaagtgcccaaaagttggtccttcggcgaccgctcacgggcaaggcaggccttccgaattaagggtgcagcctccaggcaaaattcagaagaagcttccctcccaggcgaggacatcgtcgacgacaagtcctgtccctgcgagtttgtgacagaggatctgacacctggccttaaagtgagtattcgggcagtgtgtgtgatgagatttcttgtttccaagcgaaagtttaaagagtccctgcggccttatgatgtcatggacgtcatcgaacagtacagcgctgggcacctggacatgttatccaggatcaaaagtttgcaaagccgccaggagccccgtctcccagttcagcagggcacgcgcacagggtgggcctctggtacaaagcctaccgtagcacacggcggatccgcgggaggtgtgtgggctggtccgcctcctcacccacgcagacctttgtcagcttccgtggtctcaagtcaatctctcttctag

SEQ ID NO: 295414 - DNA, 1848 bp, Artificial Sequence
  derived and/or modified sequence
atggtgcagaagagcagaaacggcggcgtgtaccccggccccagcggcgagaagaagctgaaggtgggcttcgtgggcctggaccccggcgcccccgacagcaccagagacggcgccctgctgatcgccggcagcgaggcccccaagagaggcagcatcctgagcaagcccagagccggcggcgccggcgccggcaagccccccaagagaaacgccttctacagaaagctgcagaacttcctgtacaacgtgctggagagacccagaggctgggccttcatctaccacgcctacgtgttcctgctggtgttcagctgcctggtgctgagcgtgttcagcaccatcaaggagtacgagaagagcagcgagggcgccctgtacatcctggagatcgtgaccatcgtggtgttcggcgtggagtacttcgtgagaatctgggccgccggctgctgctgcagatacagaggctggagaggcagactgaagttcgccagaaagcccttctgcgtgatcgacatcatggtgctgatcgccagcatcgccgtgctggccgccggcagccagggcaacgtgttcgccaccagcgccctgagaagcctgagattcctgcagatcctgagaatgatcagaatggacagaagaggcggcacctggaagctgctgggcagcgtggtgtacgcccacagcaaggagctggtgaccgcctggtacatcggcttcctgtgcctgatcctggccagcttcctggtgtacctggccgagaagggcgagaacgaccacttcgacacctacgccgacgccctgtggtggggcctgatcaccctgaccaccatcggctacggcgacaagtacccccagacctggaacggcagactgctggccgccaccttcaccctgatcggcgtgagcttcttcgccctgcccgccggcatcctgggcagcggcttcgccctgaaggtgcaggagcagcacagacagaagcacttcgagaagagaagaaaccccgccgccggcctgatccagagcgcctggagattctacgccaccaacctgagcagaaccgacctgcacagcacctggcagtactacgagagaaccgtgaccgtgcccatgtacagactgatcccccccctgaaccagctggagctgctgagaaacctgaagagcaagagcggcctggccttcagaaaggaccccccccccgagcccagccccagccagaaggtgagcctgaaggacagagtgttcagcagccccagaggcgtggccgccaagggcaagggcagcccccaggcccagaccgtgagaagaagccccagcgccgaccagagcctggaggacagccccagcaaggtgcccaagagctggagcttcggcgacagaagcagagccagacaggccttcagaatcaagggcgccgccagcagacagaacagcgaggaggccagcctgcccggcgaggacatcgtggacgacaagagctgcccctgcgagttcgtgaccgaggacctgacccccggcctgaaggtgagcatcagagccgtgtgcgtgatgagattcctggtgagcaagagaaagttcaaggagagcctgagaccctacgacgtgatggacgtgatcgagcagtacagcgccggccacctggacatgctgagcagaatcaagagcctgcagagcagacaggagcccagactgcccgtgcagcagggcaccagaaccggctgggccagcggcaccaagcccaccgtggcccacggcggcagcgccggcggcgtgtgggccggcccccccccccaccccagaagacccctgagcgccagcgtggtgagcagccagagcctgttctag

SEQ ID NO: 295415 - DNA, 159 bp, Artificial Sequence
  derived and/or modified sequence
atggctgcgcggtctctggcaaggcgcgctctcagggtggccggcggcgacgctagatcgggcggccccgtagcaagggacacacaacttggggcccaatggcgctggattgcagagggcctggtggagaatctgaacccccccggcgctgacgcatag

SEQ ID NO: 295416 - DNA, 1876 bp, Artificial Sequence
  derived and/or modified sequence
atgcgcgccgcccggccaggcccgcaaagaggcctccgagcgccatggctgcgcccccggcccgcgcggacgctgatccttcgcccacgtcgccacctacggcccgagacacaccaggccggcaggctgagaaaagcgagaccgcgtgcgaggaccgcagcaatgcagagtccctggacaggctcctgccacctgtgggcactgggcgctctccccggaagcggaccaccagccagtgcaagtcagagcctcccctgctgcgtacaagcaagcgtaccatctacaccgccgggcggccgccctggtacaatgaacacggcacgcaatccaaagaggccttcgccatcggcttgggaggcggcagtgcctctgggaagaccactgtggccagaatgatcatcgaggccctggatgtgccctgggtggtcttgctgtccatggactccttctacaaggtgctgactgagcagcagcaggaacaggccgcacacaacaacttcaacttcgaccacccagatgcctttgacttcgacctcatcatttccaccctcaagaagctgaagcaggggaagagtgtcaaggtgcccatttatgacttcaccacgcacagccggaagaaggactggaaaacactgtatggtgcaaacgtcatcatctttgagggcatcatggcctttgctgacaagacactgttggagctcctggacatgaagatctttgtggacacagactccgacatccgcctggtacggcggctgcgccgggacatcagtgagcgcggccgggacatcgagggtgtcatcaagcagtacaacaagtttgtcaagccctccttcgaccagtacatccagcccaccatgcgcctggcagacatcgtggtccccagagggagcggcaacacggtggccatcgacctgattgtgcagcacgtgcacagccagctggaggagggctgcgctggcctcggcacaccagtgccacccgctgccccggacgctgagcgtcctgaagagcacgccgcaggtacggggcatgcacaccatcatcaggtgagggcccacctggggacggggcggccccgggcgcgtgctcccgctcaactgttggccccacagggacaaggagaccagtcgcgacgagttcatcttctactccaagagactgatgcggctgctcatcgagcacgcgctctccttcctgccctttcaggactgcgtcgtacagaccccgcaggggcaggactatgcgggcaagtgctatgcggggaagcagatcaccggtgtgtccattctgcgcgccggtgaaaccatggagcccgcgctgcgcgctgtgtgcaaagacgtgcgcatcggcaccatcctcatccagaccaaccagcttaccggggagcccgagctccactacctgaggctgcccaaggacatcagcgatgaccacgtgatcctcatggactgcaccgtgtccacgggcgcggcggccatgatggcagtgcgcgtgctcctggaccacgacgtgcctgaggacaagatctttttgctgtcgctgctcatggcagagatgggcgtgcactcagtggcctatgcatttccgcgagtgagaatcatcaccacggcggtggacaagcgggtcaatgaccttttccgcatcatcccaggcattgggaactttggcgaccgctactttgggacagacgcggtccccgatggcagtgacgaggaggaagtggcctacacgggttagctgcccagtgagccatcccgtccccaccaccctcctcctgcctcctgacccaggactgctgaatacaaagatgttaatttttaaaatgttactagtataatttattctatgcattttataaaataaataaagcttt

SEQ ID NO: 295417 - protein, 131 aa, Artificial Sequence
  derived and/or modified sequence
MRGHPSLRPPWHWASAARLEGGFLPWGYVSNALSREGLTEERTFERRPEGWEGASCAASELDDDVPKANCLSTESTDTPKAPVITLPSEAREQMATLGERTFNCCYPGCHFKTVHGMKDLDRHLRIHTASC

SEQ ID NO: 295418 - protein, 221 aa, Artificial Sequence
  derived and/or modified sequence
MRGHPSLRPPWHWASAARLEGGFLPWGYVSNALSREGLTEERTFERRPEGWEGASCAASELDDDVPKANCLSTESTDTPKAPVITLPSEAREQMATLGERTFNCCYPGCHFKTVHGMKDLDRHLRIHTGDKPHKCEFCDKCFSRKDNLTMHMRCHTSVKPHKCHLCDYAAVDSSSLKKHLRIHSDERPYKCQLCPYASRNSSQLTVHLRSHTGDTPFQCWL

SEQ ID NO: 295419 - DNA, 396 bp, Artificial Sequence
  derived and/or modified sequence
atgagaggccaccccagcctgagacccccctggcactgggccagcgccgccagactggagggcggcttcctgccctggggctacgtgagcaacgccctgagcagagagggcctgaccgaggagagaaccttcgagagaagacccgagggctgggagggcgccagctgcgccgccagcgagctggacgacgacgtgcccaaggccaactgcctgagcaccgagagcaccgacacccccaaggcccccgtgatcaccctgcccagcgaggccagagagcagatggccaccctgggcgagagaaccttcaactgctgctaccccggctgccacttcaagaccgtgcacggcatgaaggacctggacagacacctgagaatccacaccgccagctgctag

SEQ ID NO: 295420 - DNA, 666 bp, Artificial Sequence
  derived and/or modified sequence
atgagaggccaccccagcctgagacccccctggcactgggccagcgccgccagactggagggcggcttcctgccctggggctacgtgagcaacgccctgagcagagagggcctgaccgaggagagaaccttcgagagaagacccgagggctgggagggcgccagctgcgccgccagcgagctggacgacgacgtgcccaaggccaactgcctgagcaccgagagcaccgacacccccaaggcccccgtgatcaccctgcccagcgaggccagagagcagatggccaccctgggcgagagaaccttcaactgctgctaccccggctgccacttcaagaccgtgcacggcatgaaggacctggacagacacctgagaatccacaccggcgacaagccccacaagtgcgagttctgcgacaagtgcttcagcagaaaggacaacctgaccatgcacatgagatgccacaccagcgtgaagccccacaagtgccacctgtgcgactacgccgccgtggacagcagcagcctgaagaagcacctgagaatccacagcgacgagagaccctacaagtgccagctgtgcccctacgccagcagaaacagcagccagctgaccgtgcacctgagaagccacaccggcgacacccccttccagtgctggctgtag

SEQ ID NO: 295421 - DNA, 396 bp, Artificial Sequence
  derived and/or modified sequence
atgagggggcaccccagccttaggccgccctggcactgggccagcgctgctagactcgagggagggtttctgccctgggggtatgtttcaaacgccctcagcagagaagggctgactgaggaacggacattcgaaaggcgtcccgaaggatgggaaggagcctcatgtgctgcttctgaactggacgacgatgtccccaaggcaaattgcttatccaccgagagcacagacactccaaaagccccagttatcacactcccgtctgaggcacgggaacaaatggctacactcggcgaaagaacttttaattgctgctatcctgggtgtcactttaagacagtacacggcatgaaggatctagaccgtcatctccggattcacacggcgagttgctag

SEQ ID NO: 295422 - DNA, 666 bp, Artificial Sequence
  derived and/or modified sequence
atgagagggcacccgagcctgagacccccgtggcactgggcatccgctgcaaggctggaaggcggctttctgccatgggggtatgtgtccaatgccctctcacgcgagggacttaccgaggaacgcacctttgagaggagacctgaaggttgggaaggagccagctgtgcagcgtcggagctggatgacgacgtgccaaaggccaactgtctctctaccgaatctaccgacacccctaaggccccggtgattaccctgccttctgaggcacgggaacagatggccacactcggggagcgaacctttaactgttgctatcccgggtgtcacttcaaaacggtccacggaatgaaagacctggaccgccacttgcgcatccacaccggggataagccgcacaagtgtgagttttgtgataagtgtttttccaggaaggataatttaacaatgcacatgcgctgtcacacgagcgtgaagccacataaatgtcacctctgcgactatgccgccgttgacagttcaagccttaaaaaacacctccgcatccacagcgatgaacgaccgtacaaatgtcagctttgtccatacgcttctaggaactcttcccagctcaccgtgcatctgcgcagtcacactggtgacaccccctttcagtgctggttatag

SEQ ID NO: 295423 - DNA, 396 bp, Artificial Sequence
  derived and/or modified sequence
atgaggggccaccccagcctgcggcccccctggcactgggccagcgctgcccggctggagggcggcttcctgccctggggctacgtgtccaatgccctgagccgggagggcctgacagaggagaggacctttgagcggcggcctgagggctgggagggcgccagctgtgccgccagcgagctggatgatgatgtgcccaaggccaactgcctgagcacagagagcacagacacccccaaggcccctgtgatcaccctgcccagcgaggcccgggagcagatggccaccctgggggagaggaccttcaactgctgctacccaggctgccacttcaagacagtgcacggcatgaaggacctggacagacacctgcgcatccacacagccagctgctag

SEQ ID NO: 295424 - DNA, 666 bp, Artificial Sequence
  derived and/or modified sequence
atgaggggccaccccagcctgcggcccccctggcactgggccagcgctgcccggctggagggcggcttcctgccctggggctacgtgtccaatgccctgagccgggagggcctgacagaggagaggacctttgagcggcggcctgagggctgggagggcgccagctgtgccgccagcgagctggatgatgatgtgcccaaggccaactgcctgagcacagagagcacagacacccccaaggcccctgtgatcaccctgcccagcgaggcccgggagcagatggccaccctgggggagaggaccttcaactgctgctacccaggctgccacttcaagacagtgcacggcatgaaggacctggacagacacctgcgcatccacactggagacaagccccacaagtgtgagttctgtgacaagtgcttcagcaggaaggacaacctgaccatgcacatgcgctgccacacctctgtgaagccccacaagtgccacctgtgtgactatgctgctgtggacagcagcagcctgaagaagcacctgcgcatccacagtgatgagcggccctacaagtgccagctgtgcccctatgccagcaggaacagcagccagctgactgtgcacctgcggagccacactggagacacccccttccagtgctggctgtag

SEQ ID NO: 295425 - DNA, 396 bp, Artificial Sequence
  derived and/or modified sequence
atgcggggccaccccagcctgcggcccccctggcactgggccagcgctgcacgcctcgagggtggattcctgccgtggggctacgtctccaacgcccttagccgcgagggtctgaccgaagagagaaccttcgaacggagacctgaaggttgggagggggcatcttgcgctgctagtgagctcgacgacgacgtaccaaaagccaactgcttgtctacggaatctaccgataccccaaaggcaccagttattacgctgccttccgaggctcgcgagcagatggccacactaggagagcgcacttttaattgctgctaccccggctgccactttaagaccgtgcacggaatgaaagacctcgaccgccatcttaggatccacaccgcatcgtgttag

SEQ ID NO: 295426 - DNA, 666 bp, Artificial Sequence
  derived and/or modified sequence
atgcggggccaccccagcctgcggcccccctggcactgggccagcgccgcgcggctagaggggggcttccttccctggggctacgttagtaatgccctgagtcgggaaggccttaccgaggaaaggacctttgaacggagacccgagggctgggaaggcgctagctgcgccgcttctgaactggatgacgacgtccccaaggctaattgcttaagtactgagtctaccgataccccaaaggcccccgtgatcacactgccgtctgaagctcgagagcagatggccaccttgggtgaacgaacttttaactgctgctacccaggctgccattttaaaactgttcatggaatgaaagatctcgacaggcatttgaggattcatacaggagacaagccccacaaatgcgagttctgtgataaatgcttcagcagaaaggataacttgacaatgcatatgaggtgtcacacgagtgtgaaaccacacaagtgccatctctgcgattacgccgcagtcgattcttcgagtctgaaaaaacatttgcgaatccattccgacgagcggccctataagtgtcagctttgcccctacgcctccaggaactcatcgcaactgacagtccatctccgtagccatactggagacaccccgttccagtgctggctatag

SEQ ID NO: 295427 - DNA, 396 bp, Artificial Sequence
  derived and/or modified sequence
atgcgaggacatccatcactgcggcctccttggcattgggcctccgccgcacgactcgaaggaggatttcttccatgggggtatgtatccaatgccctcagtagagagggcttgacagaagagagaacgtttgaacggagacctgaaggctgggagggtgcctcttgtgccgcttctgagttggatgatgacgtgcctaaggcgaattgcctctctaccgagagtacagacacacctaaagcgccagtaatcacgctcccctcagaagctcgtgagcagatggcgactttgggcgaaaggacatttaactgctgttaccccggatgtcatttcaaaaccgtacacgggatgaaggacttagataggcatctgcgcatccataccgcttcctgttag

SEQ ID NO: 295428 - DNA, 666 bp, Artificial Sequence
  derived and/or modified sequence
atgaggggacacccatccctgaggccgccatggcattgggcttctgccgctcgattggaggggggttttctgccgtggggttacgtttctaatgctctaagtcgcgaggggttaactgaagaacgcacatttgagaggcgcccagagggttgggaaggtgctagctgcgctgcttccgagttggatgacgacgttcccaaagctaactgtttgtcaaccgagtctaccgacacccccaaggctcccgtcatcacgctgccatcagaggccagggaacagatggccacgctcggggagcgcacctttaattgttgctacccaggatgtcattttaaaaccgtgcatggaatgaaggatctggaccgccatctgaggattcatacaggcgacaagccacataaatgtgagttttgcgataagtgtttttccaggaaagacaatttgactatgcacatgagatgccacacatcggtgaagccacacaagtgtcacctgtgtgactacgctgctgtggatagttcatccctgaagaaacatctcagaatccatagcgacgagcgcccttacaaatgccagttgtgtccttacgcctcccggaattctagccagctgacagtgcacctcaggtctcacacaggagacacgcctttccagtgctggctgtag

SEQ ID NO: 295429 - DNA, 710 bp, Artificial Sequence
  derived and/or modified sequence
aggacccctcagaggctgttttcgggatgcgcgggcacccgagtctccggcctccttggcactgggcttcggctgcgcgcctggaaggtggcttcttgccttggggttacgtttcaaatgcgttgtccagggaaggcctcaccgaggagcggacgttcgagcgaagacccgaaggatgggagggagcgagctgtgcagcttcagaacttgatgatgatgttccaaaagcaaactgcctctccactgaaagcactgacactccgaaggcccctgtcatcactcttccctcagaggcaagggaacaaatggccacccttggagagaggacgttcaactgttgctacccaggttgccacttcaaaactgtccatggcatgaaagacttggaccgccatctcagaatccacacggccagctgctgagaagagaaataagacctgctgaagcaaaggagtgccataatctatgccaggattacaaactgcagcccatgggcaactcagcctgttggcatgctccttcatttacctattgcttgcagctttctggccttacaagaggtagttgttacagggactgtagggtgcacaaagcctaaaatactatctttttgttttgtttttttctctgagacagagtcctgctctgtcacccaggctagaatgcagtggtgcaatctcagttcattgcgacccctgcctcccaggttc

SEQ ID NO: 295430 - DNA, 762 bp, Artificial Sequence
  derived and/or modified sequence
ggattcctctagccactcctctcaagagctagtcaacgagtttgcctcccaaacacgctggaaggatgctcagaggacccctcagaggctgttttcgggatgcgcgggcacccgagtctccggcctccttggcactgggcttcggctgcgcgcctggaaggtggcttcttgccttggggttacgtttcaaatgcgttgtccagggaaggcctcaccgaggagcggacgttcgagcgaagacccgaaggatgggagggagcgagctgtgcagcttcagaacttgatgatgatgttccaaaagcaaactgcctctccactgaaagcactgacactccgaaggcccctgtcatcactcttccctcagaggcaagggaacaaatggccacccttggagagaggacgttcaactgttgctacccaggttgccacttcaaaactgtccatggcatgaaagacttggaccgccatctcagaatccacacgggagacaaaccgcacaagtgtgagttctgtgacaagtgcttcagccggaaggacaacctgaccatgcacatgcggtgccacaccagtgtgaagccacacaagtgtcacctgtgtgactacgctgccgtggacagcagtagcctcaagaagcacctgcggatccactctgatgagcggccgtacaaatgccagctctgcccctatgccagccgcaactccagccagctcaccgtccacctgcgatctcacacgggggatacccccttccagtgctggctc

SEQ ID NO: 295431 - protein, 261 aa, Artificial Sequence
  derived and/or modified sequence
MASPRTRKVLKEVRVQDENNVCFECGAFNPQWVSVTYGIWICLECSGRHRGLGVHLSFVRSVTMDKWKDIELEKMKAGGNAKFREFLESQEDYDPCWSLQEKYNSRAAALFRDKVVALAEGREWSLESSPAQNWTPPQPRTLPSMVHRVSGQPQSVTASSDKAFEDWLNDDLGSYQGAQGNRYVGFGNTPPPQKKEDDFLNNAMSSLYSGWSSFTTGASRFASAAKEGATKFGSQASQKASELGHSLNENVLKPAQEKVKE

SEQ ID NO: 295432 - protein, 79 aa, Artificial Sequence
  derived and/or modified sequence
MASPRTRKVLKEVRVQDENNVCFECGAFNPQWVSVTYGIWICLECSGRHRGLGVHLSFVRSVTMDKWKDIELEKMKAGG

SEQ ID NO: 295433 - protein, 129 aa, Artificial Sequence
  derived and/or modified sequence
MSGGRFDFDDGGAYCGGWEGGKAHGHGLCTGPKGQGEYSGSWNFGFEVAGVYTWPSGNTFEGYWSQGKRHGLGIETKGRWLYKGEWTHGFKGRYGIRQSSSSGAKYEGTWNNGLQDGYGTETYADGGMC

SEQ ID NO: 295434 - protein, 696 aa, Artificial Sequence
  derived and/or modified sequence
MSGGRFDFDDGGAYCGGWEGGKAHGHGLCTGPKGQGEYSGSWNFGFEVAGVYTWPSGNTFEGYWSQGKRHGLGIETKGRWLYKGEWTHGFKGRYGIRQSSSSGAKYEGTWNNGLQDGYGTETYADGGTYQGQFTNGMRHGYGVRQSVPYGMAVVVRSPLRTSLSSLRSEHSNGTVAPDSPASPASDGPALPSPAIPRGGFALSLLANAEAAARAPKGGGLFQRGALLGKLRRAESRTSVGSQRSRVSFLKSDLSSGASDAASTASLGEAAEGADEAAPFEADIDATTTETYMGEWKNDKRSGFGVSERSSGLRYEGEWLDNLRHGYGCTTLPDGHREEGKYRHNVLVKDTKRRMLQLKSNKVRQKVEHSVEGAQRAAAIARQKAEIAASRTSHAKAKAEAAEQAALAANQESNIARTLARELAPDFYQPGPEYQKRRLLQEILENSESLLEPPDRGAGAAGLPQPPRESPQLHERETPRPEGGSPSPAGTPPQPKRPRPGVSKDGLLSPGAWNGEPSGEGSRSVTPSEGAGRRSPARPATERMAIEALQAPPAPSREPEVALYQGYHSYAVRTTPPEPPPFEDQPEPEVSGSESAPSSPATAPLQAPTLRGPEPARETPAKLEPKPIIPKAEPRAKARKTEARGLTKAGAKKKARKEAALAAEAEVEVEEVPNTILICMVILLNIGLAILFVHLLT

SEQ ID NO: 295435 - DNA, 2091 bp, Artificial Sequence
  derived and/or modified sequence
atgtcaggaggccgattcgactttgacgacgggggcgcatactgcgggggttgggaggggggcaaagctcacggacatggcctctgcacggggcctaagggtcagggggaatactccggaagttggaacttcggcttcgaggtagccggcgtgtacacctggccctcaggtaatacatttgagggttactggtcacagggtaagcgtcacggcttggggattgagactaaaggaaggtggctctacaagggcgagtggactcacgggtttaagggacgatatgggatcagacagtcttcttcctctggggcaaagtatgaagggacttggaataatgggctccaggacgggtatgggacagaaacatacgccgacggaggtacttaccaggggcagttcaccaacggaatgaggcatggttacggggtcaggcagagcgtaccgtacgggatggccgttgtagtgcggagtccactgcgaacctcactgagctccttgcggtctgagcattctaacgggaccgtggctcccgactcccccgcctctccagcgagcgatggccccgctctgccgtctcctgcgatcccccgcggtggtttcgcactctccctgctcgcaaacgcagaggctgccgccagggcccctaaaggtggcgggctttttcagcgaggggcactactgggaaaattaaggagagcagaatcgcgcacgtcagtaggtagccagagatctagagtttcttttctcaagagtgatctgtctagtggggccagcgacgcagctagtaccgcttccctgggggaggctgccgagggcgccgacgaggctgccccatttgaggccgatatcgatgccacaactacagagacctacatgggggagtggaagaacgacaagcgctccggcttcggtgtcagcgaaagatccagtggtctgaggtatgaaggagagtggttggacaatcttaggcatggttatggttgcaccactctcccagatggtcatcgggaggaagggaaataccgccacaacgtattggtgaaagatactaagcggagaatgctccaactcaagagcaacaaggtgaggcagaaggttgaacacagtgtggaaggcgcacaaagggccgcggcaattgcacggcagaaggcggaaattgccgcctcaaggacaagccacgctaaggcaaaagcagaagcggcagagcaagccgctctggccgccaatcaagagtccaatattgctcgcaccctggcaagagagttggcccccgatttttatcagccaggcccagagtatcagaaaaggcgtttgttgcaagagattttggagaactccgagagcttacttgagccgccggatagaggcgctggcgccgccggactacctcagccccccagagagtcacctcaactccatgaacgtgagacgccgaggcctgaggggggctccccatcgcccgcaggcacgcctcctcagcccaaacgcccacgacctggagtgtcgaaggacggactgcttagccccggtgcttggaacggggaacccagtggagagggcagcaggagcgtgactccctctgaaggcgcaggaaggagaagcccagcccgccctgccacagaacggatggccatcgaggcgttgcaggcgcctcccgcacccagccgcgagccggaggttgccctttaccagggttaccactcttatgctgtgcgtacgacccccccggagcccccccctttcgaggatcagcccgagcccgaggttagcggtagtgagtccgccccatcgtctcctgcaactgccccccttcaggctcccactttgcgcgggcccgaaccagccagagaaacacccgccaaactggaacctaaacccataattccgaaggccgagccgagagcgaaggctaggaaaaccgaggcaagggggctgaccaaagccggggcgaagaagaaagcaaggaaagaagcagcactagctgcggaggccgaggtggaggtggaggaagtgccgaatacaatcttaatttgcatggtgattctgctcaatattggactggctatcttgttcgtccacctgctgacttag

SEQ ID NO: 295436 - DNA, 4787 bp, Artificial Sequence
  derived and/or modified sequence
ggattttcagtgttccaggactgggtgttctgctggtctccctctcccctcccttccccgattccccggtgccctccctgcgcgcagacccaggggactctgagaatggaagggagctctcattcccgggaggaaaagacaccaggttccctgggctgcctgcactcagttctcagcctccttcctcatgcctccagccactgcccgggtctgcggcacgggcgcgatttgaaatacccctccttcccgctttgaagaaggctgggctggctgggggttattttgggagcagcttctgagatccaatggccttgttagggcaacactgacctttccgtcccagaaggagggcaggattggagaagggggcggggcagcggcggggagaccgacagccccgcacacccactggggtggagaagggggccagcgggctgcgggaattcagcctccggcgggggctgccaccgaggggaatttcccctctttgaaaaggctggggacccctccaccccaccctttcactgggcttcttaaagagatcacaccgttttcccttggacttcttggaaggcagacttgggacgctttgtggggactttgaacctttccttcctgctttctttccagcaggcagccttgctctggctggtggagtcggggctcccgggcatggcactgactagccgacccggtgctgacttggcgccggggctctttcagcctctgctggcatcctgcttcccccctcctggggtgcagtggtgagtctgggggcctgcccccgagggcactggaggagtgttgcaggcatcacccacgccctctgcacccacgctggaggacggggaggttgtcaggggctatgatgagatgagtgggggccgcttcgactttgatgatggaggggcgtactgcgggggctgggaggggggaaaggcccatgggcatggactgtgcacaggccccaagggccagggcgaatactctggctcctggaactttggctttgaggtggcaggtgtctacacctggcccagcggaaacacctttgagggatactggagccagggcaaacggcatgggctgggcatagagaccaaggggcgctggctctacaagggcgagtggacacatggcttcaagggacgctacggaatccggcagagctcaagcagcggtgccaagtatgagggcacctggaacaatggcctgcaagacggctatggcaccgagacctatgctgatggagggacgtaccaaggccagttcaccaacggcatgcgccatggctacggagtacgccagagcgtgccctacgggatggccgtggtggtgcgctcgccgctgcgcacgtcgctgtcgtccctgcgcagcgagcacagcaacggcacggtggccccggactctcccgcctcgccggcctccgacggccccgcgctgccctcgcccgccatcccgcgtggcggcttcgcgctcagcctcctggccaatgccgaggcggccgcgcgggcgcccaagggcggcggcctcttccagcggggcgcgctgctgggcaagctgcggcgcgcagagtcgcgcacgtccgtgggtagccagcgcagccgtgtcagcttccttaagagcgacctcagctcgggcgccagcgacgccgcgtccaccgccagcctgggagaggccgccgagggcgccgacgaggccgcacccttcgaggccgatatcgacgccaccaccaccgagacctacatgggcgagtggaagaacgacaaacgctcgggcttcggcgtgagcgaacgctccagtggcctccgctacgagggcgagtggctggacaacctgcgccacggctatggctgcaccacgctgcccgacggccaccgcgaggagggcaagtaccgccacaacgtgctggtcaaggacaccaagcgccgcatgctgcagctcaagagcaacaaggtccgccagaaagtggagcacagtgtggagggtgcccagcgcgccgctgctatcgcgcgccagaaggccgagattgccgcctccaggacaagccacgccaaggccaaagctgaggcagcggaacaggccgccctggctgccaaccaggagtccaacattgctcgcactttggccagggagctggctccggacttctaccagccaggtccggaatatcagaagcgccggctgctgcaggagatcctggagaactcggagagcctgctggagccccccgaccggggcgccggcgcagcgggcctcccacagccgccccgcgagagcccgcagctgcacgagcgtgagacccctcggcccgagggtggctccccgtcaccggccgggacgcccccgcagcccaagcggcccaggcccggggtgtccaaggacggcctgctgagcccaggcgcctggaacggcgagcccagcggtgagggcagccggtcagtcactccgtccgagggcgcgggccgccgcagccccgcgcgtccagccaccgagcgcatggccatcgaggctctgcaggcaccgcctgcgccgtcgcgggagccggaggtggcgctttaccagggctaccacagctatgctgtgcgcaccacgccgcccgagcccccaccctttgaggaccagcccgagcccgaggtctccgggtccgagtccgcgccctcgtccccggccaccgccccgctgcaggcccccacgctccgaggccccgagcctgcacgcgagacccccgccaagctggagcccaagcccatcatccccaaagccgagcccagggccaaggcccgcaagactgaggctcgagggctgaccaaggcgggggccaagaagaaggcgcggaaggaggccgcactggcggcagaggcggaggtggaggtggaagaggtccccaacaccatcctcatctgcatggtgatcctgctgaacatcggcctggccatcctctttgttcacctcctgacctgaccgtcgcttaccagagccagaagttcctgctgaggacatgaggacccgtctttttgcagtgccaggcagggtggccaaagaggactggactctggacctggagccccgtggtccagttcacattcaccccacaagagtttcaggaggcctcccacggtgcctgtgctgggtggcggtggtggtgccaagaggaatggaatgtcctgggctccttcaggagctctctacccaggggcaaggagagcccagagagaagcgccctggtctcttgagcttcctgatctgctcctgtcccccgctctcctccactcccttgcctttccctaggttgtcccctccctgggcttttgtgtgttttgggagatgtcacctaaccaggacattgatattcaatcccatcccccttcctcccaccctgccccactttgatttaatcctttggctgtgggctgaggcctcccagggaagctgggtggggtgggtgttgagaccccctcagaccagcacagagacctgtccttgtgcagtctgcaccctgcactccctcccttgcctgtagatgttctggatgacagtagaggaaatggacaaggtcagtttgaatatcccagaacacagtgctctgtctcctcccaccagtccagttagcttcccttctggaccaatagacgaggggagaccccatggatcctctggctgggaagccactgaccaggtggccagggggcagggtgggaagaggggttaaggtgcagtgatgatggcctgttttggagtgtgtctgagactgggattgcatttggggtttcccgtgtgcttgggatgctagagggtcacctgcaggaggcctggggccggcgagaaatctcctgtgatgccctgtgaaatggcttgtctcctcccccatcagggcccaccgaaagctcaggggagcacagaagcccatggaagcccagggagatgtccctggggcagacactaaggcaggtgttgaagacaagctgcttgtcaagaagcatttcccggcaagagaggggcaagtctggggctccaactgggtacagcctgggtgcagttataagcccctttggcttacttggtagaagatggctacttggatgtacctcacttaaagatgttttgtaccacactaggtctctgggcccttgtgcttcctgtgggtggggtgagggccaaaggctatggtttcctgcctccaggagaatggagagaaagggcttccaggcccctccaagcctggggaaggacgtggcatccaagctgagccagagggaactgctgctgtcctcccttcatttctgtggaccttggaggctttggctttgtggcagggcctccccaggcagctctgggacctaggagtttgcttctgatagggtcagctttcccatttcccttcaatgcttgggaaccttctcccttagcttcacacttgccgtttcaagccctgctgggaccttgtggcttggctggaatccaggactgtattttcatggagaagaacctgcagattcttccatcctcagctggccatggcccacagctctgcatctgcatctgagcttctcaagactcctggagcatgaggggaatggggcggggccactgctctgtgctgacgggctccgtctcggagattcttgtcctgttttttttctgttgtttttttttggctggtgctggggacaagcctgtgcctgccaaagctcccaggccaagtttgggggctggtgtttggggttgggtttggggttcaggatgctgcagtctgtgcaataataaacccgcatctgctcacgggc

SEQ ID NO: 295437 - DNA, 2091 bp, Artificial Sequence
  derived and/or modified sequence
atgtctgggggccgctttgattttgatgatggaggagcctactgcggcggctgggagggcggcaaggcccacggccacggcctgtgcaccggccccaagggccagggcgagtacagcggctcctggaactttggatttgaggtggccggcgtgtacacctggcccagcggcaacacctttgagggctactggagccagggcaagagacatggcctgggcatcgagaccaagggccgctggctgtacaagggggagtggacccacggcttcaagggccgctatggcatccggcagagcagcagcagcggggccaagtatgagggcacctggaacaacggcctgcaggacggctacggcacagagacctatgcagatggcggcacctaccagggccagttcaccaacggcatgagacatggctatggagtgcggcagagcgtgccctacggcatggctgtggtggtgcgcagccccctgcggaccagcctgagcagcctgcggtctgagcacagcaatggcaccgtggccccagacagccctgccagccctgccagtgatggccctgccctgcccagccctgccatcccccggggcggctttgccctgagcctgctggccaatgctgaggccgccgcccgggcccccaagggcggcggcctcttccagagaggagccctgctgggcaagctgcggcgggcagagagcaggacctctgtgggcagccagaggagccgggtgtccttcctgaagagtgacctgagcagcggggccagtgatgctgccagcacagccagcctgggggaggccgctgagggcgcagatgaggccgccccctttgaagctgacattgatgccaccaccacagagacctacatgggagagtggaagaatgacaagaggagcggctttggagtgtctgagaggagcagcggcctgcgctatgaaggagagtggctggacaacctgcggcacggctacggctgcaccaccctgcctgatggccaccgggaggagggcaagtaccgccacaacgtgctggtgaaggacaccaagaggaggatgctgcagctgaagagcaacaaggtgcggcagaaggtggagcacagcgtggagggcgcccagagagctgctgccatcgcccggcagaaggccgagattgctgccagcaggaccagccacgccaaggccaaggccgaggccgctgagcaggccgccctggccgccaaccaggagagcaacatcgcccggaccctggcccgggagctggccccagacttctaccagcccggccctgagtaccagaagaggcggctgctgcaggagatcctggagaacagcgagagcctgctggagcccccagacagaggagctggagctgctggcctgccccagcccccccgggagagcccccagctgcacgagcgggagacccccaggcctgagggcggcagccccagccctgctggcaccccaccccagcccaagaggcccaggcctggggtgtccaaggatggcctgctgagccctggggcctggaatggagagcccagcggggagggcagccgctctgtgaccccatctgagggcgccggccgccgcagccctgcccggcctgccacagagaggatggccatcgaggccctgcaggcccccccagcccccagccgggagcctgaggtggccctgtaccagggctaccacagctatgctgtgaggaccaccccacctgagcccccaccatttgaggaccagcctgagcctgaggtgtctggcagcgagagcgcccccagcagccctgccacagcccccctgcaggcccccaccctgcggggccctgagcccgcccgggagaccccagccaagctggagcccaagcccatcatccccaaggccgagccccgggccaaggccaggaagacagaggcccggggcctgaccaaggccggggccaagaagaaggccaggaaggaggccgccctggccgctgaggccgaggtggaggtggaggaggtgcccaacaccatcctgatctgcatggtgatcctgctgaacatcggcctggccatcctgtttgtgcacctgctgacctag

SEQ ID NO: 295438 - DNA, 2091 bp, Artificial Sequence
  derived and/or modified sequence
atgagcggcggccggttcgacttcgacgacggcggcgcctactgcggtggttgggaaggcggcaaagcccatggtcacggcctctgcactggaccaaaagggcagggggagtactccggcagctggaatttcggattcgaggtcgccggagtctatacttggccttcgggaaatacattcgaaggctattggtcacagggcaagaggcacggcctcggcatcgaaacgaaaggacgctggttgtataagggggagtggacccatgggtttaaaggcaggtacggaatccgccaaagcagctcctctggcgctaaatatgaagggacctggaataacgggctccaggacgggtatgggactgagacctatgcggacggcgggacttatcagggacagtttaccaacggcatgcgacacggttacggtgtgagacagtctgtcccctacggcatggccgtggttgtccggagtcccctgcggacttccctaagtagcctaagaagtgaacacagtaacggcaccgtcgctcccgactcacccgccagtcctgccagcgacgggccggctctgccttcacccgcgatccctcgcggggggttcgcgctgtcattgctggccaatgcagaagctgcggctcgcgccccaaaaggcggaggcctctttcagagaggagctctgcttggaaagcttagaagggcggaatctcggacgtcagtgggcagccaacgatccagggtctctttcctgaagagtgatcttagctcaggcgcctcggacgccgccagcaccgcgagcttaggtgaagctgcggagggggctgatgaggcagctccattcgaagccgacatcgacgccaccaccacagagacttatatgggcgaatggaagaatgacaagcgaagcggtttcggggtttcagagagatcttctggtctgagatacgagggggaatggctggacaatctccgccatggatacgggtgcaccaccctgcctgacgggcaccgggaggaaggcaagtacagacataacgtgctggtcaaagatacaaagcgacgcatgctccagctaaagtctaacaaagtgcgtcaaaaagtcgagcattccgtcgagggcgctcagagagctgccgcaattgctaggcagaaggcagaaatcgcagcatctcggacctcccatgccaaggccaaagcagaggcagctgaacaggccgccttggctgccaatcaggagagtaatattgctcggaccctagctagagaactggctcccgacttctaccagcccggaccagagtaccagaagcgaagactactgcaggaaattctagaaaatagcgaaagtctgctggagcccccagatagaggtgctggcgccgccggactcccgcaacccccgcgcgagtctccccagttgcatgagagggagacacccagaccagaaggtggcagcccttcacctgccggaactcctcctcagccaaagagacccagacccggagtttccaaggacggtcttttatcaccaggggcctggaatggcgaaccctctggtgagggcagccgtagcgttactccctcagagggcgctggcagaaggtcaccagccaggccagctacggaaaggatggctatcgaagcactccaggctccacccgctccctctagagaacccgaggttgccctctaccaggggtaccacagttatgccgtccgtactactccgccggaaccgccccctttcgaggatcagcctgagcctgaggtttccggcagcgaatcggcccccagcagtccagccacagctcccctgcaagccccaactcttcgggggccagagcctgccagggagacccctgcgaagctggagccaaaacccattatccccaaagcagaacctcgggccaaggcgcgaaaaacagaggccagaggactcaccaaagctggagcaaagaagaaggcccggaaggaggctgcgctggcagccgaagctgaggtagaggtggaagaagtgccgaacaccatcttgatttgcatggtgatcctccttaacatcggcctggcaatcttgtttgtgcatttacttacttag

SEQ ID NO: 295439 - DNA, 2091 bp, Artificial Sequence
  derived and/or modified sequence
atgagcggtggtcggtttgactttgacgacgggggtgcctattgcggaggttgggaaggcggaaaggcccatggccatggcctgtgcacagggccaaaaggacagggcgaatacagtggcagctggaacttcggttttgaagtggcaggtgtgtatacgtggccaagtggcaatactttcgagggttactggagccagggaaagcgtcacggattggggattgagaccaagggacgatggctctacaagggggaatggacccacggctttaagggccgttacggcatcagacaatcgtcaagtagcggcgctaaatatgaagggacatggaacaacggactgcaggatgggtatgggaccgaaacctatgccgacggagggacctaccagggtcagttcaccaacgggatgcgacatggctacggggtgagacagagcgtcccttatggcatggcagtcgttgtgagatcacctctgagaacctctctgtccagtctgcgcagcgagcacagtaacggaaccgtcgccccagacagccccgcttcccccgctagtgacgggcctgcactgcctagccccgctatcccacgcggtgggttcgctctaagcctcctggctaacgcagaggccgctgctcgcgctcccaaggggggtggcttatttcagcgcggtgctttgctcggcaagctcaggcgcgcagagagccgaacatctgtcggatcacagaggtctagagtctcctttctaaagtccgacctgtcgagcggtgcaagcgacgcagcgtccactgcttcgctgggtgaagccgctgaaggagctgacgaggccgctccctttgaagccgatattgatgccacaaccactgaaacatatatgggtgagtggaaaaacgacaaacgcagcggcttcggtgtctcagaacggtcctccggccttaggtatgaaggcgagtggttggacaaccttcgacatgggtacggctgtaccacactccccgacggccacagggaggaggggaagtatagacacaatgtgcttgtcaaagacactaaacggcgtatgctgcagctaaagtccaacaaagtgcggcagaaggtggagcactcagttgaaggcgctcagcgcgctgccgctatcgcaagacagaaggcagaaatcgctgcttcgcgtactagccatgccaaggcaaaggcagaagcggctgagcaggccgcactggctgccaatcaagaatctaacatagccagaacactggctagagaactcgctcccgacttttatcagcccggacccgaataccagaagagacgcctcttgcaggagatcctggagaattctgagagcctgctggagccacctgacaggggcgctggcgctgccggactaccccagccgcctcgtgagtccccacagcttcatgaaagggaaacacctagaccggagggcggatcaccatccccagccggaacaccaccccagccaaagcggccacgtccaggggtgagcaaagatggactgctgagtcccggagcatggaacggggagccctcgggcgagggatcgcggagcgtgaccccaagtgaaggcgctggacgcaggtcccctgccagacccgcaacggagaggatggcaatcgaggctctgcaggcccctcccgctccttctcgcgaacctgaagtagccctgtatcaagggtatcactcctacgcagtgaggaccacccctcccgagccacccccttttgaggatcagccagagcccgaagtctctggctctgagtctgccccatcctccccagcaactgctccactgcaggccccaaccttacgaggcccagagcccgctcgggagacgccagcgaaacttgagcctaaacccattatacccaaggccgagcccagggccaaagctcggaagactgaagctcgtggactgactaaggcaggagcaaaaaaaaaggcaaggaaagaggctgccttggctgccgaggcggaggtggaagtggaagaagtacccaataccatcttgatttgcatggtcatcctgttgaacatcggcctggctatcttgttcgtccatctcctgacttag

SEQ ID NO: 295440 - DNA, 2091 bp, Artificial Sequence
  derived and/or modified sequence
atgagcggcggcagattcgacttcgacgacggcggcgcctactgcggcggctgggagggcggcaaggcccacggccacggcctgtgcaccggccccaagggccagggcgagtacagcggcagctggaacttcggcttcgaggtggccggcgtgtacacctggcccagcggcaacaccttcgagggctactggagccagggcaagagacacggcctgggcatcgagaccaagggcagatggctgtacaagggcgagtggacccacggcttcaagggcagatacggcatcagacagagcagcagcagcggcgccaagtacgagggcacctggaacaacggcctgcaggacggctacggcaccgagacctacgccgacggcggcacctaccagggccagttcaccaacggcatgagacacggctacggcgtgagacagagcgtgccctacggcatggccgtggtggtgagaagccccctgagaaccagcctgagcagcctgagaagcgagcacagcaacggcaccgtggcccccgacagccccgccagccccgccagcgacggccccgccctgcccagccccgccatccccagaggcggcttcgccctgagcctgctggccaacgccgaggccgccgccagagcccccaagggcggcggcctgttccagagaggcgccctgctgggcaagctgagaagagccgagagcagaaccagcgtgggcagccagagaagcagagtgagcttcctgaagagcgacctgagcagcggcgccagcgacgccgccagcaccgccagcctgggcgaggccgccgagggcgccgacgaggccgcccccttcgaggccgacatcgacgccaccaccaccgagacctacatgggcgagtggaagaacgacaagagaagcggcttcggcgtgagcgagagaagcagcggcctgagatacgagggcgagtggctggacaacctgagacacggctacggctgcaccaccctgcccgacggccacagagaggagggcaagtacagacacaacgtgctggtgaaggacaccaagagaagaatgctgcagctgaagagcaacaaggtgagacagaaggtggagcacagcgtggagggcgcccagagagccgccgccatcgccagacagaaggccgagatcgccgccagcagaaccagccacgccaaggccaaggccgaggccgccgagcaggccgccctggccgccaaccaggagagcaacatcgccagaaccctggccagagagctggcccccgacttctaccagcccggccccgagtaccagaagagaagactgctgcaggagatcctggagaacagcgagagcctgctggagccccccgacagaggcgccggcgccgccggcctgccccagccccccagagagagcccccagctgcacgagagagagacccccagacccgagggcggcagccccagccccgccggcacccccccccagcccaagagacccagacccggcgtgagcaaggacggcctgctgagccccggcgcctggaacggcgagcccagcggcgagggcagcagaagcgtgacccccagcgagggcgccggcagaagaagccccgccagacccgccaccgagagaatggccatcgaggccctgcaggccccccccgcccccagcagagagcccgaggtggccctgtaccagggctaccacagctacgccgtgagaaccaccccccccgagcccccccccttcgaggaccagcccgagcccgaggtgagcggcagcgagagcgcccccagcagccccgccaccgcccccctgcaggcccccaccctgagaggccccgagcccgccagagagacccccgccaagctggagcccaagcccatcatccccaaggccgagcccagagccaaggccagaaagaccgaggccagaggcctgaccaaggccggcgccaagaagaaggccagaaaggaggccgccctggccgccgaggccgaggtggaggtggaggaggtgcccaacaccatcctgatctgcatggtgatcctgctgaacatcggcctggccatcctgttcgtgcacctgctgacctag

SEQ ID NO: 295441 - protein, 124 aa, Artificial Sequence
  derived and/or modified sequence
MKPLIWTWSDVEGQRPALLICTAAAGPTQGVKAYPDATMHRQLLAPVEGRMAETLNQKLHVANVLEDDPGYLPHVYSEEGECGGAPSLSSLASLEQELQPDLLDSLGSKATPFEEIYSESGVPS

SEQ ID NO: 295442 - DNA, 375 bp, Artificial Sequence
  derived and/or modified sequence
atgaagcccctgatctggacctggagcgacgtggagggccagagacccgccctgctgatctgcaccgccgccgccggccccacccagggcgtgaaggcctaccccgacgccaccatgcacagacagctgctggcccccgtggagggcagaatggccgagaccctgaaccagaagctgcacgtggccaacgtgctggaggacgaccccggctacctgccccacgtgtacagcgaggagggcgagtgcggcggcgcccccagcctgagcagcctggccagcctggagcaggagctgcagcccgacctgctggacagcctgggcagcaaggccacccccttcgaggagatctacagcgagagcggcgtgcccagctag

SEQ ID NO: 295443 - DNA, 375 bp, Artificial Sequence
  derived and/or modified sequence
atgaaaccgttgatctggacctggagtgatgtggaggggcagcgaccggcgctacttatatgcaccgccgcggcagggccaactcaaggcgtcaaagcttaccccgacgcgacaatgcacaggcagctgttagcacccgtggaagggagaatggcagagactctgaatcaaaaattgcacgtagccaacgtgttggaggatgatcccggatatctgccacacgtgtacagtgaagagggcgagtgcgggggagctccctctttaagttccctggcaagcctcgaacaggagctccaacccgacctgctggattctcttggaagtaaggccaccccgtttgaggaaatctatagcgaatccggtgtgcctagctag

SEQ ID NO: 295444 - DNA, 375 bp, Artificial Sequence
  derived and/or modified sequence
atgaagcccctcatctggacctggagcgatgtggagggccagaggcctgccctgctgatctgcacagctgctgctggccccacccagggcgtgaaggcctacccagatgccaccatgcaccggcagctgctggcccctgtggagggccgcatggccgagaccctgaaccagaagctgcacgtggccaacgtgctggaggatgatcctggctacctgccccacgtgtacagcgaggagggagaatgtggcggggcccccagcctgagcagcctggccagcctggagcaggagctgcagcctgacctgctggacagcctgggcagcaaggccaccccatttgaggagatctacagcgagagcggcgtgcccagctag

SEQ ID NO: 295445 - DNA, 375 bp, Artificial Sequence
  derived and/or modified sequence
atgaagcccctgatctggacctggagcgacgtggagggccagcggcctgcgctcctgatctgtaccgcagccgcaggacctacacagggagtgaaagcctacccagatgcaacaatgcacagacagcttctggctcccgtggagggaaggatggcagagacccttaaccagaaattgcacgtagcaaacgtgttggaggacgacccaggatacctgccacatgtttatagcgaagagggagaatgcggcggcgcgccaagcctttccagcctggcctctctcgaacaggagcttcagccagacctgctcgattctctgggctccaaggcgacgccctttgaggagatctattcagagagcggcgtgcctagttag

SEQ ID NO: 295446 - DNA, 375 bp, Artificial Sequence
  derived and/or modified sequence
atgaagcctctgatctggacctggagcgatgtggaggggcagagacccgctctattgatctgcactgctgctgctggtcccacacagggtgtcaaggcctacccagacgccaccatgcatcgtcagcttctagcccctgtggaggggcgaatggccgagacgctcaaccagaaactgcatgtggctaatgtgctcgaagatgatccgggttacctcccccacgtatattccgaagagggcgaatgtggcggtgcgccatccttgagcagtttggcaagtctggagcaggagttgcagcccgacctgttggacagtttggggagcaaagccaccccattcgaggagatatattccgaaagtggcgtaccatcctag

SEQ ID NO: 295447 - DNA, 1931 bp, Artificial Sequence
  derived and/or modified sequence
tggcaaggctaataagaaagcagcttttccaagaaacaatacaatattactggccagatagtattattgattaattcaacaaacagttatgtagcatctactggtaccctggaactgtgctgaactttatagctacacagatgactaagacgcaatttggccttgccagttcatgactgagttatacatgaacagaacaagatcctcatgaaacctctgatatggacatggtcagatgttgaaggccagaggccggctctgctcatctgcacagctgcagcaggacccacgcagggagttaaggcttacccagatgccacaatgcacagacaactcctggctccggtggaaggaaggatggcagagacattgaatcagaaactccatgttgccaatgtgctggaagatgaccccggctacctacctcacgtctacagcgaggaaggggagtgtggaggggccccatccctcagctctctggccagcttggaacaggagttgcaacctgatttgctggactctttgggttcaaaagcgactccgtttgaggaaatatattcagagtcaggtgttccttcctaaaaaaaaaagtctattttggagaattgaaataattcatggaagggaatcactattcagggatttttcccctttgctcttcttttccctccttaaaagaaaaattaccttctagtcctaggatgaggacacactattagtttgaattaaatgctttgatattctcagatcagccatcttgaaccaaagcaaaaccacaagttacactttcttaaaatttgatttgtcatattttctagagaaacttgaatttaattgtgttattcttagcttccactggcagcctagctttgagggtaaatgaaaatataacccatagattacccagccacttgggaacagcaggtaatactgaagaaaaataaaaatagattttgaaaacgttacttacatttctatgattatgattctgcttccatttaagggaaaacttaggtaaatagagaaattttttctataacatttgtagtcagtatttgaagtgattttttaaaaaataagtattggtccctgttcactttttgattagataaatagataaaatatgttatcttgagaaaaatgattatgctgaaagctttataaacagtatactctttaaaaaatgaagagctgacataatttaacttgtatgtattatgtaagtaaaagagttaggagcctttgaatgagtaagttctgattagattttatctttaaacaaaaccacaaaatttaattggtttttacttgtccacttactgctagtgtcagtttcaggggaagaaatggtttcttttaaaaatcttaataggggacatatgccctaaaaatagtcagttttctagtctgagtaatagataagagactgactaagcaaagtttaaaatgctatttggacactttaatgcacatattggatatctaaaagtctacagccatataaaaattttatataattaatgagcaaatgccgtctctcatgccctaaaataaatcagtagaaacatgtttgctggtgaatcagtgaagcattatgttaaacagtgagttacagctcagagttaaaactttctccttctttttgaagaagctgtgcaaatacttctttttaaggagatctggccttttcctacctggttacctcagtcttcctctgctttgggaagctgaaaaagaagaaaaatcacatttaaagcactggaatgtctgaatgggacgcttgaatgtgtagaacagctgtactgatcctagcatgactcagaggacagtctagggcattttctgggtaattcaggataaaagtatttttttttttaagaaaaatacatgtttttggacaacaaaacaaagtaaacattagtttattcgat

SEQ ID NO: 295448 - protein, 345 aa, Artificial Sequence
  derived and/or modified sequence
MAPPGSSTVFLLALTIIASTWALTPTHYLTKHDVERLKASLDRPFTNLESAFYSIVGLSSLGAQVPDAKKACTYIRSNLDPSNVDSLFYAAQASQALSGCEISISNETKDLLLAAVSEDSSVTQIYHAVAALSGFGLPLASQEALSALTARLSKEETVLARVWSTVLESRSLFSKRTVQALQTASHLSQQADLRSIVEEIEDLVARLDELGGVYLQFEEGLETTALFVAATYKLMDHVGTEPSIKEDQVIQLMNAIFSKKNFESLSEAFSVASAAAVLSHNRYHVPVVVVPEGSASDTHEQAILRLQVTNVLSQPLTQATVKLEHAKSVASRATVLQKTSFTPVG

SEQ ID NO: 295449 - protein, 345 aa, Artificial Sequence
  derived and/or modified sequence
VSPQGSSTVFLLALTIIASTWALTPTHYLTKHDVERLKASLDRPFTNLESAFYSIVGLSSLGAQVPDAKKACTYIRSNLDPSNVDSLFYAAQASQALSGCEISISNETKDLLLAAVSEDSSVTQIYHAVAALSGFGLPLASQEALSALTARLSKEETVLARVWSTVLESRSLFSKRTVQALQTASHLSQQADLRSIVEEIEDLVARLDELGGVYLQFEEGLETTALFVAATYKLMDHVGTEPSIKEDQVIQLMNAIFSKKNFESLSEAFSVASAAAVLSHNRYHVPVVVVPEGSASDTHEQAILRLQVTNVLSQPLTQATVKLEHAKSVASRATVLQKTSFTPVG

SEQ ID NO: 295450 - protein, 138 aa, Artificial Sequence
  derived and/or modified sequence
ELDTSERKIEFDSASGTYTLYLIIGDATLKNPILWNVADVVIKFPEEEAPSTVLSQNLFTPKQEIQWIRIGANVSNFTFAPSTIIFHLGHAAMLGLMYVYWTQLNMFQTLKYLAILGSVTFLAGNRMLAQQAVKRTAE

SEQ ID NO: 295451 - protein, 138 aa, Artificial Sequence
  derived and/or modified sequence
ELDTSERKIEFDSASGTYTLYLIIGDATLKNPILWNVADVVIKFPEEEAPSTVLSQNLFTPKQEIQWIRIGANVSNFTFAPSTIIFHLGHAAMLGLMYVYWTQLNMFQTLKYLAILGSVTFLAGNRMLAQQAVKRTAH

SEQ ID NO: 295452 - protein, 167 aa, Artificial Sequence
  derived and/or modified sequence
MQRTVQALQTASHLSQQADLRSIVEEIEDLVARLDELGGVYLQFEEGLETTALFVAATYKLMDHVGTEPSIKEDQVIQLMNAIFSKKNFESLSEAFSVASAAAVLSHNRYHVPVVVVPEGSASDTHEQAILRLQVTNVLSQPLTQATVKLEHAKSVASRATVLQKTS

SEQ ID NO: 295453 - DNA, 1038 bp, Artificial Sequence
  derived and/or modified sequence
gtctcaccacaaggtagctctacagtgtttctgcttgccctgactattattgcctctacatgggccctgacacctacacactacttgacgaaacacgatgttgaacgactgaaggcctctcttgatcgtccttttactaatctagagtctgctttctactctatcgtcggactttcatctctcggcgcccaggtcccagatgccaagaaggcctgtacatatatccgctccaatttagacccatccaatgtcgattccctgttctatgcagctcaggctagccaggccctgagtggatgtgagatctccattagtaatgagactaaagatctcctgctggcggccgtcagtgaagactccagcgtgacccaaatatatcacgcagtggctgctctctccggctttggcttgccactggctagtcaagaagcactatctgctctgaccgcacgtctctcgaaagaggagactgttttggcccgggtctggtccacggtgttagagagccgatcactgtttagcaagcgtaccgtccaggccctacagacagcgagccatttgtcacaacaagctgatctgcggtctatagttgaggaaatagaggacctggtcgctcggcttgatgaactgggtggggtgtatttgcagttcgaggaaggcctggaaactaccgctctcttcgtggccgcaacatacaaactcatggaccacgtgggtaccgaacctagcattaaggaagatcaggtcattcaattaatgaatgccattttttccaaaaaaaatttcgagtcactctcggaagcatttagtgtggcttccgctgcagctgttttgtcgcataacaggtatcacgtcccagtggttgtggttcccgaagggtccgcctctgacactcatgagcaggctattctaaggctgcaggtcactaatgtgttgtctcagcctctcacccaggcgaccgtaaaactggagcatgccaaaagtgtcgcatctcgggcaacagtcctccaaaaaacttcatttactcccgtggggtag

SEQ ID NO: 295454 - DNA, 1038 bp, Artificial Sequence
  derived and/or modified sequence
atggcccccccaggttcatccacagtgttcctgctggctttaaccatcattgcaagcacctgggctctgacaccgactcactatttgaccaagcacgacgtggaaagactcaaagccagcctcgacaggcccttcaccaatcttgaatccgcattttactccattgttgggctgtcaagtctgggcgcacaagtgcccgacgctaagaaagcttgtacctatatccgctctaatctggacccgtcaaatgtggacagtctgttttacgctgcccaggcgagtcaggccttatcagggtgtgagattagcatatccaacgagacaaaagatctgttgttagctgcagtgtctgaagacagttccgtcacacagatctaccacgccgtggccgctcttagtggtttcggcttgcctcttgcctcgcaggaggccttgagcgcccttacggctaggttatccaaagaggagaccgtcctcgcacgggtgtggagcaccgttctggagagcaggtccctgttttccaaacggactgtacaagcactccagacagccagccatctttctcaacaggcagacctgagaagcatcgttgaagaaatcgaagatctggtcgcgcggctggacgagctggggggtgtgtacctgcaatttgaggagggattggagactacagcactcttcgtggctgcaacctataaacttatggaccacgttggcactgaaccgagtattaaagaagatcaggtgatacagctgatgaacgcaattttttctaaaaagaacttcgagtctctgtccgaagcttttagtgtggcttctgctgctgctgtgctcagccacaatagataccatgtgccagtggttgtggtgcccgagggctctgcctccgatacacatgaacaggccatcctccgcttgcaagtcacaaatgttttgtcccaacccctgacacaggccaccgtcaagctggagcacgctaaatctgtagccagtagggccactgttctacagaaaacgtcctttacccccgtgggctag

SEQ ID NO: 295455 - DNA, 417 bp, Artificial Sequence
  derived and/or modified sequence
gaacttgacactagtgagcggaagattgaatttgatagcgcttcaggtacttatacactatatctgattataggggacgcgaccctgaagaatccaatcctatggaatgtggctgatgtagttatcaaatttcccgaagaagaagcgccttcgactgtattgagccagaaccttttcactccaaagcaggaaattcaatggatccggatcggcgcgaacgtctcgaactttacattcgctcctagcaccatcatctttcatctgggacatgccgcaatgctgggcttaatgtatgtatactggacccaactgaacatgttccagaccctgaagtatctcgctatcctggggtcggtgacctttctcgcgggcaaccggatgctcgcccagcaggccgtcaagagaaccgctgagtag

SEQ ID NO: 295456 - DNA, 417 bp, Artificial Sequence
  derived and/or modified sequence
gagctggacacaagtgaacggaaaatcgaatttgactcagcgagcggcacatacacgttgtatcttattatcggcgatgccacactgaagaacccaatcttatggaacgtggctgatgttgtaataaagttccccgaggaggaggctccaagcacagtgctgagccaaaacttgttcacccccaagcaagaaattcagtggattagaatcggcgcaaacgtttctaactttacttttgcccctagtaccatcatatttcatctaggtcatgccgccatgctagggctaatgtatgtctactggacccagctcaacatgttccaaacactgaaatacctggccatattgggatcagtcactttcctggctggaaaccggatgctggcacaacaggctgtcaaacgcacagcacactag

SEQ ID NO: 295457 - DNA, 504 bp, Artificial Sequence
  derived and/or modified sequence
atgcaacggaccgtgcaagctctgcagacggcctctcacctctcccagcaggccgatctccggtctattgtggaagagattgaggatctcgtggccagactggatgaactgggaggggtctatctgcagtttgaggagggtctcgagaccaccgccctgtttgtggccgctacctataagctcatggatcacgtcggaactgagccgagcatcaaggaagaccaggttattcagctgatgaacgccatcttctccaagaagaatttcgaaagccttagcgaagcgttctccgtagcctctgccgctgccgtgctgagccataacaggtatcacgtgcccgtcgttgtcgtgccagaggggagtgccagtgatacccacgagcaagcgatcctcaggctgcaggtgacaaatgttctcagccagcccctgacccaggccacagttaaactggaacatgcaaaatcagtggcatctcgagctacggtcctgcagaagacttcttag

SEQ ID NO: 295458 - DNA, 1038 bp, Artificial Sequence
  derived and/or modified sequence
gtgagcccccagggcagcagcaccgtcttcctgctggccctgaccatcatcgccagcacctgggccctgacccccacccactacctgaccaagcatgatgtggagcggctgaaggccagcctggaccggcccttcaccaacctggagagcgccttctacagcatcgtgggcctgagcagcctgggcgcccaggtgcctgatgccaagaaggcctgcacctacatccgcagcaacctggaccccagcaatgtggacagcctcttctacgccgcccaggccagccaggccctgagcggctgtgagatcagcatcagcaatgagaccaaggacctgctgctggccgctgtgtctgaggacagctctgtgacccagatctaccacgctgtggccgccctgagcggcttcggcctgcccctggccagccaggaggccctgagcgccctgacagcccggctgagcaaggaggagaccgtgctggcccgggtgtggagcacagtgctggagagccgcagcctcttcagcaagaggacagtgcaggccctgcagacagccagccacctgagccagcaggccgacctgcggagcatcgtggaggagattgaggacctggtggcccggctggatgagctgggcggcgtgtacctgcagtttgaggagggcctggagaccacagccctgtttgtggccgccacctacaagctgatggaccacgtgggcacagagcccagcatcaaggaggaccaggtgatccagctgatgaatgccatcttcagcaagaagaactttgagagcctgtctgaggccttctctgtggccagcgctgctgctgtgctgagccacaaccgctaccacgtgcctgtggtggtggtgcctgagggcagcgccagtgacacccatgagcaggccatcctgcggctgcaggtgaccaacgtgctgagccagcccctgacccaggccaccgtgaagctggagcacgccaagtctgtggccagccgggccaccgtgctgcagaagaccagcttcacccctgtgggctag

SEQ ID NO: 295459 - DNA, 1038 bp, Artificial Sequence
  derived and/or modified sequence
atggcccctcctggcagcagcaccgtcttcctgctggccctgaccatcatcgccagcacctgggccctgacccccacccactacctgaccaagcatgatgtggagcggctgaaggccagcctggaccggcccttcaccaacctggagagcgccttctacagcatcgtgggcctgagcagcctgggcgcccaggtgcctgatgccaagaaggcctgcacctacatccgcagcaacctggaccccagcaatgtggacagcctcttctacgccgcccaggccagccaggccctgagcggctgtgagatcagcatcagcaatgagaccaaggacctgctgctggccgctgtgtctgaggacagctctgtgacccagatctaccacgctgtggccgccctgagcggcttcggcctgcccctggccagccaggaggccctgagcgccctgacagcccggctgagcaaggaggagaccgtgctggcccgggtgtggagcacagtgctggagagccgcagcctcttcagcaagaggacagtgcaggccctgcagacagccagccacctgagccagcaggccgacctgcggagcatcgtggaggagattgaggacctggtggcccggctggatgagctgggcggcgtgtacctgcagtttgaggagggcctggagaccacagccctgtttgtggccgccacctacaagctgatggaccacgtgggcacagagcccagcatcaaggaggaccaggtgatccagctgatgaatgccatcttcagcaagaagaactttgagagcctgtctgaggccttctctgtggccagcgctgctgctgtgctgagccacaaccgctaccacgtgcctgtggtggtggtgcctgagggcagcgccagtgacacccatgagcaggccatcctgcggctgcaggtgaccaacgtgctgagccagcccctgacccaggccaccgtgaagctggagcacgccaagtctgtggccagccgggccaccgtgctgcagaagaccagcttcacccctgtgggctag

SEQ ID NO: 295460 - DNA, 417 bp, Artificial Sequence
  derived and/or modified sequence
gagctggacaccagcgagaggaagattgaatttgattctgccagcggcacctacaccctgtacctgatcattggagatgccaccctgaagaaccccatcctgtggaatgtggctgatgtggtgatcaagtttcctgaggaggaggcccccagcacagtgctgagccagaacctcttcacccccaagcaggagatccagtggatccgcatcggggccaacgtgagcaacttcacctttgcccccagcaccatcatcttccacctgggccatgctgccatgctgggcctgatgtatgtgtactggacccagctgaacatgttccagaccctgaagtacctggccatcctgggctctgtgaccttcctggccggcaacaggatgctggcccagcaggccgtgaagaggacagctgagtag

SEQ ID NO: 295461 - DNA, 417 bp, Artificial Sequence
  derived and/or modified sequence
gagctggacaccagcgagaggaagattgaatttgattctgccagcggcacctacaccctgtacctgatcattggagatgccaccctgaagaaccccatcctgtggaatgtggctgatgtggtgatcaagtttcctgaggaggaggcccccagcacagtgctgagccagaacctcttcacccccaagcaggagatccagtggatccgcatcggggccaacgtgagcaacttcacctttgcccccagcaccatcatcttccacctgggccatgctgccatgctgggcctgatgtatgtgtactggacccagctgaacatgttccagaccctgaagtacctggccatcctgggctctgtgaccttcctggccggcaacaggatgctggcccagcaggccgtgaagaggacagcccactag

SEQ ID NO: 295462 - DNA, 504 bp, Artificial Sequence
  derived and/or modified sequence
atgcagaggacagtgcaggccctgcagacagccagccacctgagccagcaggccgacctgcggagcatcgtggaggagattgaggacctggtggcccggctggatgagctgggcggcgtgtacctgcagtttgaggagggcctggagaccacagccctgtttgtggccgccacctacaagctgatggaccacgtgggcacagagcccagcatcaaggaggaccaggtgatccagctgatgaatgccatcttcagcaagaagaactttgagagcctgtctgaggccttctctgtggccagcgctgctgctgtgctgagccacaaccgctaccacgtgcctgtggtggtggtgcctgagggcagcgccagtgacacccatgagcaggccatcctgcggctgcaggtgaccaacgtgctgagccagcccctgacccaggccaccgtgaagctggagcacgccaagtctgtggccagccgggccaccgtgctgcagaagaccagctag

SEQ ID NO: 295463 - DNA, 1038 bp, Artificial Sequence
  derived and/or modified sequence
gtgagcccccagggcagcagcaccgtgttcctgctggccctgaccattattgcctctacttgggctctgacgccaacacattacctgacaaaacacgatgtcgaaagactgaaagccagtcttgacagaccatttaccaacctcgaatctgctttttactcaatcgtaggattgtcttctctgggcgcgcaggtgcctgatgccaagaaagcctgcacctatatccgatccaaccttgacccttcaaacgttgattcactgttttatgccgctcaggccagccaggcactttcaggatgcgaaatttcaatttccaatgaaactaaagatctgctgctggcagctgtgtccgaagacagctccgttacgcagatctaccacgcagtggccgctctgtctgggttcggtctacccctggcctcccaagaggctctcagcgccctgactgctcgcctgtcaaaggaggaaaccgttctcgcccgagtctggtcaactgtgctagaaagccggtctttgttctctaagagaactgttcaggccctgcagaccgccagccatctttcccaacaggctgatttgagatcaatcgtagaggagatcgaggacttggtggccagactcgatgagctgggaggggtgtacctgcagttcgaggaggggctcgaaaccacggccctgttcgttgctgcaacttacaagttaatggaccatgtggggacggagccatcgatcaaggaggatcaagtgatccagctgatgaatgcaatttttagcaagaagaactttgagagcttgtccgaagccttttcagttgcctctgcagcggcggtgctttcccacaatagataccacgtcccggtggtagtagtacctgaagggtctgcaagcgatacacacgaacaggcaatcttgcgcctgcaagtgactaatgtgttgagccaacctctgacccaggctacagtgaagctggagcacgctaagtccgtcgcaagtagggctactgtgctgcagaaaaccagtttcacaccggtcggatag

SEQ ID NO: 295464 - DNA, 1038 bp, Artificial Sequence
  derived and/or modified sequence
atggccccccccggcagcagcaccgtgttcctgctggccctgaccatcatcgcctccacatgggctctgacaccaacccactatttaaccaaacacgatgtagagcgactgaaggcatcactggatagaccctttaccaatctggagagcgccttctattccattgtggggttgtccagtcttggggctcaggtccctgacgcaaagaaggcatgtacatatatccgctctaatctggatcccagtaacgtggatagtctgttttacgctgcccaagcctcacaggcactctccggatgcgagatcagcatttcaaacgaaaccaaggacctcctgctcgctgccgtatcagaagattcctctgtcacccaaatctaccacgctgttgcagcgctaagcggcttcggcctgccccttgcaagccaggaagccctgtctgccctaaccgcaaggctctccaaagaagagacagttctcgcccgcgtttggtccaccgtcttagagagcagaagtctgttcagtaagagaactgtgcaggcccttcaaacagcttcccacctgtcccaacaggccgatctccgttccattgtcgaggagatcgaggatcttgtggcgcgactagatgagctcggcggggtgtacctgcaatttgaagaggggctagaaactacggcgctttttgtggccgctacctacaaattgatggatcacgttggtaccgagcccagcatcaaggaagaccaggtgattcagctgatgaatgctatattcagcaagaagaactttgagagcctgtccgaggccttttccgtggctagcgctgccgccgtcctatcgcacaataggtaccatgtgcccgtcgtggttgtgcctgaaggctctgccagtgatacacacgagcaggctattttgcgcttgcaagtaacaaacgtcctctctcagccactaactcaggctacagttaaattggagcacgccaaatctgtcgcttcccgcgctaccgtcctacagaagacaagctttacccccgtaggatag

SEQ ID NO: 295465 - DNA, 417 bp, Artificial Sequence
  derived and/or modified sequence
gagctggacaccagcgagcggaagatcgagttcgacagcgccagcgggacctacactttgtatctgataataggagacgcaacgctgaaaaatccgattttgtggaacgtcgccgacgttgtgatcaagtttcccgaggaggaggctccttcaactgttctctcgcaaaatttattcacaccaaaacaggaaatccagtggatccggattggggccaatgtaagtaactttacgtttgcaccttcaacgatcattttccacctgggtcacgcagctatgctgggcctgatgtacgtgtactggacccagcttaacatgttccaaaccctgaaatatctggccatcctgggcagtgttacatttttagccgggaaccgaatgctagcccagcaggcagtaaaacgaacagccgaatag

SEQ ID NO: 295466 - DNA, 417 bp, Artificial Sequence
  derived and/or modified sequence
gagctggacaccagcgagcggaagatcgagttcgacagcgccagcggcacgtacactctgtatctgataattggagatgccactttaaagaatccaatcctttggaatgtggcggatgtggttattaagtttccagaagaggaagccccctcaactgttctttctcagaatttgttcacacccaagcaggaaatacagtggattagaatcggcgcgaatgtaagtaacttcacattcgcgccttctactattatctttcacctaggccacgcagcgatgctggggttgatgtacgtttactggactcaattaaatatgttccagactctgaagtatctcgctattctcgggagcgtgacatttctggcaggtaatagaatgcttgcgcagcaagctgtaaagcggactgcccattag

SEQ ID NO: 295467 - DNA, 504 bp, Artificial Sequence
  derived and/or modified sequence
atgcagcggaccgtgcaggccctgcagaccgccagccacctgagccagcaggccgatcttcgctctattgtcgaggaaatagaagaccttgtcgcccgccttgatgaactcggaggagtgtaccttcagttcgaggagggcctagagacaaccgccctctttgtggctgccacgtacaagctgatggaccacgttgggactgaacccagcattaaagaagaccaggttatccagcttatgaacgccatattcagcaagaaaaatttcgagtccctttccgaggcttttagcgtggctagcgccgcggctgttttatcccataatcggtaccatgtgccagtggtggtcgttccggaaggctcggctagcgacactcatgaacaagcaatcctgcgactgcaagtgactaacgtacttagtcaaccacttacccaggccacagtcaagctcgagcatgcaaaatcagtggcctcacgtgccaccgttctacagaagacttcctag

SEQ ID NO: 295468 - DNA, 1038 bp, Artificial Sequence
  derived and/or modified sequence
gtttccccccagggcagtagtactgtgtttctcctggcgctgaccattatcgcctcgacatgggccttgactcctacccattacctaactaagcatgatgtggagaggctcaaggctagcctagacaggccttttaccaatctcgagagtgccttttattcgattgttggcctgtcctccctgggggctcaggttccagatgcaaagaaggcctgtacgtatatcagaagtaacttagatcccagtaacgtcgacagcctgttttacgccgctcaggcctcgcaggcccttagtggctgcgaaatatcaattagtaacgaaaccaaggacctcctcttagcggctgtatccgaagactcaagcgtaactcagatttaccacgcggtagccgcactctctgggttcgggctgcccttggcctctcaggaagccctctcagccctcacagcccgtctctcaaaggaggaaactgtgctggccagagtttggagtactgttcttgaaagtaggtccttgttttctaaaaggactgtacaagctcttcagaccgcttctcacctgtcccaacaggccgacttacgcagcatcgttgaggagatcgaggacctcgtggcgagactcgatgagctggggggagtctatttgcagtttgaggaaggcctggagaccactgcgttgtttgtggccgcaacgtataagcttatggatcatgtcgggactgagcctagtatcaaggaggatcaggtgatacagctcatgaacgcgatcttctctaaaaaaaacttcgagtcactcagtgaggcgttctcggtggcctctgctgctgccgtgctaagccacaataggtaccacgtgcccgttgttgtggtgccagagggatcggccagcgatacccacgagcaggcgatcctgaggttgcaggtgaccaacgtcttatcacagccgctgacacaggccacggtgaagctggaacatgcaaaaagcgttgcaagcagagctaccgtgcttcaaaagacaagtttcactcctgttgggtag

SEQ ID NO: 295469 - DNA, 1038 bp, Artificial Sequence
  derived and/or modified sequence
atggcaccaccgggtagctcgaccgtgttcctgctggcacttaccattattgcatccacctgggcacttaccccaacccattacctaaccaaacacgacgtagagcgactgaaagcttccctggaccggccattcacgaatcttgagtccgcattctactccatcgtaggactgtcttcactgggtgcgcaggttccagatgcgaaaaaggcatgcacctatattcgaagtaacctggatcctagtaatgtggactcactgttctacgccgctcaagcttcccaggctctctctggatgtgagatatccatcagcaacgaaacaaaggacttgctcctggccgcagtcagcgaggatagcagcgtgacgcagatttaccatgcggtggccgctctgtcaggctttggattgcctctggcaagtcaggaagctttgtccgccctcactgccaggttgagcaaggaggagactgtgctggctcgcgtctggtcaaccgtgttagagagccgatcgttattctctaaacggaccgtccaggccctacaaaccgcgagtcacttgagtcagcaagcagacctgagatcgatcgtcgaggagattgaagatctcgtcgctcgcttggatgaacttggcggtgtctatctgcaatttgaagaaggcctcgaaacgaccgctctatttgtggctgccacatacaaacttatggatcacgtggggaccgagcctagtatcaaggaagaccaggtcatacagctcatgaatgccatttttagcaagaaaaacttcgagagtctatccgaggcttttagtgttgccagtgctgcagccgtcctgtctcataacaggtatcacgttcccgttgtcgttgtccctgaggggagcgcatccgacacccacgagcaggctattttgaggctccaggtgaccaatgtgctttctcagcccttgacgcaagctaccgttaagctggagcacgctaagtcagtcgcaagcagggctactgtcctgcagaaaaccagcttcacccccgttggttag

SEQ ID NO: 295470 - DNA, 417 bp, Artificial Sequence
  derived and/or modified sequence
gagctggatactagcgagcggaagattgagtttgattctgccagcggtacctacactctctacttgatcatcggtgatgccaccctgaagaacccaatcctctggaacgtggccgacgtggtgataaaattcccagaagaagaggctccgagcacagttctcagccaaaatctgttcacaccaaaacaggagatacagtggattaggattggagccaacgtgtctaatttcacttttgccccatccaccatcatcttccatctgggacacgcagcaatgctcggcctgatgtacgtttattggacacagctcaatatgtttcagaccttgaagtacctggcgattctggggtccgtgacatttcttgctggaaatcgaatgttggcccagcaagcggtaaagaggactgctgagtag

SEQ ID NO: 295471 - DNA, 417 bp, Artificial Sequence
  derived and/or modified sequence
gaactagatacttctgaaagaaaaattgaatttgactccgcctcagggacatacaccttgtatctgatcattggcgacgctacgctgaaaaaccccattttgtggaacgtcgccgatgttgtgataaaatttcccgaggaggaggcgccatctacagttctgtcccaaaacctctttacccccaagcaggaaattcagtggattaggatcggtgcgaacgtttccaacttcacattcgcaccttccaccattatattccacctgggacatgctgccatgctggggctgatgtatgtctactggacccagctgaatatgtttcagacactgaagtatctagccatccttgggagcgtgacgttcctcgctggcaacagaatgcttgcgcagcaggccgtaaagcgcaccgctcactag

SEQ ID NO: 295472 - DNA, 504 bp, Artificial Sequence
  derived and/or modified sequence
atgcagcgcaccgtccaggctcttcagacagcttctcatctttcccaacaggccgacctgcgctctatcgtcgaggagattgaagatttggtcgccaggctggacgaattaggaggcgtctacctgcagttcgaagagggactcgaaacaaccgcgttgttcgtcgccgcaacatacaagcttatggaccacgttgggacagaacctagcatcaaggaggatcaggtcatacagttaatgaacgccatattttccaaaaagaactttgagagtttaagtgaggcattctcagtggctagcgcagctgctgtcctgtcgcataacagataccatgtgccagtcgtggttgtgcccgaaggctcagccagtgacacccacgagcaggccattctgcggttgcaggtaacaaatgttctatcccagccactgacccaggccacagtgaaactagaacatgcgaaatcagtggcttctcgcgctacggttttgcagaaaacctcttag

SEQ ID NO: 295473 - DNA, 1038 bp, Artificial Sequence
  derived and/or modified sequence
gtttccccccaaggttcaagcactgtcttcctgttggccctgacaatcatagccagcacctgggctctgacgcccactcactacctcaccaagcatgacgtggagagactaaaagcctcgctggatcgccctttcacaaatttggaatctgccttctactccatcgtgggactcagcagccttggtgctcaggtgccagatgcaaagaaagcatgtacctacatcagatctaaccttgatcccagcaatgtggattccctcttctacgctgcccaggccagccaggccctctcaggatgtgagatctctatttcaaatgagaccaaagatctgcttctggcagctgtcagtgaggactcatctgttacccagatctaccatgcagttgcagctctaagtggctttggccttcccttggcatcccaagaagcactcagtgcccttactgctcgtctcagcaaggaggagactgtgctggcgagggtgtggagcaccgttctggaatcccgttcgttgtttagcaagagaacagtccaggctctgcagacagcatcccacctgtcccagcaggctgacctgaggagcatcgtggaggagattgaggaccttgttgctcgcctggatgaactcgggggcgtgtatctccagtttgaagaaggactggaaacaacagcgttatttgtggctgccacctacaagctcatggatcatgtggggactgagccatccattaaggaggatcaggtcatccagctgatgaacgcgatcttcagcaagaagaactttgagtccctctccgaagccttcagcgtggcctctgcagctgctgtgctctcgcataatcgctaccacgtgccagttgtggttgtgcctgagggctctgcttccgacactcatgaacaggctatcttgcggttgcaagtcaccaatgttctgtctcagcctctgactcaggccactgttaaactagaacatgctaaatctgttgcttccagagccactgtcctccagaagacatccttcacccctgtagggtaa

SEQ ID NO: 295474 - DNA, 1073 bp, Artificial Sequence
  derived and/or modified sequence
agcccgcggctcggactccggcgggacctgctcggaggaatggcgccgccgggttcaagcactgtcttcctgttggccctgacaatcatagccagcacctgggctctgacgcccactcactacctcaccaagcatgacgtggagagactaaaagcctcgctggatcgccctttcacaaatttggaatctgccttctactccatcgtgggactcagcagccttggtgctcaggtgccagatgcaaagaaagcatgtacctacatcagatctaaccttgatcccagcaatgtggattccctcttctacgctgcccaggccagccaggccctctcaggatgtgagatctctatttcaaatgagaccaaagatctgcttctggcagctgtcagtgaggactcatctgttacccagatctaccatgcagttgcagctctaagtggctttggccttcccttggcatcccaagaagcactcagtgcccttactgctcgtctcagcaaggaggagactgtgctggcgagggtgtggagcaccgttctggaatcccgttcgttgtttagcaagagaacagtccaggctctgcagacagcatcccacctgtcccagcaggctgacctgaggagcatcgtggaggagattgaggaccttgttgctcgcctggatgaactcgggggcgtgtatctccagtttgaagaaggactggaaacaacagcgttatttgtggctgccacctacaagctcatggatcatgtggggactgagccatccattaaggaggatcaggtcatccagctgatgaacgcgatcttcagcaagaagaactttgagtccctctccgaagccttcagcgtggcctctgcagctgctgtgctctcgcataatcgctaccacgtgccagttgtggttgtgcctgagggctctgcttccgacactcatgaacaggctatcttgcggttgcaagtcaccaatgttctgtctcagcctctgactcaggccactgttaaactagaacatgctaaatctgttgcttccagagccactgtcctccagaagacatccttcacccctgtagg

SEQ ID NO: 295475 - DNA, 748 bp, Artificial Sequence
  derived and/or modified sequence
cgaagttgaaggtgacaaccggtatattgcaaataccgtagagctcagagtcaagatctccactgaagttggcatcacaaatgttgatctttccaccgtggataaggatcagagcattgcacccaaaactacccgggtgacatacccagccaaagccaagggcacattcatcgcagacagccaccagaacttcgccttgttcttccagctggtagatgtgaacactggtgctgaactcactcctcaccagacatttgtccgactccataaccagaagactggccaggaagtggtgtttgttgccgagccagacaacaagaacgtgtacaagtttgaactggatacctctgaaagaaagattgaatttgactctgcctctggcacctacactctctacttaatcattggagatgccactttgaagaacccaatcctctggaatgtggctgatgtggtcatcaagttccctgaggaagaagctccctcgactgtcttgtcccagaaccttttcactccaaaacaggaaattcagtggatccggattggtgccaatgtctccaacttcacttttgctcctagcacgattatatttcacctgggacatgctgctatgctgggactcatgtatgtctactggactcagctcaacatgttccagaccttgaagtacctggccatcctgggcagtgtgacgtttctggctggcaatcggatgctggcccagcaggcagtcaagaggacagctgag

SEQ ID NO: 295476 - DNA, 520 bp, Artificial Sequence
  derived and/or modified sequence
gaactggatacctctgaaagaaagattgaatttgactctgcctctggcacctacactctctacttaatcattggagatgccactttgaagaacccaatcctctggaatgtggctgatgtggtcatcaagttccctgaggaagaagctccctcgactgtcttgtcccagaaccttttcactccaaaacaggaaattcagtggatccggattggtgccaatgtctccaacttcacttttgctcctagcacgattatatttcacctgggacatgctgctatgctgggactcatgtatgtctactggactcagctcaacatgttccagaccttgaagtacctggccatcctgggcagtgtgacgtttctggctggcaatcggatgctggcccagcaggcagtcaagagaacagcacattagttccagaagaaagatggaaattctgaaaactgaatgtcaagaaaaggagtcaagaacaattcacagtatgagaagaaaaatggaaaaaaaaaactttatttaa

SEQ ID NO: 295477 - DNA, 791 bp, Artificial Sequence
  derived and/or modified sequence
tgttcctggatgagccacctccatgttgagcctgtaaaactggcctaatatgttctctatgagtcactgcattgctctgcaaatcagataaaacgtcactcgtaggttcaagcactgtcttcctgttggccctgacaatcatagccagcacctgggctctgacgcccactcactacctcaccaagcatgacgtggagagactaaaagcctcgctggatcgccctttcacaaatttggaatctgccttctactccatcgtgggactcagcagccttggtgctcaggtgccagatgcaaagaacagtccaggctctgcagacagcatcccacctgtcccagcaggctgacctgaggagcatcgtggaggagattgaggaccttgttgctcgcctggatgaactcgggggcgtgtatctccagtttgaagaaggactggaaacaacagcgttatttgtggctgccacctacaagctcatggatcatgtggggactgagccatccattaaggaggatcaggtcatccagctgatgaacgcgatcttcagcaagaagaactttgagtccctctccgaagccttcagcgtggcctctgcagctgctgtgctctcgcataatcgctaccacgtgccagttgtggttgtgcctgagggctctgcttccgacactcatgaacaggctatcttgcggttgcaagtcaccaatgttctgtctcagcctctgactcaggccactgttaaactagaacatgctaaatctgttgcttccagagccactgtcctccagaagacatc

SEQ ID NO: 295478 - DNA, 1038 bp, Artificial Sequence
  derived and/or modified sequence
gtgagcccccagggcagcagcaccgtgttcctgctggccctgaccatcatcgccagcacctgggccctgacccccacccactacctgaccaagcacgacgtggagagactgaaggccagcctggacagacccttcaccaacctggagagcgccttctacagcatcgtgggcctgagcagcctgggcgcccaggtgcccgacgccaagaaggcctgcacctacatcagaagcaacctggaccccagcaacgtggacagcctgttctacgccgcccaggccagccaggccctgagcggctgcgagatcagcatcagcaacgagaccaaggacctgctgctggccgccgtgagcgaggacagcagcgtgacccagatctaccacgccgtggccgccctgagcggcttcggcctgcccctggccagccaggaggccctgagcgccctgaccgccagactgagcaaggaggagaccgtgctggccagagtgtggagcaccgtgctggagagcagaagcctgttcagcaagagaaccgtgcaggccctgcagaccgccagccacctgagccagcaggccgacctgagaagcatcgtggaggagatcgaggacctggtggccagactggacgagctgggcggcgtgtacctgcagttcgaggagggcctggagaccaccgccctgttcgtggccgccacctacaagctgatggaccacgtgggcaccgagcccagcatcaaggaggaccaggtgatccagctgatgaacgccatcttcagcaagaagaacttcgagagcctgagcgaggccttcagcgtggccagcgccgccgccgtgctgagccacaacagataccacgtgcccgtggtggtggtgcccgagggcagcgccagcgacacccacgagcaggccatcctgagactgcaggtgaccaacgtgctgagccagcccctgacccaggccaccgtgaagctggagcacgccaagagcgtggccagcagagccaccgtgctgcagaagaccagcttcacccccgtgggctag

SEQ ID NO: 295479 - DNA, 1038 bp, Artificial Sequence
  derived and/or modified sequence
atggccccccccggcagcagcaccgtgttcctgctggccctgaccatcatcgccagcacctgggccctgacccccacccactacctgaccaagcacgacgtggagagactgaaggccagcctggacagacccttcaccaacctggagagcgccttctacagcatcgtgggcctgagcagcctgggcgcccaggtgcccgacgccaagaaggcctgcacctacatcagaagcaacctggaccccagcaacgtggacagcctgttctacgccgcccaggccagccaggccctgagcggctgcgagatcagcatcagcaacgagaccaaggacctgctgctggccgccgtgagcgaggacagcagcgtgacccagatctaccacgccgtggccgccctgagcggcttcggcctgcccctggccagccaggaggccctgagcgccctgaccgccagactgagcaaggaggagaccgtgctggccagagtgtggagcaccgtgctggagagcagaagcctgttcagcaagagaaccgtgcaggccctgcagaccgccagccacctgagccagcaggccgacctgagaagcatcgtggaggagatcgaggacctggtggccagactggacgagctgggcggcgtgtacctgcagttcgaggagggcctggagaccaccgccctgttcgtggccgccacctacaagctgatggaccacgtgggcaccgagcccagcatcaaggaggaccaggtgatccagctgatgaacgccatcttcagcaagaagaacttcgagagcctgagcgaggccttcagcgtggccagcgccgccgccgtgctgagccacaacagataccacgtgcccgtggtggtggtgcccgagggcagcgccagcgacacccacgagcaggccatcctgagactgcaggtgaccaacgtgctgagccagcccctgacccaggccaccgtgaagctggagcacgccaagagcgtggccagcagagccaccgtgctgcagaagaccagcttcacccccgtgggctag

SEQ ID NO: 295480 - DNA, 417 bp, Artificial Sequence
  derived and/or modified sequence
gagctggacaccagcgagagaaagatcgagttcgacagcgccagcggcacctacaccctgtacctgatcatcggcgacgccaccctgaagaaccccatcctgtggaacgtggccgacgtggtgatcaagttccccgaggaggaggcccccagcaccgtgctgagccagaacctgttcacccccaagcaggagatccagtggatcagaatcggcgccaacgtgagcaacttcaccttcgcccccagcaccatcatcttccacctgggccacgccgccatgctgggcctgatgtacgtgtactggacccagctgaacatgttccagaccctgaagtacctggccatcctgggcagcgtgaccttcctggccggcaacagaatgctggcccagcaggccgtgaagagaaccgccgagtag

SEQ ID NO: 295481 - DNA, 417 bp, Artificial Sequence
  derived and/or modified sequence
gagctggacaccagcgagagaaagatcgagttcgacagcgccagcggcacctacaccctgtacctgatcatcggcgacgccaccctgaagaaccccatcctgtggaacgtggccgacgtggtgatcaagttccccgaggaggaggcccccagcaccgtgctgagccagaacctgttcacccccaagcaggagatccagtggatcagaatcggcgccaacgtgagcaacttcaccttcgcccccagcaccatcatcttccacctgggccacgccgccatgctgggcctgatgtacgtgtactggacccagctgaacatgttccagaccctgaagtacctggccatcctgggcagcgtgaccttcctggccggcaacagaatgctggcccagcaggccgtgaagagaaccgcccactag

SEQ ID NO: 295482 - DNA, 504 bp, Artificial Sequence
  derived and/or modified sequence
atgcagagaaccgtgcaggccctgcagaccgccagccacctgagccagcaggccgacctgagaagcatcgtggaggagatcgaggacctggtggccagactggacgagctgggcggcgtgtacctgcagttcgaggagggcctggagaccaccgccctgttcgtggccgccacctacaagctgatggaccacgtgggcaccgagcccagcatcaaggaggaccaggtgatccagctgatgaacgccatcttcagcaagaagaacttcgagagcctgagcgaggccttcagcgtggccagcgccgccgccgtgctgagccacaacagataccacgtgcccgtggtggtggtgcccgagggcagcgccagcgacacccacgagcaggccatcctgagactgcaggtgaccaacgtgctgagccagcccctgacccaggccaccgtgaagctggagcacgccaagagcgtggccagcagagccaccgtgctgcagaagaccagctag

SEQ ID NO: 295483 - protein, 403 aa, Artificial Sequence
  derived and/or modified sequence
MDRSKENCISGPVKATAPVGGPKRVLVTQQFPCQNPLPVNSGQAQRVLCPSNSSQRIPLQAQKLVSSHKPVQNQKQKQLQATSVPHPVSRPLNNTQKSKQPLPSAPENNPEEELASKQKNEESKKRQWALEDFEIGRPLGKGKFGNVYLAREKQSKFILALKVLFKAQLEKAGVEHQLRREVEIQSHLRHPNILRLYGYFHDATRVYLILEYAPLGTVYRELQKLSKFDEQRTATYITELANALSYCHSKRVIHRDIKPENLLLGSAGELKIADFGWSVHAPSSRRTTLCGTLDYLPPEMIEGRMHDEKVDLWSLGVLCYEFLVGKPPFEANTYQETYKRISRVEFTFPDFVTEGARDLISRLLKHNPSQRPMLREVLEHPWITANSSKPSNCQNKESASKQS

SEQ ID NO: 295484 - protein, 347 aa, Artificial Sequence
  derived and/or modified sequence
MDRSKENCISGPVKATAPVGGPKRVLVTQQFPCQNPLPVNSGQAQRVLCPSNSSQRIPLQAQKLVSSHKPVQNQKQKQLQATSVPHPVSRPLNNTQKSKQPLPSAPENNPEEELASKQKNEESKKRQWALEDFEIGRPLGKGKFGNVYLAREKQSKFILALKVLFKAQLEKAGVEHQLRREVEIQSHLRHPNILRLYGYFHDATRVYLILEYAPLGTVYRELQKLSKFDEQRTATYITELANALSYCHSKRVIHRDIKPENLLLGSAGELKIADFGWSVHAPSSRRTTLCGTLDYLPPEMIEGRMHDEKVDLWSLGVLCYEFLVGKPPFEANTYQETYKRISRVRRN

SEQ ID NO: 295485 - protein, 189 aa, Artificial Sequence
  derived and/or modified sequence
MDRSKENCISGPVKATAPVGGPKRVLVTQQFPCQNPLPVNSGQAQRVLCPSNSSQRIPLQAQKLVSSHKPVQNQKQKQLQATSVPHPVSRPLNNTQKSKQPLPSAPENNPEEELASKQKNEESKKRQWALEDFEIGRPLGKGKFGNVYLAREKQSKFILALKVLFKAQLEKAGVEHQLRREVEIQSHLR

SEQ ID NO: 295486 - protein, 147 aa, Artificial Sequence
  derived and/or modified sequence
MDRSKENCISGPVKATAPVGGPKRVLVTQQFPCQNPLPVNSGQAQRVLCPSNSSQRIPLQAQKLVSSHKPVQNQKQKQLQATSVPHPVSRPLNNTQKSKQPLPSAPENNPEEELASKQKNEESKKRQWALEDFEIGRPLGKGKFGNV

SEQ ID NO: 295487 - protein, 271 aa, Artificial Sequence
  derived and/or modified sequence
MDRSKENCISGPVKATAPVGGPKRVLVTQQFPCQNPLPVNSGQAQRVLCPSNSSQRIPLQAQKLVSSHKPVQNQKQKQLQATSVPHPVSRPLNNTQKSKQPLPSAPENNPEEELASKQKNEESKKRQWALEDFEIGRPLGKGKFGNVYLAREKQSKFILALKVLFKAQLEKAGVEHQLRREVEIQSHLRHPNILRLYGYFHDATRVYLILEYAPLGTVYRELQKLSKFDEQRTATYITELANALSYCHSKRVIHRDIKPENLLLGSAGELK

SEQ ID NO: 295488 - protein, 79 aa, Artificial Sequence
  derived and/or modified sequence
MDRSKENCISGPVKATAPVGGPKRVLVTQQFPCQNPLPVNSGQAQRVLCPSNSSQRIPLQAQKLVSSHKPVQNQKQKQL

SEQ ID NO: 295489 - protein, 106 aa, Artificial Sequence
  derived and/or modified sequence
MDRSKENCISGPVKATAPVGGPKRVLVTQQFPCQNPLPVNSGQAQRVLCPSNSSQRIPLQAQKLVSSHKPVQNQKQKQLQATSVPHPVSRPLNNTQKSKQPLPSAP

SEQ ID NO: 295490 - DNA, 1212 bp, Artificial Sequence
  derived and/or modified sequence
atggaccgtagcaaggaaaactgtatctcaggaccagtcaaagccacggccccagtgggagggccgaagcgcgtgttggttactcagcaattcccctgtcagaaccctctgcctgtgaacagtggccaagctcaaagagtcctatgcccgtctaacagttctcagcggatccctttgcaggcccagaagctggtgtcctcacataaacccgttcagaaccaaaagcagaagcagctgcaggccacctctgtgccacatccagtctcgagacctcttaataacactcagaaatcaaaacaaccacttccgagtgctcccgagaacaacccggaagaagagctagcgtccaagcagaaaaacgaggagagtaagaagaggcagtgggcccttgaggacttcgagatcggaaggcctctcggcaaggggaaatttggtaacgtctatcttgcaagagaaaagcaaagcaaattcattctcgcactcaaagtactatttaaggctcagttagagaaggctggggtagaacatcagctcaggcgggaggtggaaatccagtcccaccttcggcaccctaacatactccggctctacgggtacttccacgacgccactcgagtgtaccttatcttggagtacgcccccctcggcacagtgtacagggagctgcagaagctctctaaatttgatgagcaacgcacggcgacctatatcaccgaactggctaatgcattgtcttattgtcactccaagcgggtgatacatagggacatcaagccagagaatcttcttttgggatccgctggagagctgaagatcgctgacttcggctggtccgtacacgccccatcaagccggcgaactacactgtgtggtaccctggactacttgcccccagagatgattgaaggccgcatgcacgacgagaaagttgacctttggagcctgggagttctatgctacgaatttctggtcgggaagccacctttcgaggccaatacttatcaagagacctataagcgaatcagtcgagtcgagtttacgtttcctgattttgtaactgagggcgcccgcgatctgattagccgactgctcaagcataacccctctcaacgcccgatgttacgtgaggtcttggaacatccgtggataactgctaattcaagcaaacctagtaactgtcaaaataaggagtcagcctcgaagcagtcatag

SEQ ID NO: 295491 - DNA, 1212 bp, Artificial Sequence
  derived and/or modified sequence
atggataggagtaaggagaattgtatctccggtcctgtgaaggcaaccgcacccgtcggaggccccaagcgggtcctcgtcacccagcaatttccttgccaaaacccgttacctgtcaatagcgggcaggcacagagggtgctatgtccctctaatagtagccagcgcatccctctgcaggcgcagaagctggtgagctcccataagccagtgcaaaaccagaaacaaaagcagttgcaagcaactagtgttccccacccagtgagcaggcccctgaacaatactcagaaaagtaaacagcccctgccatcagcacccgaaaataaccccgaggaagagctggcgtcaaagcagaagaatgaagaaagtaagaaaagacagtgggccttggaggacttcgaaatcggccggcccctggggaagggcaagtttgggaatgtgtacctggcccgggaaaagcaaagcaagtttattcttgcgcttaaagtgctatttaaagcacagcttgaaaaagcgggcgtggaacaccaattgcggcgggaagtggagatccaaagtcacctccgtcatcccaatatcctgcgcctgtatggttatttccacgacgccacaagggtatacctgatcctggagtacgcccctctgggaacagtataccgtgagctgcagaaactcagtaagtttgatgaacagcgaactgctacctacattaccgaactcgcgaatgccctgtcatattgtcacagcaagcgggttatccacagggatatcaagcctgagaatcttttacttggaagcgcgggagagctgaagattgccgactttggctggagtgttcacgctccttcctctaggcgcacaacattgtgcggaaccctggattaccttcctccggaaatgatagagggtcggatgcacgacgaaaaggtcgacctttggagtttgggcgtgctgtgttacgagtttttggtgggcaagccccctttcgaagccaatacctatcaagagacatataagagaattagcagggttgaattcaccttccctgatttcgtgaccgagggcgctagagatctcatatctcggctgttaaagcataacccatcccaaaggccaatgcttcgagaagtcctggaacacccttggatcacagccaactcaagtaagccgtctaactgtcagaacaaagagagcgcgagtaagcagagctag

SEQ ID NO: 295492 - DNA, 1212 bp, Artificial Sequence
  derived and/or modified sequence
atggatcgatcaaaggagaactgcatttctggccccgtcaaggccaccgcaccggttgggggtccaaaaagagtgctcgtaacacagcagttcccttgccagaaccctctaccagtgaattccggacaggctcagcgagtgctttgcccaagcaacagctctcagcgcatccctctgcaagcacagaagctggtgagctctcacaagcccgttcagaaccaaaaacagaagcagcttcaggccactagtgtcccccaccctgtgagtaggcccctgaataacacccagaagtccaaacaaccgctcccttctgccccagagaacaatcccgaggaggaactggcctcaaagcaaaagaatgaggaatcaaagaagagacaatgggcccttgaagacttcgagatcggtaggccactcggaaaaggcaagtttggaaatgtatacctggcccgggagaaacagagtaaatttatcttggctctgaaggtgttgttcaaagcccagcttgagaaagctggggtggagcatcagctgaggagagaagttgaaatccaaagccacctcagacaccccaatatcctgcgactgtatggatatttccacgacgctaccagggtgtatctgatcctggagtacgctcctctcggcacagtctatagggaacttcaaaaactaagcaagttcgacgaacagagaaccgcgacatacataactgagcttgctaacgcgctgagctattgtcactccaaacgggtgattcacagagatattaaacctgagaatctgctcttgggctcagccggcgaactaaagatcgctgattttggctggtccgttcacgccccaagtagtcgacgtaccacactctgtggaaccctggactatcttccgccagaaatgattgagggcaggatgcatgacgaaaaagtggacctgtggtctctgggcgtgttatgctacgaatttttggtgggtaaacccccattcgaagcaaacacatatcaagaaacctataaaagaatttctcgtgtcgagttcaccttcccagacttcgtgactgaaggcgctcgggatctaatttcacgcctgttgaagcacaatcccagtcagcggcccatgctccgcgaggttctggaacacccgtggattactgccaactcatctaaacccagtaactgccaaaataaggaaagtgccagcaaacagtcatag

SEQ ID NO: 295493 - DNA, 1044 bp, Artificial Sequence
  derived and/or modified sequence
atggatcggtctaaagagaattgcatctcggggccagtcaaggccactgcgccagttggcggccccaagcgagtcctcgtgacccagcaatttccctgtcagaatccgctccctgtgaatagcggccaggcacagagagttttgtgcccatccaatagcagtcagaggatccctctccaggcccagaagctcgtgtcatcccataaaccggtgcaaaaccagaagcagaagcagctgcaagcgacaagcgtaccccaccccgtgtcccgccccctgaataacactcagaagtctaagcagcctctgcccagcgcccctgagaataatcccgaggaggagcttgcgtccaaacaaaagaacgaggagtccaaaaaacgccagtgggctctggaagacttcgagattggccggccgttaggaaaggggaagttcggcaacgtgtaccttgctcgggagaagcagtccaagttcattctagctctcaaggttctgttcaaggctcagctggaaaaagccggagtggaacaccagctgagaagggaggtcgagatccagtctcatctgaggcacccaaacatccttcggctgtatgggtattttcacgatgccacacgcgtgtatctgattctcgaatacgctccactgggaacggtgtatcgcgagctccagaagctaagcaagtttgacgaacaaagaacagccacatatattaccgagttagcaaacgctctctcatactgccattccaagcgcgttattcatagagacatcaagccagagaatctgctacttggatctgctggggagctgaagatcgctgactttgggtggtccgtgcatgcccccagtagccgacgcacgacgctgtgtggaacccttgattatcttcctcctgagatgatagagggacggatgcacgacgaaaaggtggatctctggtctctcggcgtgttatgttacgaatttttggtgggcaaacctcccttcgaggctaacacttatcaggagacatacaaacgcatatcccgagtgcgacgcaattag

SEQ ID NO: 295494 - DNA, 1212 bp, Artificial Sequence
  derived and/or modified sequence
atggacagatctaaagagaattgtatctccggccccgttaaagccacagccccggtcgggggcccaaaaagagtgctggttactcagcagtttccttgccaaaatcctctccccgtgaattctggtcaagctcagagggtcttatgtccctccaattcttcccaacggattcctctgcaggcccagaaattagtgtcttctcacaaaccggtgcaaaaccagaagcagaagcaattgcaggctacgagtgtgcctcatcccgtaagtcgaccgcttaataacacacagaaatctaaacagcctctgccttcagctcctgagaataaccctgaggaagagctagctagcaaacagaagaatgaagaatctaaaaagaggcagtgggcccttgaggacttcgagataggacggccactgggaaagggcaaatttggcaatgtctatctagcccgggagaagcagagtaaatttatcctcgccttaaaggttctttttaaagcacagttggagaaagccggcgtagagcaccagcttcggcgggaagtggaaattcagtcccatctccggcaccccaatatactgagactgtacggctatttccacgacgccacccgagtttacctcatcctggagtacgcacctctgggcacggtctatcgggagctccagaaacttagtaaattcgacgagcagaggacagctacgtacatcacagaactcgctaacgccctgagttactgtcattctaaacgggtgatccatagagatattaagcccgaaaatctgttgctggggtcagctggagagcttaagattgcggatttcggctggagcgtgcacgccccaagcagccggcgtactaccctgtgcggtacgctagactacctgccccccgagatgattgagggacgaatgcatgacgagaaggtggatctatggagtttgggcgtgctgtgttacgagttccttgtcggaaagccccccttcgaggccaatacctaccaagagacatataagcgaatcagccgggtggaattcacctttccagatttcgtgacagaaggcgcccgagatctgatcagccggctactgaagcacaatccatcgcagagaccaatgttacgggaggtgctcgaacatccctggatcaccgccaactccagcaaacctagtaactgtcagaataaggaatcagcctccaaacagtcctag

SEQ ID NO: 295495 - DNA, 1212 bp, Artificial Sequence
  derived and/or modified sequence
atggataggagtaaagaaaactgcatctctggtcccgtgaaggcaacagcccccgtgggcggaccgaagcgcgttttggtcacacagcagttcccgtgtcaaaatcctctacctgtgaactcaggccaggctcagcgagtgctctgcccgtcaaattcgagccagagaattccacttcaagcacagaaattggtgtcatcccataaaccagtgcagaaccaaaagcagaaacagctgcaggccacgagcgttccacatccagtgtcaagacctctgaacaatacccagaagagcaagcagcccttgccatctgcccccgagaataacccagaggaggaactggctagcaaacagaagaatgaagagagcaaaaaacggcagtgggccctcgaagacttcgaaattggcagacccctggggaagggcaagttcggtaatgtctatcttgcccgcgagaagcagtctaagtttatcttagcactcaaggtcctgtttaaagcacagttggaaaaggccggcgttgaacaccagttgaggcgagaagtggagattcaatctcacctccgacacccaaatattctgagattgtacggctacttccacgacgcgacacgcgtgtacctgattctggagtatgccccactgggtaccgtgtaccgggagctgcagaagctaagcaagtttgatgaacaaagaacagctacttacatcactgagctggcaaatgctctctcctattgccatagcaagagagtgatacacagggatataaaacctgagaacctactactggggagcgctggggagctcaaaatcgcagactttggatggtctgtgcatgccccaagttcccggagaacgactctatgcggaacgctagactatttacctcccgagatgattgaaggccgcatgcacgacgagaaggtggacctgtggagcttgggtgtattatgctacgagttcctggtggggaaaccacccttcgaggcaaatacctaccaggaaacttataagagaatctcgagagtagaattcacgtttcccgatttcgtgacagagggagctcgcgatctgattagtaggctgttgaaacacaatccttctcagcgacccatgctgcgggaggtcctggaacacccatggattaccgctaactcctctaaaccctcaaattgccagaacaaagagtctgcttctaaacagtcttag

SEQ ID NO: 295496 - DNA, 1212 bp, Artificial Sequence
  derived and/or modified sequence
atggatcgctctaaggagaactgtatttccggacctgtgaaagcaacggcacccgttggcggacctaagagagtcctggtgacccagcagttcccatgccagaaccccttgcctgtgaacagcgggcaggcccagagagtgctgtgcccctctaactccagccagcgcataccactgcaggctcaaaagctcgttagctctcacaaaccggtccagaaccagaagcagaagcagctccaggcaacctctgtcccacacccagtttcaagaccattgaacaatactcagaaaagcaagcagcccctcccaagtgcccctgagaataatccagaggaggagctggcttccaaacagaagaatgaggagagtaagaagagacaatgggcgctggaagatttcgaaattggccgtccactgggaaagggcaagtttggcaacgtatacctggctcgagaaaagcagtctaagttcatactcgcactcaaagtgcttttcaaggctcagctcgagaaagctggagttgagcatcaactgcgacgggaggtggagatacaatcccatctcagacacccaaatatcctgaggttgtatgggtacttccacgacgctaccagggtatatttgatcttggagtacgccccactggggacagtgtaccgcgaactgcagaaactttcaaaattcgacgagcagagaactgctacttatatcacagaactggctaatgccctgtcatattgccactccaagcgcgtgattcatcgcgacatcaaacccgagaatctgcttctgggttccgcaggagagctcaagatcgcggacttcgggtggagcgtccacgctccttctagtagaaggacgaccctgtgcggaaccctagattacctccccccagaaatgatcgaaggcagaatgcatgacgaaaaagtggatctgtggtccctgggagtcctgtgctacgaattcctggtgggtaaaccccctttcgaggctaatacatatcaggagacctataagaggatttctagggtggagtttaccttccctgacttcgtaaccgagggcgcccgggacttaatttctcgtctgctgaaacataacccatcccagaggcccatgctccgggaagtcctggagcacccttggatcacagctaactcatctaagccctccaactgtcagaacaaggagagtgcctccaagcaatcttag

SEQ ID NO: 295497 - DNA, 1212 bp, Artificial Sequence
  derived and/or modified sequence
atggaccggtctaaggaaaactgcatctccggcccagttaaagccactgcgccagtcggcggtccaaagcgcgtgctcgttacacaacaattcccctgccagaacccactgcccgtgaacagcggacaggcacagcgcgtgctgtgcccttctaattctagccagagaattccccttcaagctcagaaactcgtatcttcacacaagccggtgcagaaccaaaaacagaagcaactgcaagccacctctgtcccccaccctgtcagccgccctctgaataatacccagaagtctaagcaacccctgcctagcgcaccagagaacaatcctgaggaagagttggccagcaagcagaagaatgaggaatcaaagaagcgacagtgggctctcgaagattttgagatcggccgaccacttgggaaaggaaaatttggaaacgtctatctggctcgcgagaagcagagtaaattcatcttggcactcaaagtgctgtttaaggcgcagctagagaaggccggcgtggagcaccaactgcggcgggaagttgagattcagtcccatctccggcaccccaatattctgcgcctctatggttatttccatgatgcgacccgcgtgtatctgattctggaatacgcccctcttgggacagtttatcgggagcttcagaaattgagcaagttcgatgaacagaggactgccacgtacatcactgaactcgccaacgccttaagctactgtcatagtaaacgagtaattcaccgagatatcaaacccgaaaatctccttttgggatcggcaggggaattaaagattgcagatttcggctggagcgtgcatgctcctagcagcaggcgcactaccttatgcggtaccttggattacctcccccccgaaatgatcgagggccggatgcacgacgaaaaagtggatttgtggagcttgggagtcctgtgctatgagtttctggttggcaagccccccttcgaggcgaatacataccaggagacttataagcggatctctcgcgtggagttcacattcccagattttgtgaccgaaggtgcccgcgacctcatcagcagactgctaaaacacaaccctagccagcgccccatgctcagggaagtgctggaacacccctggatcaccgctaacagttccaaaccttctaattgtcagaacaaggagtcggcttccaaacagtcttag

SEQ ID NO: 295498 - DNA, 1212 bp, Artificial Sequence
  derived and/or modified sequence
atggatcgctctaaagagaattgcatttctggccccgtcaaggccacagctccggtaggcggtccaaagcgcgtgctggtcacacagcagttcccatgtcagaatcctttacctgtaaattctggacaggcgcagagggtgttatgtccaagcaattcctcacagcgaattccccttcaggctcaaaaactggtttctagtcataagccagttcagaaccagaagcagaaacagcttcaggctaccagcgtcccacatcccgtctctcgaccacttaataatacacaaaaaagcaagcagccattacctagtgcgccagagaacaatccagaagaagaacttgcatcaaaacagaagaacgaggaatctaaaaaaaggcagtgggctcttgaggacttcgagatcggtaggccccttgggaaaggtaagttcggcaacgtctacctggccagagagaaacagtctaagtttattttagctttgaaagtactatttaaagcccaattagagaaagctggtgttgaacaccagttgaggcgcgaggttgagatccagtcccatctgcgacatcccaacatactgcgcttatacggctacttccacgacgccacgagagtatacttaatcctcgagtatgcccccctggggactgtgtaccgcgagctgcagaagttatcaaaatttgacgagcagagaaccgcgacctacatcactgaactggcaaatgcgctgagctactgtcatagcaaacgagtaatacaccgggacataaaaccagagaacctgctgcttggatcagctggggagttaaaaatcgccgacttcggctggtctgtgcatgccccaagctccaggaggaccacactgtgcggcacactagattatttaccacctgaaatgatcgaggggagaatgcatgatgaaaaagtggacctttggtctctcggcgttctgtgctacgagttcctggtcggcaagccaccttttgaggcaaatacttatcaggaaacatataagcgcataagtagagtcgagttcaccttcccagatttcgtaacagaaggtgcccgggacttaatcagccgtttattgaagcacaacccttcccagagacccatgctccgcgaggtgcttgaacacccttggatcacggcgaattcaagtaaaccctctaattgtcagaataaagagtctgcaagcaagcagagctag

SEQ ID NO: 295499 - DNA, 816 bp, Artificial Sequence
  derived and/or modified sequence
atggaccgatcgaaagaaaattgcatcagtgggccagtcaaagctactgccccagttggagggccaaagagggtcttagtcacacagcaatttccctgccaaaacccccttcccgttaatagcggtcaagcccagcgggtgctgtgccctagtaattcctcacagcgtatccctttacaggctcagaagcttgtcagctcacacaagcccgtgcagaatcagaaacagaaacagctgcaggccactagcgttccccacccggtatcgagacccctcaataacacccagaagtctaaacagccgctgccaagtgctcccgaaaacaatccagaggaggaactcgcctctaaacagaagaatgaggagagtaagaagagacagtgggcactcgaggattttgagataggcagacccctcggaaagggaaagtttgggaacgtctacttggcacgcgaaaagcagtccaagtttatcctcgccctaaaggtgttgttcaaggcacagctggagaaggccggcgtggaacaccaattgcggcgagaggtcgagatccagagtcaccttcgtcaccctaatattttgcgcctctatgggtactttcacgacgctacgagggtctacctgatcttggagtatgcccccctcggaactgtttatcgggagctgcagaaactctcaaagttcgacgagcaacgaactgcgacctatatcacagagttagcgaatgctctttcctattgccatagcaagcgggtgatacaccgggatatcaagccagagaacttgctgttaggcagcgctggagaactcaagtag

SEQ ID NO: 295500 - DNA, 1212 bp, Artificial Sequence
  derived and/or modified sequence
atggacaggagcaaggagaactgcatcagcggccctgtgaaggccacagcccctgtgggcggccccaagagggtgctggtgacccagcagttcccctgccagaaccccctgcctgtgaacagcggccaggcccagagggtgctgtgccccagcaacagcagccagaggatccccctgcaggcccagaagctggtgagcagccacaagcctgtgcagaaccagaagcagaagcagctgcaggccacctctgtgccccaccctgtgtcccggcccctgaacaacacccagaagagcaagcagcccctgcccagcgcccctgagaacaaccctgaggaggagctggccagcaagcagaagaatgaggagagcaagaagaggcagtgggccctggaggactttgaaattggccggcccctgggcaagggcaagtttggaaatgtgtacctggcccgggagaagcagagcaagttcatcctggccctgaaggtgctcttcaaggcccagctggagaaggccggcgtggagcaccagctgcggcgggaggtggagatccagagccacctgcggcaccccaacatcctgcggctgtatggctacttccatgatgccaccagggtgtacctgatcctggagtatgcccccctgggcaccgtgtaccgggagctgcagaagctgagcaagtttgatgagcagaggacagccacctacatcacagagctggccaatgccctgagctactgccacagcaagagggtcatccaccgggacatcaagccagagaacctgctgctgggcagcgctggggagctgaagattgctgactttggctggagcgtgcacgcccccagcagcaggaggaccaccctgtgtggcaccctggactacctgcccccagagatgattgagggccgcatgcatgatgagaaggtggacctgtggagcctgggcgtgctgtgctatgagttcctggtgggcaagcccccatttgaggccaacacctaccaggagacctacaagaggatcagccgggtggagttcaccttcccagactttgtgacagaaggagcccgggacctgatcagccggctgctgaagcacaaccccagccagaggcccatgctgcgggaggtgctggagcacccctggatcacagccaacagcagcaagcccagcaactgccagaacaaggagagcgccagcaagcagagctag

SEQ ID NO: 295501 - DNA, 1044 bp, Artificial Sequence
  derived and/or modified sequence
atggacaggagcaaggagaactgcatcagcggccctgtgaaggccacagcccctgtgggcggccccaagagggtgctggtgacccagcagttcccctgccagaaccccctgcctgtgaacagcggccaggcccagagggtgctgtgccccagcaacagcagccagaggatccccctgcaggcccagaagctggtgagcagccacaagcctgtgcagaaccagaagcagaagcagctgcaggccacctctgtgccccaccctgtgtcccggcccctgaacaacacccagaagagcaagcagcccctgcccagcgcccctgagaacaaccctgaggaggagctggccagcaagcagaagaatgaggagagcaagaagaggcagtgggccctggaggactttgaaattggccggcccctgggcaagggcaagtttggaaatgtgtacctggcccgggagaagcagagcaagttcatcctggccctgaaggtgctcttcaaggcccagctggagaaggccggcgtggagcaccagctgcggcgggaggtggagatccagagccacctgcggcaccccaacatcctgcggctgtatggctacttccatgatgccaccagggtgtacctgatcctggagtatgcccccctgggcaccgtgtaccgggagctgcagaagctgagcaagtttgatgagcagaggacagccacctacatcacagagctggccaatgccctgagctactgccacagcaagagggtcatccaccgggacatcaagccagagaacctgctgctgggcagcgctggggagctgaagattgctgactttggctggagcgtgcacgcccccagcagcaggaggaccaccctgtgtggcaccctggactacctgcccccagagatgattgagggccgcatgcatgatgagaaggtggacctgtggagcctgggcgtgctgtgctatgagttcctggtgggcaagcccccatttgaggccaacacctaccaggagacctacaagaggatcagccgggtgagaagaaattag

SEQ ID NO: 295502 - DNA, 816 bp, Artificial Sequence
  derived and/or modified sequence
atggacaggagcaaggagaactgcatcagcggccctgtgaaggccacagcccctgtgggcggccccaagagggtgctggtgacccagcagttcccctgccagaaccccctgcctgtgaacagcggccaggcccagagggtgctgtgccccagcaacagcagccagaggatccccctgcaggcccagaagctggtgagcagccacaagcctgtgcagaaccagaagcagaagcagctgcaggccacctctgtgccccaccctgtgtcccggcccctgaacaacacccagaagagcaagcagcccctgcccagcgcccctgagaacaaccctgaggaggagctggccagcaagcagaagaatgaggagagcaagaagaggcagtgggccctggaggactttgaaattggccggcccctgggcaagggcaagtttggaaatgtgtacctggcccgggagaagcagagcaagttcatcctggccctgaaggtgctcttcaaggcccagctggagaaggccggcgtggagcaccagctgcggcgggaggtggagatccagagccacctgcggcaccccaacatcctgcggctgtatggctacttccatgatgccaccagggtgtacctgatcctggagtatgcccccctgggcaccgtgtaccgggagctgcagaagctgagcaagtttgatgagcagaggacagccacctacatcacagagctggccaatgccctgagctactgccacagcaagagggtcatccaccgggacatcaagccagagaacctgctgctgggcagcgctggggagctgaagtag

SEQ ID NO: 295503 - DNA, 1212 bp, Artificial Sequence
  derived and/or modified sequence
atggaccggagcaaggagaactgcatcagcggccccgtgaaggccactgcacctgtaggcggacctaagagggtcctggtgacacaacagtttccctgccaaaaccccctccctgtgaattccggacaggcacagagagtgctctgcccatcgaacagctcgcaaaggattcctcttcaggcccagaaacttgtctctagccacaagcctgtacagaaccagaaacagaaacagttgcaggccacatcagtgccacacccagtgagcagacccttgaacaatactcagaagtcaaaacagcctctgcctagtgcaccagagaacaatccagaggaggaactggcaagcaagcagaaaaacgaggagagtaagaagcgacagtgggccctcgaagattttgagatagggcgccccttgggcaagggcaaattcggaaatgtgtaccttgcccgcgaaaagcagagtaagtttattctggccctaaaagtcttattcaaggctcagctcgaaaaggcaggagtcgaacatcaactgcgtagagaggttgaaattcagagtcacttgcgccacccaaatattctgcggctctacggttattttcatgacgctacccgcgtatacctcattctggagtacgccccattaggcactgtctacagagagctgcagaagctcagcaagttcgatgagcaaagaactgctacttacattactgagctggcgaacgccctgagctactgccatagcaagcgcgttatacatcgagacattaaacccgagaacttgctgttgggttccgccggagagctgaagatagcagattttggttggtccgtgcatgccccgagcagtagacggacaactttgtgcgggacactcgactatttacctcctgagatgatagaaggcagaatgcacgatgaaaaagtcgatttgtggtcactgggcgtactgtgttatgagttcttggtgggcaagccacccttcgaggcaaacacttatcaggagacctataaacgtatctcccgtgtggagttcaccttccccgacttcgtgaccgagggagcacgcgatctcattagcagattgctgaagcacaaccccagccagagacccatgctccgcgaagtgctggagcacccatggattaccgcgaactcctctaagccgtccaactgtcagaataaagagtccgcatctaagcagtcctag

SEQ ID NO: 295504 - DNA, 1212 bp, Artificial Sequence
  derived and/or modified sequence
atggaccggagcaaggagaactgcatcagcggccccgtgaaggccaccgcccctgttggaggacccaaaagagttcttgtgacgcaacagtttccttgccaaaatccactgcccgtcaatagtgggcaggcccaacgcgttctttgcccgtctaacagttctcagcgcatccctttacaggctcagaaactagtgtcatctcataagccggtacagaaccagaagcaaaaacagcttcaggccacgagcgtccctcaccccgtgagccgcccactcaacaacacgcaaaaatctaaacagccgctgcccagtgccccagagaacaatcctgaggaggagctagccagcaaacagaaaaacgaggagagtaaaaaacgacaatgggccctggaggacttcgagataggcagacctctgggaaagggaaaatttggcaacgtgtacttagcccgggagaaacagagtaaattcattctggctctgaaggtcctgttcaaggcacagctagagaaggcaggcgttgaacaccagctgcgtcgcgaggtggagatccagagccaccttcgacacccaaacattcttaggttgtatgggtactttcatgacgccaccagggtttacctcattctagagtacgctcctcttgggaccgtgtaccgcgaacttcagaagctgtcgaagttcgatgagcagagaactgccacgtatatcacagagctcgcgaacgccttgtcctattgccactcaaagcgcgtaatacaccgcgatattaagcccgagaacttgcttcttggcagtgccggtgaactaaagattgccgactttgggtggtctgtgcatgcgccatcctccaggcgaaccactctctgtggaacactagactacctccccccagaaatgatagaaggacggatgcacgatgagaaggttgacctgtggagtttgggagtcctgtgttatgagtttttggtgggcaagccgccatttgaggccaacacttatcaggagacatataagcggatttcaagggtggagttcacattcccggatttcgttacggagggcgcaagggatctgatctcacgcctgctgaagcacaacccctcgcagcggcctatgctgagggaagtgctggaacatccctggataactgccaattcctctaagccctctaactgtcagaacaaggaaagcgcttctaagcagtcatag

SEQ ID NO: 295505 - DNA, 1212 bp, Artificial Sequence
  derived and/or modified sequence
atggaccggagcaaggagaactgcatcagcggccccgtgaaggccacggcgcctgtgggaggaccgaagagagtgctagtcactcagcaattcccttgtcaaaatcctctgcctgtgaactcgggacaggcccagagagtcttgtgccccagcaattcttcccagaggattcccttgcaggctcagaaactcgtgtcatcacacaaaccagttcagaaccagaagcaaaaacagctgcaggcgaccagcgtgccacacccagtttctcgtcccttgaataacacgcagaagagcaaacaacccttaccgtccgcaccggagaataacccagaagaagaattggccagtaagcaaaagaacgaggagagtaaaaaacgccaatgggcactggaggacttcgagattggcagacctctaggaaagggtaaatttggcaacgtttatctggcacgcgagaaacaatctaaattcatcctggcactgaaagtcctatttaaggctcagctggaaaaggctggcgttgaacatcagcttagaagagaagtagagatccagtcccacttacggcacccgaatatcctgcggctctatggctacttccacgatgcaacccgggtgtaccttattttggagtacgctccgttgggtactgtttatcgtgagctccagaaacttagcaagtttgatgagcagaggaccgccacttatattacggagctggccaatgcactgagctactgccactcaaaacgcgtgatccatagagacattaagccagagaacctcctccttggtagtgccggggagctgaagatagccgatttcggttggagtgtacatgcacctagttctagacggactacactatgcggtactctcgattacttgccgcctgaaatgatcgaggggcgaatgcatgacgagaaggtggatctatggtcactgggtgtactttgctacgagtttttggttggaaagcccccattcgaggctaatacctatcaagaaacttacaaaagaatctcacgagtggaatttacttttcccgattttgtgactgaaggcgctcgggacttgatttctagactgctgaagcacaatccaagtcagagacctatgctccgggaagtgttagaacacccctggataaccgctaatagcagtaagccatcgaactgccagaacaaagaatccgcaagtaagcagtcatag

SEQ ID NO: 295506 - DNA, 1044 bp, Artificial Sequence
  derived and/or modified sequence
atggaccggagcaaggagaactgcatcagcggccccgtgaaggccacagccccagtgggcggccctaaacgggtgctggtgacccaacagttcccatgtcaaaatcctttacctgttaattctggtcaggcccagagggtcctctgcccttcaaattctagtcagaggattcccctacaagcacagaaattagtatcatcacataaaccggttcaaaatcaaaaacaaaagcagctgcaggctaccagcgtgcctcacccggtgtcaaggccattgaacaacacccagaagtcaaagcagccgttgccatcagctccagaaaacaaccccgaggaggagctggcttctaagcagaagaatgaagagagcaaaaagcgacaatgggctttggaggacttcgaaataggtaggcctcttggcaaaggtaaatttggcaatgtgtatctcgccagggagaagcaaagtaaattcatccttgctctgaaggtgctgtttaaagcccagttggaaaaagccggcgtggagcaccaattgcgcagagaggttgagatacagtcacatctaagacacccaaatattctcagactctatggctactttcacgatgcaacgcgggtatatctcattctcgagtacgcaccgctcggaaccgtatatagagagcttcagaaactctccaaattcgacgagcaacgcacagcaacatatatcaccgaattggctaacgctctctcttactgccacagcaagagagtgatccacagagatatcaagcctgagaatctgctgctcggtagcgccggcgagttgaaaattgccgacttcggatggtctgtgcacgccccgagcagcaggcggaccacgctgtgcggcaccctggactacttacctccagagatgatcgaagggcgcatgcacgatgaaaaggtcgacctgtggtccctgggcgttctgtgctacgagtttttggtcggcaagccgccctttgaagcaaatacctaccaggagacctataagaggatcagcagggtgcggcgaaactag

SEQ ID NO: 295507 - DNA, 1212 bp, Artificial Sequence
  derived and/or modified sequence
atggaccggagcaaggagaactgcatcagcggccccgtgaaggccactgctccagttggggggcccaaaagggtactcgtgactcagcaattcccatgtcagaaccctctccctgttaactccggccaagcacagcgtgtgttgtgcccctcgaacagcagccagaggatacctctccaggcgcagaaactcgtatcaagccataaacccgttcagaaccagaagcagaagcagttgcaggcaacttccgtgcctcaccccgtttcacggccactgaataacacccaaaaatctaagcagcctttgccaagcgccccggagaacaatcctgaagaagagttggctagtaaacagaaaaacgaggaaagcaagaaaagacagtgggccctagaggattttgaaattggccgcccacttggcaagggaaaatttggtaatgtctatctggctagggagaagcaaagcaagtttattctcgccttaaaagtattatttaaggcacagctcgaaaaagcgggagtggagcatcagctcagacgggaggtggagatccagagccatctgaggcaccctaacattcttaggctgtacggatatttccatgacgcaacccgtgtatacctgatcctggaatacgccccactgggcactgtttaccgcgagctgcagaaacttagcaagtttgacgagcagagaacggcaacatacataactgaactggcaaatgctttgtcttactgccatagtaagcgcgtgatccaccgggacatcaaacccgaaaacctactgctgggttcagcgggcgagttgaaaatcgctgattttggatggagcgttcacgcccctagctctcgtcggactaccctgtgtggcaccctggattacctgcctccagaaatgatcgaaggccggatgcatgatgaaaaagtggacttgtggagcttgggggtcctttgctatgagttcctggttggcaaaccgccattcgaagccaatacctatcaagagacatataagcggatttcgcgggtggagttcacttttccagattttgttacggagggagcaagggatctgatctctcgactgctgaagcacaatccaagtcaacgcccaatgttaagggaagtccttgagcacccatggattactgcaaatagctctaagcccagtaattgtcaaaataaggagagtgcatctaaacagtcgtag

SEQ ID NO: 295508 - DNA, 1212 bp, Artificial Sequence
  derived and/or modified sequence
atggaccggagcaaggagaactgcatcagcggccccgtgaaggccaccgcccccgtaggcggccccaaacgggtgctggttactcagcagttcccgtgtcagaaccccctgccggtaaactccggccaggcacagcgggtgctatgtccttcgaattctagtcagaggatcccactgcaagcacagaaactggtgtctagccacaagccagttcagaaccaaaagcaaaagcaactccaggctacaagtgtacctcaccccgtcagtagacctctcaataacacacagaaaagtaaacagcctcttccgtccgcacccgagaataatccagaggaagagttggccagcaagcagaaaaatgaagagagcaagaaacgccagtgggccctcgaggattttgagattggccgacccctgggtaagggcaagtttggaaatgtctatctggcacgcgagaagcaatccaaatttatcttggcacttaaggtactgttcaaggctcagttggaaaaagcaggggtggagcaccagcttagacgggaggtggaaatacaaagtcacctccggcacccaaatatcctgaggctgtacgggtactttcatgacgccacacgggtgtatctcatcctggaatatgcaccgctgggcacagtgtaccgggagctacagaagctgagtaagtttgacgaacagagaaccgcgacatatatcactgagctcgccaacgcgttaagttactgtcactctaaaagggtgatccaccgtgatatcaaaccggaaaaccttctcctgggttcggccggtgagctaaaaattgccgactttggctggagcgttcacgctccttcttcacgtcgcaccacactgtgcggaacgctggactacttaccacctgaaatgatcgagggtcgtatgcatgacgaaaaggtcgatttgtggagtctgggggtcctttgctacgagtttctggtgggcaaacccccatttgaggccaacacatatcaagaaacctacaaaaggatttctcgcgtggaattcacctttcctgatttcgtgacggagggcgcacgagacctgatttctcgcctcttaaagcacaacccatctcagagacctatgctccgcgaggtcctcgaacatccctggattactgccaattccagcaagccatccaactgccagaacaaagagtctgctagcaagcagagctag

SEQ ID NO: 295509 - DNA, 1212 bp, Artificial Sequence
  derived and/or modified sequence
atggaccggagcaaggagaactgcatcagcggccccgtgaaggccaccgctccagtcggggggcccaagagagtcctagtgacccagcaatttccctgccagaatccgctgccagtgaattccggtcaggctcagagggtgctgtgtccttcaaactccagtcagaggatccctctccaggctcagaagttggtctcctctcataagcctgttcagaaccagaagcagaagcagttgcaggccacatccgtgccccaccccgttagcaggcctctcaacaacacccagaaatcgaagcagcctttacctagcgcccccgagaacaaccctgaggaagagttagctagtaagcagaagaacgaggagagtaaaaaaagacagtgggccctggaagatttcgagattggacgcccactgggaaaaggcaaattcggaaacgtttaccttgccagagaaaagcaatctaaattcattctcgccctgaaagttctattcaaagcacaactcgaaaaggcaggagtggagcaccaactgcgacgcgaggtggaaatccaaagccacctgaggcaccccaacatcctccggctgtatggatacttccatgatgccacgagggtctacctgatcctggagtatgcacccctgggtaccgtgtatcgggagctccagaagcttagtaagtttgacgagcagcgcaccgccacatacatcactgagttggccaatgctctgtcctactgtcactccaagagggtgattcatagagatattaagcctgaaaacctgttactggggtctgctggagaactgaaaatcgccgattttgggtggagtgttcatgccccgagctcaagacgaacaacgctgtgcggaactttagattacctcccccctgaaatgatagaaggccgcatgcacgatgagaaagtagacctgtggagtctgggtgtattatgctacgaattcttagtgggcaagccaccattcgaggctaatacttatcaggaaacctataaacggatttcaagagttgaattcacgtttccagacttcgtaaccgaaggggcacgggacctgatttctcgccttttaaaacacaacccgtcccagcggcctatgcttagggaagtgctcgagcatccctggatcaccgcgaactctagcaaaccctcgaattgccagaacaaagagtcggcatccaagcagagttag

SEQ ID NO: 295510 - DNA, 1212 bp, Artificial Sequence
  derived and/or modified sequence
atggaccggagcaaggagaactgcatcagcggccccgtgaaggccacagctcctgttggaggccccaagcgggtactggtgacgcagcagtttccatgtcagaaccctctccccgttaatagcggccaggcacaacgggtgctctgtccgtcaaactcatcccaaagaatccccctgcaggcccaaaaactggtatcctctcataagcctgttcaaaaccagaaacaaaaacaactccaggccacatccgtgccacaccctgtgagcaggcccctgaataacacccagaagtccaagcagcctctgccctccgcaccggagaataaccctgaggaagagctcgccagcaaacagaaaaatgaagaatccaagaagcgacagtgggcattggaagattttgaaatcggcaggccactgggcaagggcaaattcggaaatgtgtaccttgccagagagaagcagtcaaagttcatcttagctctcaaggtgttattcaaggcacaactagagaaagccggagtggaacatcagcttaggcgcgaggtagaaatccagtcccacctcaggcacccaaatattctccggttatacggttatttccatgacgcgacccgggtctatttgatccttgaatatgcaccattgggtacagtgtaccgcgagctgcaaaaactgagcaagtttgacgaacaacggaccgcaacatacatcacagagctggccaacgctctctcgtactgtcattccaagagggtcatccaccgggacatcaaaccggagaatctcctactgggctctgccggagagcttaaaatagcagacttcggatggagcgtgcacgccccgtcttcaaggaggaccaccctttgcgggaccttagactacctaccaccagagatgatcgaagggcgcatgcacgatgagaaagtggacctgtggtctctaggcgtattatgttatgagtttcttgtggggaaacctccctttgaggctaacacttatcaggaaacctataaacgaatctcacgggtcgagttcacgtttccagatttcgtgaccgaaggcgcgcgcgatctgattagtcgcttacttaagcacaatccgtcacagagacccatgctccgggaagtgctggagcatccctggatcaccgccaacagttccaaaccctcgaactgtcagaataaggagtctgctagtaaacagtcctag

SEQ ID NO: 295511 - DNA, 1212 bp, Artificial Sequence
  derived and/or modified sequence
atggaccggagcaaggagaactgcatcagcggccccgtgaaggccacagcccccgtggggggccccaaaagagtattagttactcaacagtttccttgtcaaaacccactacctgtcaattcaggccaagcccagcgggtactgtgtccttctaacagttctcagcgcataccactgcaagctcagaagctggtgtcatcacacaagcctgtccaaaaccagaagcaaaagcagttgcaggctacatctgtccctcaccccgttagcagaccactgaataatacgcagaagtccaagcagcctctgccatctgctcctgagaacaatcctgaggaagagctggcctctaaacagaaaaacgaggagagcaagaagcgccagtgggctctagaagatttcgagattggtagaccattaggcaaagggaaatttggtaatgtctacctggctagggagaagcagtccaagttcatcctggctctcaaggtgttatttaaggcccagcttgaaaaggctggggtggaacatcagctgaggagggaggttgaaatccagtcccatttgcggcaccctaatatcttgcgattatatggctactttcacgacgctacgcgcgtgtatttaattctcgaatatgctccacttggcactgtctatcgcgagcttcagaaactctctaaattcgacgaacagcgcacagccacctatataacggagctggccaacgctctgagctactgccacagtaaaagggtcattcaccgcgacatcaaaccggagaatctgcttctggggtccgcgggtgagttgaagatcgcagatttcggctggtcagtgcatgctccatccagtagaagaacaacactgtgtgggacactggattaccttcccccagaaatgattgagggaaggatgcatgatgagaaggtcgacttgtggagcttaggcgtactctgttatgagttccttgtgggtaagcccccttttgaagcaaacacctaccaagagacctataagcgtataagtcgggttgagttcacctttccggacttcgtgactgaaggcgccagagacctgatctctcggctgcttaagcacaacccgtcacagagaccaatgctcagggaggtcctcgagcatccctggataactgccaatagctccaagccaagtaattgccagaacaaggagagtgcaagcaaacagtcatag

SEQ ID NO: 295512 - DNA, 816 bp, Artificial Sequence
  derived and/or modified sequence
atggaccggagcaaggagaactgcatcagcggccccgtgaaggccaccgctccagtagggggccctaagagggtcctggtcacgcagcagtttccctgccaaaaccctctccctgttaacagcggacaggcccaaagagtgctgtgtccttccaatagtagccagcgtattccgcttcaggctcagaagctggtgtcctctcacaagcccgtgcaaaaccagaaacagaagcagctgcaggccacgagcgtgcctcaccccgtcagccgccccctgaataacacccagaaatctaagcaacccctgccaagcgcccctgaaaataaccctgaagaggaattagcatccaagcagaagaatgaggagtcaaaaaagcggcaatgggccctggaagacttcgaaattggccgccccctcggaaaggggaagtttgggaatgtgtatctcgcccgggaaaagcagtccaagtttatactggctctcaaggtgctattcaaggctcagctggaaaaagctggcgtggagcaccaacttcgaagagaggtggagattcaaagtcatttaagacaccccaatatactacggctctatggttacttccacgatgccactcgagtctacctgatcctggaatacgcccccctcggaaccgtgtaccgcgagctccaaaaactctcaaagttcgatgagcaacgcaccgcaacatatatcaccgagctcgccaatgcgctcagctactgtcactcaaagcgggtgatccatcgagacatcaaacctgaaaatctgctgctgggtagcgccggggaactgaagtag

SEQ ID NO: 295513 - DNA, 1212 bp, Artificial Sequence
  derived and/or modified sequence
atggatcggagcaaagagaactgtatttccgggcctgtaaaggccactgccccagtcggtggcccaaagagagtgctggtgactcagcagtttccctgtcagaacccacttccagtgaattcgggccaagctcagcgagtgctatgtcccagcaatagctctcagaggatccctctccaggcccagaaactggtttcatcgcataagccagtgcaaaaccagaagcaaaaacaattgcaggcaacctccgttccacatcccgtatccaggcctctgaataacactcagaagtccaaacagccacttccgtctgccccagagaacaatcccgaagaagagctggcatccaaacagaagaacgaggagagtaagaaaaggcagtgggcgctggaagacttcgagattggacgaccactgggcaaaggcaagttcgggaatgtgtacttagcgagagaaaaacagagtaaattcatattggcccttaaagtgctattcaaggctcagttggagaaggcgggagtggagcaccagttgaggcgagaggtcgagatccaaagccacctccgccaccctaacattctgcggctctatggatactttcacgacgctacaagggtatatctcattcttgaatacgcccctctagggacagtgtatagggaactccagaagctgagcaaatttgatgaacagcggactgccacctacatcacagagttggctaatgcgctctcctactgtcattctaagcgcgtcatacaccgcgatatcaagcccgaaaatctgttgttgggctcagctggcgagctcaaaattgctgacttcgggtggtccgtgcacgctcctagctctcgcaggactacgctgtgtggaacccttgattatctccctccagagatgatagaaggtcggatgcacgacgaaaaagttgatttatggtcactgggcgtgctttgctatgagtttttggtgggtaagcctcccttcgaggcaaacacttaccaagagacatataagaggatcagccgagtggagtttacttttccagattttgtcacggagggagcccgagatctcattagccggcttctgaagcacaatccaagtcaaagacccatgctgagagaggttctggaacacccctggattacagcaaatagcagcaagccatctaactgtcagaacaaagaatccgcaagcaaacagtcctag

SEQ ID NO: 295514 - DNA, 1212 bp, Artificial Sequence
  derived and/or modified sequence
atggataggtctaaagagaactgcataagtggccctgtgaaagctaccgcccctgtcggcggaccaaaacgcgtgctggttactcagcagttcccatgccagaatccgctacccgtgaattccggccaggctcaaagggtgttgtgtcccagcaactccagtcagcgtattccactccaggctcagaagctcgtcagttcccacaaaccagttcaaaatcagaaacagaagcagcttcaggccactagcgtgcctcacccggtgtcacgcccactaaacaatacgcagaaatctaagcagcctctcccatccgcccctgaaaacaaccccgaggaggagttggcctctaagcagaaaaacgaagaatctaagaagcggcagtgggcgcttgaagacttcgagatcggtcgcccactgggcaaggggaagttcgggaacgtatacctggccagagagaaacagtccaagttcattctcgcactgaaggtgctgtttaaagcccagttggaaaaagcaggtgtagaacaccaactccggcgagaggtcgagattcaatcccacttacgccacccaaatattttacgactctacggttatttccatgacgcgacacgagtttacctgatcctggagtatgctccactggggacggtctacagagaactccagaagctgagcaagtttgacgagcaaagaaccgccacgtacatcacggaactggccaacgccctgagttattgccattccaagcgggtcatccaccgagacatcaagccagaaaatttacttctggggagtgctggggagctcaagattgccgatttcgggtggagtgtgcatgccccttcgtctcgtcggactaccttgtgcggaacgttagattatcttccgcctgaaatgattgaggggaggatgcacgatgagaaggtggatctctggagcctgggtgttctatgttatgagtttttggtgggcaaaccccctttcgaagccaatacataccaggaaacttataaaaggatctccagggttgagtttaccttccctgacttcgtgaccgagggggctcgggacctcatcagccgcctgctgaagcacaatccctcacaacgcccaatgctccgcgaggtgctagagcatccttggataaccgctaactcaagcaagcctagcaattgtcaaaataaggaatccgctagtaaacagtcttag

SEQ ID NO: 295515 - DNA, 1212 bp, Artificial Sequence
  derived and/or modified sequence
atggacagatccaaggaaaattgcatcagcggccctgtgaaggccactgcccctgtgggtggtccaaaacgtgtgctggttacacaacagtttccgtgccagaatcccctccctgttaactcgggccaagcacagagagtcctttgcccctctaactcctcgcagagaatacctttacaagctcagaaactggtttcttcgcacaaaccagtgcagaatcagaagcagaagcagctccaggccacctctgtccctcatcctgtgtcccgccctctcaataacacacaaaagtccaaacagcctctcccatcagcccctgagaataaccccgaggaggaactcgccagtaagcagaaaaacgaggaatcgaagaagagacagtgggctttagaggactttgagattggacggccactggggaagggcaaatttgggaatgtttacttagctagagagaagcagtcaaaatttatactcgccctcaaggttctattcaaggctcagctggaaaaggccggagtcgagcatcagcttcgacgagaggtcgagattcagagccatctgcggcatccaaatatactgaggctgtatggatacttccacgacgccacgagggtctacttaatattggagtatgctccactcggaaccgtgtaccgcgagctccagaaactttctaagttcgatgagcagaggactgccacctatattaccgagttggccaatgctctgtcttattgccattccaaacgagtcatacacagggacattaaacccgaaaacctcctgcttggttccgccggagaactgaagatcgcggattttggatggtccgtgcacgcgccatcgtcccgcaggaccaccctgtgcggtaccttagactacctgccccctgagatgatcgagggcaggatgcacgacgagaaggtggacctgtggagcttaggcgtgctctgttacgagttcttggtgggcaaaccacctttcgaggccaatacgtatcaagagacatacaagcgcatctcccgtgtggagttcactttccccgatttcgttaccgagggtgcacgggatctgataagtaggctgctaaagcacaatccctctcagcgcccaatgctgcgtgaagtcttggaacacccgtggattacagctaacagcagcaagcccagcaattgtcagaataaagagagtgccagcaagcagagctag

SEQ ID NO: 295516 - DNA, 1044 bp, Artificial Sequence
  derived and/or modified sequence
atggaccggtctaaggaaaactgcattagcggcccagtaaaggcgactgctcccgtcggtggtcccaagcgggtgctagtgacacagcagtttccctgtcaaaacccactcccagtgaactcgggacaggcccagagggtgttgtgtccctctaattcttcccagagaatccctctgcaggcccagaagctggtttcatctcacaaacccgtgcagaaccagaagcagaaacagctgcaggccactagcgtgccacacccagtgagccgacccctgaataatactcagaagtccaagcagcctctgcccagcgccccagagaataaccctgaagaagagctggcttctaagcaaaagaacgaggagagcaaaaagaggcaatgggcactcgaagacttcgagattggacggcctttgggaaagggcaaattcgggaacgtgtacctggccagggaaaagcagtccaagtttatacttgccttgaaagtgctgtttaaggcgcagctagagaaagccggtgttgaacaccagctccgacgcgaagtcgagatccagtctcaccttcggcatccgaatatcttgcgattatacgggtactttcacgacgccacacgggtctatctcattctggaatatgcacctttgggtaccgtgtatagagagctgcagaagttgtccaagtttgacgaacagcggactgccacgtacatcactgagctggccaacgcgttgagttattgccactcaaaaagggtaatacatagagatattaaaccagagaacctcctcctcggcagcgcgggtgaactaaaaattgctgatttcggctggagtgtgcacgcccctagttcacgcaggacgacactctgcggcaccctggattacctgcccccagaaatgatcgaggggaggatgcatgacgagaaagtggatctctggtctctcggcgtgctgtgttacgaattcctcgttggcaagccaccctttgaagccaatacctaccaggaaacatacaaacggataagtagagtgcgcagaaattag

SEQ ID NO: 295517 - DNA, 1212 bp, Artificial Sequence
  derived and/or modified sequence
atggatcgcagcaaggagaactgcatctccggccctgtgaaggctacagctccagtggggggaccgaagcgggtgctcgtaacccaacagtttccctgtcagaatccattgcccgtaaattcagggcaggcacagagagtcctgtgcccatcaaattctagtcaacgcattcctctgcaggcccagaaactggtgtctagccataaacctgtccaaaaccaaaagcagaaacagctgcaggccaccagcgtgcctcatcctgtgtcacgtccattaaacaacactcagaagtcgaagcagccactaccatcagcccctgagaataaccctgaggaggaattggcatctaaacagaaaaatgaggaatccaagaagcggcagtgggctctcgaagattttgagatcggtcgtccgctcgggaaggggaaatttgggaacgtgtacctggccagggagaagcagtccaagtttatcttagcccttaaggtcctcttcaaggcccagctcgagaaggccggagtggagcatcagctaagacgtgaagtggagatccagtctcacctcagacaccctaacattcttagactgtacggctacttccatgacgccaccagggtgtacctgatcttagagtacgcacctctcggaacagtatatagggaactgcagaagctaagtaaattcgacgaacagcgcactgcaacctatatcactgaactcgccaatgccctgtcttactgccattccaaacgggtcatccaccgagacatcaagcccgaaaatctgttactgggatcagcaggcgaacttaagatcgctgatttcggctggagcgtccacgccccttcatctcggagaaccactctctgcggtactctggactacctgcccccagaaatgatcgagggtcgcatgcatgacgagaaagtagatctgtggagcctgggggtcctatgctatgagtttctcgtcggcaaacctccctttgaagcgaatacttaccaggagacatacaaaagaatcagccgcgtcgagttcacattccccgactttgtgacagagggagccagggatttaatctcccgcctgctgaagcacaatccaagtcagaggcccatgctgcgggaggtgctcgagcatccatggataacagctaattcatccaagccttccaattgtcagaacaaggagtccgcatccaagcagagttag

SEQ ID NO: 295518 - DNA, 1212 bp, Artificial Sequence
  derived and/or modified sequence
atggacaggtctaaggaaaattgcatctcagggcctgtgaaggctacggcaccggtgggcggtcccaaaagagtgctggtgacacagcagtttccatgtcagaatcccctgccagtcaacagtggtcaagcacagagggtactgtgcccgtctaattcctcacagcgcatacctctgcaggctcaaaagctggtatcctcacacaagccagtgcaaaatcagaagcagaagcagcttcaggctacttccgtgccccacccagtcagtcggcctctgaacaacacgcagaaatcaaagcagccgctgccttcagctccagagaataaccctgaagaggagctggctagcaagcagaaaaacgaagaaagcaaaaagcgccaatgggctctcgaggatttcgaaattggtcgtccgcttggaaaaggcaaattcgggaatgtctacctagccagggagaaacaatccaagttcatcctcgcccttaaagtcctattcaaagcccagctagaaaaggccggtgttgaacatcagctgcggagggaggtcgagatccagtcgcatcttagacaccccaatatcctccggctctatggctattttcacgatgccaccagggtgtacctgatacttgagtacgcgcctttgggaactgtgtatagggaactacagaaattgtctaaattcgacgaacaaaggacagccacttacatcacagagctggccaacgccctgtcctactgtcactccaagcgagtgatccatcgcgacattaagccggagaacctcctgctgggtagcgcgggagagctaaagatagccgacttcggatggagtgtgcacgccccatcctctcgcaggacgacattatgtggtaccttagactatcttcctcccgaaatgattgaaggcagaatgcatgacgaaaaggtcgatctctggtcgctcggtgtcctctgttacgaatttcttgtcggcaagccacccttcgaagccaatacttaccaagagacttataagcggatttcacgagtggaatttacctttcccgacttcgtgactgagggcgcacgggacctgatttccagactgctgaagcataatccatctcagcggccaatgctgagggaggtcctggagcacccgtggatcactgccaactcgtcaaagccctccaattgccagaataaggagtccgccagtaaacaatcgtag

SEQ ID NO: 295519 - DNA, 1212 bp, Artificial Sequence
  derived and/or modified sequence
atggataggtcaaaggaaaactgtattagtggtcccgttaaagccacagcacctgttggcggaccaaagagagtgctcgtaactcagcagtttccttgtcagaacccacttccagtaaactctggacaagcccaaagggtgctgtgtcccagcaacagctcccagagaatccccctgcaggcgcagaagcttgtgtcaagtcacaagcctgtgcaaaaccagaagcagaaacaattacaagctacaagcgttcctcatcccgttagtcgtccacttaacaatactcagaaatcgaagcagcccttacctagtgcccctgagaataacccggaggaggaactcgcaagtaagcaaaaaaatgaggaaagcaagaagcggcaatgggctctcgaggatttcgagatcggtcggcctctcgggaaagggaaattcggcaacgtgtacctggccagggagaagcagtccaaattcattctagctttgaaagtactttttaaggctcaactggagaaagcaggagtggagcaccaactccgccgagaagtggagattcagtcccacttacggcatcctaacatcctgcgactttacggctacttccatgacgccaccagagtgtatttgattctcgagtatgccccactcgggaccgtctatcgtgagctccagaaactgtcaaagttcgacgagcagcgtacggccacctacatcaccgagctggccaatgcattatcttactgccactcgaagagggtgattcaccgggatatcaaaccagaaaacttgttattgggaagcgccggagagctgaaaatcgcagatttcgggtggtccgtccatgcaccctcatccaggcgcaccactctgtgtgggaccctggactaccttccacctgaaatgattgaagggagaatgcatgacgagaaggttgacctatggtctttgggagtgctgtgctatgaattcttggttgggaaaccacccttcgaggccaacacataccaggagacatacaagcggattagtcgcgtggagtttactttcccggattttgttaccgaaggtgcccgtgatctgatctcccgattactgaaacacaacccctcccagagaccaatgttgagagaagtcctcgagcatccctggatcacagccaatagtagcaaacctagtaattgtcagaacaaggaaagtgcctctaagcaatcttag

SEQ ID NO: 295520 - DNA, 1212 bp, Artificial Sequence
  derived and/or modified sequence
atggatcgcagcaaggagaactgtataagcggtccggtaaaagccactgctccagtgggcggtccaaaacgagtgcttgtgacacagcagttcccttgtcagaatcccttgccagtgaattccggtcaagcccagcgggtcttgtgtcccagcaactccagccagcgcatccctttgcaggcacaaaagctggtgtctagccataagccagtgcagaatcagaaacagaagcagctccaagccacttctgtgccacacccggtgagtaggccactcaataacactcagaaatcaaagcaacctctgccgtctgcccctgagaataaccctgaagaggaactggcaagcaaacaaaaaaatgaagaatctaagaagagacaatgggctctggaggatttcgaaatcggtaggccccttggaaagggcaaatttggcaatgtctacctggcgagggagaaacagtccaaatttattctagcccttaaagtgctgtttaaggcacagcttgagaaagccggagttgagcaccaactacgacgagaggtggagatccaaagccacttaagacatcccaacattctgaggctctacgggtactttcacgatgctaccagggtttacttaatcctcgagtacgccccactgggcacagtataccgggaactccagaagttgagtaaatttgacgagcagcgcaccgcaacatatataaccgaattagccaatgctctgagttattgtcattccaaacgcgtaattcacagggatattaagccagagaatttactccttgggtctgccggagaactgaagatcgccgacttcgggtggtctgtgcatgcaccctcttccagacgtactacactttgtgggacgttggactacctcccgccagagatgatcgagggcaggatgcacgacgagaaagtcgatctgtggagtctgggcgtgctgtgttacgaattcttagtgggaaagcccccttttgaagccaatacctaccaggagacttataagcggatctctcgggttgagttcactttccccgactttgtgacagagggtgctcgcgacttaatctcccgactccttaagcacaacccttcccagaggcccatgctgcgagaagtactggagcacccctggatcacagccaattcttccaaaccatccaattgtcagaataaggaatctgcctcaaagcagtcatag

SEQ ID NO: 295521 - DNA, 1212 bp, Artificial Sequence
  derived and/or modified sequence
atggatcgttccaaagagaattgtatttcaggccctgtgaaagccaccgcgcctgtgggtggccctaagcgcgtgctcgtaacccagcagttcccctgccagaatccgttaccagtgaactccgggcaagcacagcgggttctctgcccttccaactcttcacaaagaattcctctgcaagcccagaaactggtgagcagtcataaacctgtgcagaaccaaaaacagaaacagctccaggccacatcggtgcctcacccggtgtctagacccctgaataacacacagaagtctaaacagcccttaccgagtgccccagagaataaccccgaggaagaattagcctccaagcaaaaaaatgaggagtctaaaaagagacagtgggcacttgaggacttcgaaataggcagaccactgggaaagggcaagttcggcaacgtgtacctggcacgggaaaagcagtccaaattcatcctcgctctgaaggtgctcttcaaggcccagcttgaaaaggcgggtgtcgagcatcagttgcgtcgggaggtggaaatccagtcccacctgcgccatcctaacatactgagactgtatggttatttccatgatgcaactcgtgtgtatctcattttggagtacgctccgctggggacagtctatcgggagctgcaaaagctaagtaagttcgacgaacaaaggacggccacttacatcacagagttagccaatgccctgtcttactgccacagcaagagagtcatccaccgcgacatcaagccggagaacttgctactgggctctgccggagagctgaagattgctgatttcgggtggtctgtacatgctccatcctccagacggaccactctgtgcggcaccctagattacctgccgcctgagatgattgaaggccgaatgcacgacgagaaagtggacctctggagcttgggagtgctctgctatgagttcttggtcgggaaacctccctttgaagctaacacataccaggaaacatacaagagaattagtagggtcgagttcacattcccagacttcgttacggagggcgctcgcgatctgataagcaggcttctcaagcacaacccgagccagcggccaatgctgcgggaagtgctagagcacccatggatcacagctaactcctccaagccctctaattgccagaataaagagtcagcctctaagcagtcatag

SEQ ID NO: 295522 - DNA, 816 bp, Artificial Sequence
  derived and/or modified sequence
atggacagaagcaaggaaaattgcataagtgggcctgtgaaggccaccgcaccagtgggaggccctaagcgagtcctggttactcagcagttcccctgtcaaaacccccttcccgtcaattccggccaagcgcaaagagtcttgtgccccagcaactcatcccaacgcattcctcttcaagctcagaaactggtctctagtcacaaaccagtgcagaatcagaagcaaaaacagctgcaagccacatcagtgccccatcccgttagtaggcctctaaataatacacagaagagcaaacaacctttgcccagtgcaccagagaacaatccagaagaggagctcgcatctaagcaaaagaatgaagagagtaagaagcggcaatgggctctcgaagattttgagataggcagacccctagggaagggaaagttcgggaatgtctatctcgctcgcgagaagcagagcaaattcattctcgcgctgaaagttcttttcaaggcccagctggagaaggcaggcgtggagcaccaacttcggagagaggtcgagattcagtctcatctgcgacatccaaacatccttcgtctgtatgggtacttccacgacgcgactcgcgtatacctaattcttgaatacgctcctctgggcaccgtttatcgtgaacttcagaagctgtcaaaattcgacgaacaacgcaccgccacatacatcaccgagttagctaatgctctgtcttactgccattccaaaagggtaattcaccgtgacataaaaccagagaacctgctgctgggctcagccggagagctcaagtag

SEQ ID NO: 295523 - DNA, 2223 bp, Artificial Sequence
  derived and/or modified sequence
acaaggcagcctcgctcgagcgcaggccaatcggctttctagctagagggtttaactcctatttaaaaagaagaacctttgaattctaacggctgagctcttggaagacttgggtccttgggtcgcagggtctcactccattgcccaggccagagtgcggggatatttgataagaaacttcagtgaaggccgggcgcggtggctcatgcccgtaatcccagcattttcggaggccgaggcatcatggaccgatctaaagaaaactgcatttcaggacctgttaaggctacagctccagttggaggtccaaaacgtgttctcgtgactcagcaatttccttgtcagaatccattacctgtaaatagtggccaggctcagcgggtcttgtgtccttcaaattcttcccagcgcattcctttgcaagcacaaaagcttgtctccagtcacaagccggttcagaatcagaagcagaagcaattgcaggcaaccagtgtacctcatcctgtctccaggccactgaataacacccaaaagagcaagcagcccctgccatcggcacctgaaaataatcctgaggaggaactggcatcaaaacagaaaaatgaagaatcaaaaaagaggcagtgggctttggaagactttgaaattggtcgccctctgggtaaaggaaagtttggtaatgtttatttggcaagagaaaagcaaagcaagtttattctggctcttaaagtgttatttaaagctcagctggagaaagccggagtggagcatcagctcagaagagaagtagaaatacagtcccaccttcggcatcctaatattcttagactgtatggttatttccatgatgctaccagagtctacctaattctggaatatgcaccacttggaacagtttatagagaacttcagaaactttcaaagtttgatgagcagagaactgctacttatataacagaattggcaaatgccctgtcttactgtcattcgaagagagttattcatagagacattaagccagagaacttacttcttggatcagctggagagcttaaaattgcagattttgggtggtcagtacatgctccatcttccaggaggaccactctctgtggcaccctggactacctgccccctgaaatgattgaaggtcggatgcatgatgagaaggtggatctctggagccttggagttctttgctatgaatttttagttgggaagcctccttttgaggcaaacacataccaagagacctacaaaagaatatcacgggttgaattcacattccctgactttgtaacagagggagccagggacctcatttcaagactgttgaagcataatcccagccagaggccaatgctcagagaagtacttgaacacccctggatcacagcaaattcatcaaaaccatcaaattgccaaaacaaagaatcagctagcaaacagtcttaggaatcgtgcagggggagaaatccttgagccagggctgccatataacctgacaggaacatgctactgaagtttattttaccattgactgctgccctcaatctagaacgctacacaagaaatatttgttttactcagcaggtgtgccttaacctccctattcagaaagctccacatcaataaacatgacactctgaagtgaaagtagccacgagaattgtgctacttatactggttcataatctggaggcaaggttcgactgcagccgccccgtcagcctgtgctaggcatggtgtcttcacaggaggcaaatccagagcctggctgtggggaaagtgaccactctgccctgaccccgatcagttaaggagctgtgcaataaccttcctagtacctgagtgagtgtgtaacttattgggttggcgaagcctggtaaagctgttggaatgagtatgtgattctttttaagtatgaaaataaagatatatgtacagacttgtattttttctctggtggcattcctttaggaatgctgtgtgtctgtccggcaccccggtaggcctgattgggtttctagtcctccttaaccacttatctcccatatgagagtgtgaaaaataggaacacgtgctctacctccatttagggatttgcttgggatacagaagaggccatgtgtctcagagctgttaagggcttatttttttaaaacattggagtcatagcatgtgtgtaaactttaaatatgcaaataaataagtatctatgtc

SEQ ID NO: 295524 - DNA, 2248 bp, Artificial Sequence
  derived and/or modified sequence
ggctgagctcttggaagacttgggtccttgggtcgcaggtgggagccgacgggtgggtagaccgtgggggatatctcagtggcggacgaggacggcggggacaaggggcggctggtcggagtggcggagcgtcaagtcccctgtcggttcctccgtccctgagtgtccttggcgctgccttgtgcccgcccagcgcctttgcatccgctcctgggcaccgaggcgccctgtaggatactgcttgttacttattacagctagaggcatcatggaccgatctaaagaaaactgcatttcaggacctgttaaggctacagctccagttggaggtccaaaacgtgttctcgtgactcagcaatttccttgtcagaatccattacctgtaaatagtggccaggctcagcgggtcttgtgtccttcaaattcttcccagcgcattcctttgcaagcacaaaagcttgtctccagtcacaagccggttcagaatcagaagcagaagcaattgcaggcaaccagtgtacctcatcctgtctccaggccactgaataacacccaaaagagcaagcagcccctgccatcggcacctgaaaataatcctgaggaggaactggcatcaaaacagaaaaatgaagaatcaaaaaagaggcagtgggctttggaagactttgaaattggtcgccctctgggtaaaggaaagtttggtaatgtttatttggcaagagaaaagcaaagcaagtttattctggctcttaaagtgttatttaaagctcagctggagaaagccggagtggagcatcagctcagaagagaagtagaaatacagtcccaccttcggcatcctaatattcttagactgtatggttatttccatgatgctaccagagtctacctaattctggaatatgcaccacttggaacagtttatagagaacttcagaaactttcaaagtttgatgagcagagaactgctacttatataacagaattggcaaatgccctgtcttactgtcattcgaagagagttattcatagagacattaagccagagaacttacttcttggatcagctggagagcttaaaattgcagattttgggtggtcagtacatgctccatcttccaggaggaccactctctgtggcaccctggactacctgccccctgaaatgattgaaggtcggatgcatgatgagaaggtggatctctggagccttggagttctttgctatgaatttttagttgggaagcctccttttgaggcaaacacataccaagagacctacaaaagaatatcacgggttgaattcacattccctgactttgtaacagagggagccagggacctcatttcaagactgttgaagcataatcccagccagaggccaatgctcagagaagtacttgaacacccctggatcacagcaaattcatcaaaaccatcaaattgccaaaacaaagaatcagctagcaaacagtcttaggaatcgtgcagggggagaaatccttgagccagggctgccatataacctgacaggaacatgctactgaagtttattttaccattgactgctgccctcaatctagaacgctacacaagaaatatttgttttactcagcaggtgtgccttaacctccctattcagaaagctccacatcaataaacatgacactctgaagtgaaagtagccacgagaattgtgctacttatactggttcataatctggaggcaaggttcgactgcagccgccccgtcagcctgtgctaggcatggtgtcttcacaggaggcaaatccagagcctggctgtggggaaagtgaccactctgccctgaccccgatcagttaaggagctgtgcaataaccttcctagtacctgagtgagtgtgtaacttattgggttggcgaagcctggtaaagctgttggaatgagtatgtgattctttttaagtatgaaaataaagatatatgtacagacttgtattttttctctggtggcattcctttaggaatgctgtgtgtctgtccggcaccccggtaggcctgattgggtttctagtcctccttaaccacttatctcccatatgagagtgtgaaaaataggaacacgtgctctacctccatttagggatttgcttgggatacagaagaggccatgtgtctcagagctgttaagggcttatttttttaaaacattggagtcatagcatgtgtgtaaactttaaatatgcaaataaataagtatctatgtc

SEQ ID NO: 295525 - DNA, 2112 bp, Artificial Sequence
  derived and/or modified sequence
cttggaagacttgggtccttgggtcgcaggctggagtgcaatggtgtgatctcagctcactgcaacctctgcttcctgggtttaagtgattctcctgcctcagcctcccgagtagctgggattacaggcatcatggaccgatctaaagaaaactgcatttcaggacctgttaaggctacagctccagttggaggtccaaaacgtgttctcgtgactcagcaatttccttgtcagaatccattacctgtaaatagtggccaggctcagcgggtcttgtgtccttcaaattcttcccagcgcattcctttgcaagcacaaaagcttgtctccagtcacaagccggttcagaatcagaagcagaagcaattgcaggcaaccagtgtacctcatcctgtctccaggccactgaataacacccaaaagagcaagcagcccctgccatcggcacctgaaaataatcctgaggaggaactggcatcaaaacagaaaaatgaagaatcaaaaaagaggcagtgggctttggaagactttgaaattggtcgccctctgggtaaaggaaagtttggtaatgtttatttggcaagagaaaagcaaagcaagtttattctggctcttaaagtgttatttaaagctcagctggagaaagccggagtggagcatcagctcagaagagaagtagaaatacagtcccaccttcggcatcctaatattcttagactgtatggttatttccatgatgctaccagagtctacctaattctggaatatgcaccacttggaacagtttatagagaacttcagaaactttcaaagtttgatgagcagagaactgctacttatataacagaattggcaaatgccctgtcttactgtcattcgaagagagttattcatagagacattaagccagagaacttacttcttggatcagctggagagcttaaaattgcagattttgggtggtcagtacatgctccatcttccaggaggaccactctctgtggcaccctggactacctgccccctgaaatgattgaaggtcggatgcatgatgagaaggtggatctctggagccttggagttctttgctatgaatttttagttgggaagcctccttttgaggcaaacacataccaagagacctacaaaagaatatcacgggttgaattcacattccctgactttgtaacagagggagccagggacctcatttcaagactgttgaagcataatcccagccagaggccaatgctcagagaagtacttgaacacccctggatcacagcaaattcatcaaaaccatcaaattgccaaaacaaagaatcagctagcaaacagtcttaggaatcgtgcagggggagaaatccttgagccagggctgccatataacctgacaggaacatgctactgaagtttattttaccattgactgctgccctcaatctagaacgctacacaagaaatatttgttttactcagcaggtgtgccttaacctccctattcagaaagctccacatcaataaacatgacactctgaagtgaaagtagccacgagaattgtgctacttatactggttcataatctggaggcaaggttcgactgcagccgccccgtcagcctgtgctaggcatggtgtcttcacaggaggcaaatccagagcctggctgtggggaaagtgaccactctgccctgaccccgatcagttaaggagctgtgcaataaccttcctagtacctgagtgagtgtgtaacttattgggttggcgaagcctggtaaagctgttggaatgagtatgtgattctttttaagtatgaaaataaagatatatgtacagacttgtattttttctctggtggcattcctttaggaatgctgtgtgtctgtccggcaccccggtaggcctgattgggtttctagtcctccttaaccacttatctcccatatgagagtgtgaaaaataggaacacgtgctctacctccatttagggatttgcttgggatacagaagaggccatgtgtctcagagctgttaagggcttatttttttaaaacattggagtcatagcatgtgtgtaaactttaaatatgcaaataaataagtatctatgtc

SEQ ID NO: 295526 - DNA, 1902 bp, Artificial Sequence
  derived and/or modified sequence
gaattctaacggctgagctcttggaagacttgggtccttgggtcgcaggcatcatggaccgatctaaagaaaactgcatttcaggacctgttaaggctacagctccagttggaggtccaaaacgtgttctcgtgactcagcaatttccttgtcagaatccattacctgtaaatagtggccaggctcagcgggtcttgtgtccttcaaattcttcccagcgcattcctttgcaagcacaaaagcttgtctccagtcacaagccggttcagaatcagaagcagaagcaattgcaggcaaccagtgtacctcatcctgtctccaggccactgaataacacccaaaagagcaagcagcccctgccatcggcacctgaaaataatcctgaggaggaactggcatcaaaacagaaaaatgaagaatcaaaaaagaggcagtgggctttggaagactttgaaattggtcgccctctgggtaaaggaaagtttggtaatgtttatttggcaagagaaaagcaaagcaagtttattctggctcttaaagtgttatttaaagctcagctggagaaagccggagtggagcatcagctcagaagagaagtagaaatacagtcccaccttcggcatcctaatattcttagactgtatggttatttccatgatgctaccagagtctacctaattctggaatatgcaccacttggaacagtttatagagaacttcagaaactttcaaagtttgatgagcagagaactgctacttatataacagaattggcaaatgccctgtcttactgtcattcgaagagagttattcatagagacattaagccagagaacttacttcttggatcagctggagagcttaaaattgcagattttgggtggtcagtacatgctccatcttccaggaggaccactctctgtggcaccctggactacctgccccctgaaatgattgaaggtcggatgcatgatgagaaggtggatctctggagccttggagttctttgctatgaatttttagttgggaagcctccttttgaggcaaacacataccaagagacctacaaaagaatatcacgggtaagacgcaactgaaaaggacccagcacatctgctggaattctttccttatcagcctgaactgcaggccaagatccgaacatctatactatttgatctctctaacctgtgttttgtgatattttatcatttgttgtactccaggttgaattcacattccctgactttgtaacagagggagccagggacctcatttcaagactgttgaagcataatcccagccagaggccaatgctcagagaagtacttgaacacccctggatcacagcaaattcatcaaaaccatcaaattgccaaaacaaagaatcagctagcaaacagtcttaggaatcgtgcagggggagaaatccttgagccagggctgccatataacctgacaggaacatgctactgaagtttattttaccattgactgctgccctcaatctagaacgctacacaagaaatatttgttttactcagcaggtgtgccttaacctccctattcagaaagctccacatcaataaacatgacactctgaagtgaaagtagccacgagaattgtgctacttatactggttcataatctggaggcaaggttcgactgcagccgccccgtcagcctgtgctaggcatggtgtcttcacaggaggcaaatccagagcctggctgtggggaaagtgaccactctgccctgaccccgatcagttaaggagctgtgcaataaccttcctagtacctgagtgagtgtgtaacttattgggttggcgaagcctggtaaagctgttggaatgagtatgtgattctttttaagtatgaaaataaagatatatgtacaga

SEQ ID NO: 295527 - DNA, 2547 bp, Artificial Sequence
  derived and/or modified sequence
acaaggcagcctcgctcgagcgcaggccaatcggctttctagctagagggtttaactcctatttaaaaagaagaacctttgaattctaacggctgagctcttggaagacttgggtccttgggtcgcaggtgggagccgacgggtgggtagaccgtgggggatatctcagtggcggacgaggacggcggggacaaggggcggctggtcggagtggcggagcgtcaagtcccctgtcggttcctccgtccctgagtgtccttggcgctgccttgtgcccgcccagcgcctttgcatccgctcctgggcaccgaggcgccctgtaggatactgcttgttacttattacagctagagggtctcactccattgcccaggccagagtgcggggatatttgataagaaacttcagtgaaggccgggcgcggtggctcatgcccgtaatcccagcattttcggaggccgaggctggagtgcaatggtgtgatctcagctcactgcaacctctgcttcctgggtttaagtgattctcctgcctcagcctcccgagtagctgggattacaggcatcatggaccgatctaaagaaaactgcatttcaggacctgttaaggctacagctccagttggaggtccaaaacgtgttctcgtgactcagcaatttccttgtcagaatccattacctgtaaatagtggccaggctcagcgggtcttgtgtccttcaaattcttcccagcgcattcctttgcaagcacaaaagcttgtctccagtcacaagccggttcagaatcagaagcagaagcaattgcaggcaaccagtgtacctcatcctgtctccaggccactgaataacacccaaaagagcaagcagcccctgccatcggcacctgaaaataatcctgaggaggaactggcatcaaaacagaaaaatgaagaatcaaaaaagaggcagtgggctttggaagactttgaaattggtcgccctctgggtaaaggaaagtttggtaatgtttatttggcaagagaaaagcaaagcaagtttattctggctcttaaagtgttatttaaagctcagctggagaaagccggagtggagcatcagctcagaagagaagtagaaatacagtcccaccttcggcatcctaatattcttagactgtatggttatttccatgatgctaccagagtctacctaattctggaatatgcaccacttggaacagtttatagagaacttcagaaactttcaaagtttgatgagcagagaactgctacttatataacagaattggcaaatgccctgtcttactgtcattcgaagagagttattcatagagacattaagccagagaacttacttcttggatcagctggagagcttaaaattgcagattttgggtggtcagtacatgctccatcttccaggaggaccactctctgtggcaccctggactacctgccccctgaaatgattgaaggtcggatgcatgatgagaaggtggatctctggagccttggagttctttgctatgaatttttagttgggaagcctccttttgaggcaaacacataccaagagacctacaaaagaatatcacgggttgaattcacattccctgactttgtaacagagggagccagggacctcatttcaagactgttgaagcataatcccagccagaggccaatgctcagagaagtacttgaacacccctggatcacagcaaattcatcaaaaccatcaaattgccaaaacaaagaatcagctagcaaacagtcttaggaatcgtgcagggggagaaatccttgagccagggctgccatataacctgacaggaacatgctactgaagtttattttaccattgactgctgccctcaatctagaacgctacacaagaaatatttgttttactcagcaggtgtgccttaacctccctattcagaaagctccacatcaataaacatgacactctgaagtgaaagtagccacgagaattgtgctacttatactggttcataatctggaggcaaggttcgactgcagccgccccgtcagcctgtgctaggcatggtgtcttcacaggaggcaaatccagagcctggctgtggggaaagtgaccactctgccctgaccccgatcagttaaggagctgtgcaataaccttcctagtacctgagtgagtgtgtaacttattgggttggcgaagcctggtaaagctgttggaatgagtatgtgattctttttaagtatgaaaataaagatatatgtacagacttgtattttttctctggtggcattcctttaggaatgctgtgtgtctgtccggcaccccggtaggcctgattgggtttctagtcctccttaaccacttatctcccatatgagagtgtgaaaaataggaacacgtgctctacctccatttagggatttgcttgggatacagaagaggccatgtgtctcagagctgttaagggcttatttttttaaaacattggagtcatagcatgtgtgtaaactttaaatatgcaaataaataagtatctatgtct

SEQ ID NO: 295528 - DNA, 2145 bp, Artificial Sequence
  derived and/or modified sequence
gaattctaacggctgagctcttggaagacttgggtccttgggtcgcaggtgggagccgacgggctggagtgcaatggtgtgatctcagctcactgcaacctctgcttcctgggtttaagtgattctcctgcctcagcctcccgagtagctgggattacaggcatcatggaccgatctaaagaaaactgcatttcaggacctgttaaggctacagctccagttggaggtccaaaacgtgttctcgtgactcagcaatttccttgtcagaatccattacctgtaaatagtggccaggctcagcgggtcttgtgtccttcaaattcttcccagcgcattcctttgcaagcacaaaagcttgtctccagtcacaagccggttcagaatcagaagcagaagcaattgcaggcaaccagtgtacctcatcctgtctccaggccactgaataacacccaaaagagcaagcagcccctgccatcggcacctgaaaataatcctgaggaggaactggcatcaaaacagaaaaatgaagaatcaaaaaagaggcagtgggctttggaagactttgaaattggtcgccctctgggtaaaggaaagtttggtaatgtttatttggcaagagaaaagcaaagcaagtttattctggctcttaaagtgttatttaaagctcagctggagaaagccggagtggagcatcagctcagaagagaagtagaaatacagtcccaccttcggcatcctaatattcttagactgtatggttatttccatgatgctaccagagtctacctaattctggaatatgcaccacttggaacagtttatagagaacttcagaaactttcaaagtttgatgagcagagaactgctacttatataacagaattggcaaatgccctgtcttactgtcattcgaagagagttattcatagagacattaagccagagaacttacttcttggatcagctggagagcttaaaattgcagattttgggtggtcagtacatgctccatcttccaggaggaccactctctgtggcaccctggactacctgccccctgaaatgattgaaggtcggatgcatgatgagaaggtggatctctggagccttggagttctttgctatgaatttttagttgggaagcctccttttgaggcaaacacataccaagagacctacaaaagaatatcacgggttgaattcacattccctgactttgtaacagagggagccagggacctcatttcaagactgttgaagcataatcccagccagaggccaatgctcagagaagtacttgaacacccctggatcacagcaaattcatcaaaaccatcaaattgccaaaacaaagaatcagctagcaaacagtcttaggaatcgtgcagggggagaaatccttgagccagggctgccatataacctgacaggaacatgctactgaagtttattttaccattgactgctgccctcaatctagaacgctacacaagaaatatttgttttactcagcaggtgtgccttaacctccctattcagaaagctccacatcaataaacatgacactctgaagtgaaagtagccacgagaattgtgctacttatactggttcataatctggaggcaaggttcgactgcagccgccccgtcagcctgtgctaggcatggtgtcttcacaggaggcaaatccagagcctggctgtggggaaagtgaccactctgccctgaccccgatcagttaaggagctgtgcaataaccttcctagtacctgagtgagtgtgtaacttattgggttggcgaagcctggtaaagctgttggaatgagtatgtgattctttttaagtatgaaaataaagatatatgtacagacttgtattttttctctggtggcattcctttaggaatgctgtgtgtctgtccggcaccccggtaggcctgattgggtttctagtcctccttaaccacttatctcccatatgagagtgtgaaaaataggaacacgtgctctacctccatttagggatttgcttgggatacagaagaggccatgtgtctcagagctgttaagggcttatttttttaaaacattggagtcatagcatgtgtgtaaactttaaatatgcaaataaataagtatctatgtc

SEQ ID NO: 295529 - DNA, 2169 bp, Artificial Sequence
  derived and/or modified sequence
cttaaacgcgactcaaggcgtcgggtttgttgtcaaccaatcacaaggcagcctcgctcgagcgcaggccaatcggctttctagctagagggtttaactcctatttaaaaagaagaacctttgaattctaacggctgagctcttggaagacttgggtccttgggtcgcaggtgggagccgacgggcatcatggaccgatctaaagaaaactgcatttcaggacctgttaaggctacagctccagttggaggtccaaaacgtgttctcgtgactcagcaatttccttgtcagaatccattacctgtaaatagtggccaggctcagcgggtcttgtgtccttcaaattcttcccagcgcattcctttgcaagcacaaaagcttgtctccagtcacaagccggttcagaatcagaagcagaagcaattgcaggcaaccagtgtacctcatcctgtctccaggccactgaataacacccaaaagagcaagcagcccctgccatcggcacctgaaaataatcctgaggaggaactggcatcaaaacagaaaaatgaagaatcaaaaaagaggcagtgggctttggaagactttgaaattggtcgccctctgggtaaaggaaagtttggtaatgtttatttggcaagagaaaagcaaagcaagtttattctggctcttaaagtgttatttaaagctcagctggagaaagccggagtggagcatcagctcagaagagaagtagaaatacagtcccaccttcggcatcctaatattcttagactgtatggttatttccatgatgctaccagagtctacctaattctggaatatgcaccacttggaacagtttatagagaacttcagaaactttcaaagtttgatgagcagagaactgctacttatataacagaattggcaaatgccctgtcttactgtcattcgaagagagttattcatagagacattaagccagagaacttacttcttggatcagctggagagcttaaaattgcagattttgggtggtcagtacatgctccatcttccaggaggaccactctctgtggcaccctggactacctgccccctgaaatgattgaaggtcggatgcatgatgagaaggtggatctctggagccttggagttctttgctatgaatttttagttgggaagcctccttttgaggcaaacacataccaagagacctacaaaagaatatcacgggttgaattcacattccctgactttgtaacagagggagccagggacctcatttcaagactgttgaagcataatcccagccagaggccaatgctcagagaagtacttgaacacccctggatcacagcaaattcatcaaaaccatcaaattgccaaaacaaagaatcagctagcaaacagtcttaggaatcgtgcagggggagaaatccttgagccagggctgccatataacctgacaggaacatgctactgaagtttattttaccattgactgctgccctcaatctagaacgctacacaagaaatatttgttttactcagcaggtgtgccttaacctccctattcagaaagctccacatcaataaacatgacactctgaagtgaaagtagccacgagaattgtgctacttatactggttcataatctggaggcaaggttcgactgcagccgccccgtcagcctgtgctaggcatggtgtcttcacaggaggcaaatccagagcctggctgtggggaaagtgaccactctgccctgaccccgatcagttaaggagctgtgcaataaccttcctagtacctgagtgagtgtgtaacttattgggttggcgaagcctggtaaagctgttggaatgagtatgtgattctttttaagtatgaaaataaagatatatgtacagacttgtattttttctctggtggcattcctttaggaatgctgtgtgtctgtccggcaccccggtaggcctgattgggtttctagtcctccttaaccacttatctcccatatgagagtgtgaaaaataggaacacgtgctctacctccatttagggatttgcttgggatacagaagaggccatgtgtctcagagctgttaagggcttatttttttaaaacattggagtcatagcatgtgtgtaaactttaaatatgcaaataaataagtatctatgtc

SEQ ID NO: 295530 - DNA, 2238 bp, Artificial Sequence
  derived and/or modified sequence
acaaggcagcctcgctcgagcgcaggccaatcggctttctagctagagggtttaactcctatttaaaaagaagaacctttgaattctaacggctgagctcttggaagacttgggtccttgggtcgcaggtgggagccgacggggtctcactccattgcccaggccagagtgcggggatatttgataagaaacttcagtgaaggccgggcgcggtggctcatgcccgtaatcccagcattttcggaggccgaggcatcatggaccgatctaaagaaaactgcatttcaggacctgttaaggctacagctccagttggaggtccaaaacgtgttctcgtgactcagcaatttccttgtcagaatccattacctgtaaatagtggccaggctcagcgggtcttgtgtccttcaaattcttcccagcgcattcctttgcaagcacaaaagcttgtctccagtcacaagccggttcagaatcagaagcagaagcaattgcaggcaaccagtgtacctcatcctgtctccaggccactgaataacacccaaaagagcaagcagcccctgccatcggcacctgaaaataatcctgaggaggaactggcatcaaaacagaaaaatgaagaatcaaaaaagaggcagtgggctttggaagactttgaaattggtcgccctctgggtaaaggaaagtttggtaatgtttatttggcaagagaaaagcaaagcaagtttattctggctcttaaagtgttatttaaagctcagctggagaaagccggagtggagcatcagctcagaagagaagtagaaatacagtcccaccttcggcatcctaatattcttagactgtatggttatttccatgatgctaccagagtctacctaattctggaatatgcaccacttggaacagtttatagagaacttcagaaactttcaaagtttgatgagcagagaactgctacttatataacagaattggcaaatgccctgtcttactgtcattcgaagagagttattcatagagacattaagccagagaacttacttcttggatcagctggagagcttaaaattgcagattttgggtggtcagtacatgctccatcttccaggaggaccactctctgtggcaccctggactacctgccccctgaaatgattgaaggtcggatgcatgatgagaaggtggatctctggagccttggagttctttgctatgaatttttagttgggaagcctccttttgaggcaaacacataccaagagacctacaaaagaatatcacgggttgaattcacattccctgactttgtaacagagggagccagggacctcatttcaagactgttgaagcataatcccagccagaggccaatgctcagagaagtacttgaacacccctggatcacagcaaattcatcaaaaccatcaaattgccaaaacaaagaatcagctagcaaacagtcttaggaatcgtgcagggggagaaatccttgagccagggctgccatataacctgacaggaacatgctactgaagtttattttaccattgactgctgccctcaatctagaacgctacacaagaaatatttgttttactcagcaggtgtgccttaacctccctattcagaaagctccacatcaataaacatgacactctgaagtgaaagtagccacgagaattgtgctacttatactggttcataatctggaggcaaggttcgactgcagccgccccgtcagcctgtgctaggcatggtgtcttcacaggaggcaaatccagagcctggctgtggggaaagtgaccactctgccctgaccccgatcagttaaggagctgtgcaataaccttcctagtacctgagtgagtgtgtaacttattgggttggcgaagcctggtaaagctgttggaatgagtatgtgattctttttaagtatgaaaataaagatatatgtacagacttgtattttttctctggtggcattcctttaggaatgctgtgtgtctgtccggcaccccggtaggcctgattgggtttctagtcctccttaaccacttatctcccatatgagagtgtgaaaaataggaacacgtgctctacctccatttagggatttgcttgggatacagaagaggccatgtgtctcagagctgttaagggcttatttttttaaaacattggagtcatagcatgtgtgtaaactttaaatatgcaaataaataagtatctatgtct

SEQ ID NO: 295531 - DNA, 2114 bp, Artificial Sequence
  derived and/or modified sequence
cacaaggcagcctcgctcgagcgcaggccaatcggctttctagctagagggtttaactcctatttaaaaagaagaacctttgaattctaacggctgagctcttggaagacttgggtccttgggtcgcaggcatcatggaccgatctaaagaaaactgcatttcaggacctgttaaggctacagctccagttggaggtccaaaacgtgttctcgtgactcagcaatttccttgtcagaatccattacctgtaaatagtggccaggctcagcgggtcttgtgtccttcaaattcttcccagcgcattcctttgcaagcacaaaagcttgtctccagtcacaagccggttcagaatcagaagcagaagcaattgcaggcaaccagtgtacctcatcctgtctccaggccactgaataacacccaaaagagcaagcagcccctgccatcggcacctgaaaataatcctgaggaggaactggcatcaaaacagaaaaatgaagaatcaaaaaagaggcagtgggctttggaagactttgaaattggtcgccctctgggtaaaggaaagtttggtaatgtttatttggcaagagaaaagcaaagcaagtttattctggctcttaaagtgttatttaaagctcagctggagaaagccggagtggagcatcagctcagaagagaagtagaaatacagtcccaccttcggcatcctaatattcttagactgtatggttatttccatgatgctaccagagtctacctaattctggaatatgcaccacttggaacagtttatagagaacttcagaaactttcaaagtttgatgagcagagaactgctacttatataacagaattggcaaatgccctgtcttactgtcattcgaagagagttattcatagagacattaagccagagaacttacttcttggatcagctggagagcttaaaattgcagattttgggtggtcagtacatgctccatcttccaggaggaccactctctgtggcaccctggactacctgccccctgaaatgattgaaggtcggatgcatgatgagaaggtggatctctggagccttggagttctttgctatgaatttttagttgggaagcctccttttgaggcaaacacataccaagagacctacaaaagaatatcacgggttgaattcacattccctgactttgtaacagagggagccagggacctcatttcaagactgttgaagcataatcccagccagaggccaatgctcagagaagtacttgaacacccctggatcacagcaaattcatcaaaaccatcaaattgccaaaacaaagaatcagctagcaaacagtcttaggaatcgtgcagggggagaaatccttgagccagggctgccatataacctgacaggaacatgctactgaagtttattttaccattgactgctgccctcaatctagaacgctacacaagaaatatttgttttactcagcaggtgtgccttaacctccctattcagaaagctccacatcaataaacatgacactctgaagtgaaagtagccacgagaattgtgctacttatactggttcataatctggaggcaaggttcgactgcagccgccccgtcagcctgtgctaggcatggtgtcttcacaggaggcaaatccagagcctggctgtggggaaagtgaccactctgccctgaccccgatcagttaaggagctgtgcaataaccttcctagtacctgagtgagtgtgtaacttattgggttggcgaagcctggtaaagctgttggaatgagtatgtgattctttttaagtatgaaaataaagatatatgtacagacttgtattttttctctggtggcattcctttaggaatgctgtgtgtctgtccggcaccccggtaggcctgattgggtttctagtcctccttaaccacttatctcccatatgagagtgtgaaaaataggaacacgtgctctacctccatttagggatttgcttgggatacagaagaggccatgtgtctcagagctgttaagggcttatttttttaaaacattggagtcatagcatgtgtgtaaactttaaatatgcaaataaataagtatctatgtc

SEQ ID NO: 295532 - DNA, 991 bp, Artificial Sequence
  derived and/or modified sequence
gaattctaacggctgagctcttggaagacttgggtccttgggtcgcaggtgggagccgacggggtctcactccattgcccaggccagagtgcggggatatttgataagaaacttcagtgaaggccgggcgcggtggctcatgcccgtaatcccagcattttcggaggccgaggcatcatggaccgatctaaagaaaactgcatttcaggacctgttaaggctacagctccagttggaggtccaaaacgtgttctcgtgactcagcaatttccttgtcagaatccattacctgtaaatagtggccaggctcagcgggtcttgtgtccttcaaattcttcccagcgcattcctttgcaagcacaaaagcttgtctccagtcacaagccggttcagaatcagaagcagaagcaattgcaggcaaccagtgtacctcatcctgtctccaggccactgaataacacccaaaagagcaagcagcccctgccatcggcacctgaaaataatcctgaggaggaactggcatcaaaacagaaaaatgaagaatcaaaaaagaggcagtgggctttggaagactttgaaattggtcgccctctgggtaaaggaaagtttggtaatgtttatttggcaagagaaaagcaaagcaagtttattctggctcttaaagtgttatttaaagctcagctggagaaagccggagtggagcatcagctcagaagagaagtagaaatacagtcccaccttcggcatcctaatattcttagactgtatggttatttccatgatgctaccagagtctacctaattctggaatatgcaccacttggaacagtttatagagaacttcagaaactttcaaagtttgatgagcagagaactgctacttatataacagaattggcaaatgccctgtcttactgtcattcgaagagagttattcatagagacattaagccagagaacttacttcttggatcagctggagagcttaaaa

SEQ ID NO: 295533 - DNA, 1212 bp, Artificial Sequence
  derived and/or modified sequence
atggacagaagcaaggagaactgcatcagcggccccgtgaaggccaccgcccccgtgggcggccccaagagagtgctggtgacccagcagttcccctgccagaaccccctgcccgtgaacagcggccaggcccagagagtgctgtgccccagcaacagcagccagagaatccccctgcaggcccagaagctggtgagcagccacaagcccgtgcagaaccagaagcagaagcagctgcaggccaccagcgtgccccaccccgtgagcagacccctgaacaacacccagaagagcaagcagcccctgcccagcgcccccgagaacaaccccgaggaggagctggccagcaagcagaagaacgaggagagcaagaagagacagtgggccctggaggacttcgagatcggcagacccctgggcaagggcaagttcggcaacgtgtacctggccagagagaagcagagcaagttcatcctggccctgaaggtgctgttcaaggcccagctggagaaggccggcgtggagcaccagctgagaagagaggtggagatccagagccacctgagacaccccaacatcctgagactgtacggctacttccacgacgccaccagagtgtacctgatcctggagtacgcccccctgggcaccgtgtacagagagctgcagaagctgagcaagttcgacgagcagagaaccgccacctacatcaccgagctggccaacgccctgagctactgccacagcaagagagtgatccacagagacatcaagcccgagaacctgctgctgggcagcgccggcgagctgaagatcgccgacttcggctggagcgtgcacgcccccagcagcagaagaaccaccctgtgcggcaccctggactacctgccccccgagatgatcgagggcagaatgcacgacgagaaggtggacctgtggagcctgggcgtgctgtgctacgagttcctggtgggcaagccccccttcgaggccaacacctaccaggagacctacaagagaatcagcagagtggagttcaccttccccgacttcgtgaccgagggcgccagagacctgatcagcagactgctgaagcacaaccccagccagagacccatgctgagagaggtgctggagcacccctggatcaccgccaacagcagcaagcccagcaactgccagaacaaggagagcgccagcaagcagagctag

SEQ ID NO: 295534 - DNA, 1044 bp, Artificial Sequence
  derived and/or modified sequence
atggacagaagcaaggagaactgcatcagcggccccgtgaaggccaccgcccccgtgggcggccccaagagagtgctggtgacccagcagttcccctgccagaaccccctgcccgtgaacagcggccaggcccagagagtgctgtgccccagcaacagcagccagagaatccccctgcaggcccagaagctggtgagcagccacaagcccgtgcagaaccagaagcagaagcagctgcaggccaccagcgtgccccaccccgtgagcagacccctgaacaacacccagaagagcaagcagcccctgcccagcgcccccgagaacaaccccgaggaggagctggccagcaagcagaagaacgaggagagcaagaagagacagtgggccctggaggacttcgagatcggcagacccctgggcaagggcaagttcggcaacgtgtacctggccagagagaagcagagcaagttcatcctggccctgaaggtgctgttcaaggcccagctggagaaggccggcgtggagcaccagctgagaagagaggtggagatccagagccacctgagacaccccaacatcctgagactgtacggctacttccacgacgccaccagagtgtacctgatcctggagtacgcccccctgggcaccgtgtacagagagctgcagaagctgagcaagttcgacgagcagagaaccgccacctacatcaccgagctggccaacgccctgagctactgccacagcaagagagtgatccacagagacatcaagcccgagaacctgctgctgggcagcgccggcgagctgaagatcgccgacttcggctggagcgtgcacgcccccagcagcagaagaaccaccctgtgcggcaccctggactacctgccccccgagatgatcgagggcagaatgcacgacgagaaggtggacctgtggagcctgggcgtgctgtgctacgagttcctggtgggcaagccccccttcgaggccaacacctaccaggagacctacaagagaatcagcagagtgagaagaaactag

SEQ ID NO: 295535 - DNA, 816 bp, Artificial Sequence
  derived and/or modified sequence
atggacagaagcaaggagaactgcatcagcggccccgtgaaggccaccgcccccgtgggcggccccaagagagtgctggtgacccagcagttcccctgccagaaccccctgcccgtgaacagcggccaggcccagagagtgctgtgccccagcaacagcagccagagaatccccctgcaggcccagaagctggtgagcagccacaagcccgtgcagaaccagaagcagaagcagctgcaggccaccagcgtgccccaccccgtgagcagacccctgaacaacacccagaagagcaagcagcccctgcccagcgcccccgagaacaaccccgaggaggagctggccagcaagcagaagaacgaggagagcaagaagagacagtgggccctggaggacttcgagatcggcagacccctgggcaagggcaagttcggcaacgtgtacctggccagagagaagcagagcaagttcatcctggccctgaaggtgctgttcaaggcccagctggagaaggccggcgtggagcaccagctgagaagagaggtggagatccagagccacctgagacaccccaacatcctgagactgtacggctacttccacgacgccaccagagtgtacctgatcctggagtacgcccccctgggcaccgtgtacagagagctgcagaagctgagcaagttcgacgagcagagaaccgccacctacatcaccgagctggccaacgccctgagctactgccacagcaagagagtgatccacagagacatcaagcccgagaacctgctgctgggcagcgccggcgagctgaagtag

SEQ ID NO: 295536 - protein, 373 aa, Artificial Sequence
  derived and/or modified sequence
MCQSHMIGFCTSSVNEETETQGDQISCPNPTTLVFRTQISSLPSLQLSNLKVLNHSPMSDASVNFDYKSPSPFDCSTDQEEKIEDVASHCLPQKDLYTAEEEAATLFPRKMTSHNGMEDSGGGGTGVKKKRKKKEPGDQEGAAKGSKDREPKPKRKREPKEPKEPRKAKEPKKAKEHKEPKQKDGAKKARKPREASGTKEAKEKRSCTDSAARTKSRKASKEQGPTPVEKKKKGKRKSETTVESLELDQGLTNPSLRSPEESTESTDSQKRRSGRQVKRRKYNEDLDFKVVDDDGETIAVLGAGRTSALSASTLAWQAEEPPEDDANIIEKILASKTVQEVHPGEPPFDLELFYVKYRNLYVYLKYSLYLGFI

SEQ ID NO: 295537 - protein, 149 aa, Artificial Sequence
  derived and/or modified sequence
MKMKIQKKEKQLSNLKVLNHSPMSDASVNFDYKSPSPFDCSTDQEEKIEDVASHCLPQKDLYTAEEEAATLFPRKMTSHNGMEDSGGGGTGVKKKRKKKEPGDQEGAAKGSKDREPKPKRKREPKEPKEPRKAKEPKKAKEHKEPKQKD

SEQ ID NO: 295538 - DNA, 1122 bp, Artificial Sequence
  derived and/or modified sequence
atgtgccaatctcacatgattgggttctgtactagctcagtgaacgaggagaccgagactcagggcgaccagatttcctgtcctaatccgaccacactggtgttccgcacccagatctccagtctgccatccttgcagttgagcaatctgaaagttctgaaccactccccaatgtctgacgcctcggtcaacttcgactacaagtccccctccccctttgattgttccaccgatcaagaagagaagattgaagatgtggcgtcccactgtcttccacagaaagatctctataccgccgaagaagaagccgccacactgtttccccgtaagatgacttcccacaacgggatggaggattctggaggtggaggaactggagtgaaaaagaaacgaaaaaagaaggaacctggcgatcaggaaggcgccgcaaaagggagcaaggacagggaacctaagcccaagcgaaagagggaaccgaaagagccaaaggagccgaggaaggcgaaggagcctaaaaaagcaaaggaacataaggagcctaaacagaaggacggggcaaaaaaagcccgcaagccccgcgaggcctcaggtacaaaagaggctaaggagaaacggtcttgcaccgattccgccgcgaggaccaaatccagaaaggccagcaaggagcagggcccaaccccggtggaaaaaaaaaaaaaaggtaagcgcaaaagcgagactaccgtagaaagtctggaactggatcagggcctgactaatccgtcactccgatctcccgaagaatccacagaaagcacagatagccaaaagcggcgctccgggcggcaggttaaaagaaggaagtataacgaagaccttgatttcaaagtcgtcgacgacgatggagagaccatcgccgtgctgggcgccgggaggacctccgcactcagcgccagtacactggcttggcaggccgaagagccccccgaagatgatgcaaacatcattgagaagatcctggcaagtaagactgtacaagaagtacaccccggtgagccgccatttgatcttgagcttttctacgttaaatatagaaatctttacgtgtatctgaaatactcgctctatctcggctttatctag

SEQ ID NO: 295539 - DNA, 1578 bp, Artificial Sequence
  derived and/or modified sequence
tgagccagcaaaaccgtccaggaagtgcacccaggcgaaccaccctttgaccttgaactcttttatgtcaaatatcggaacttttcgtacttgcattgcaaatgggccaccatggaggagctggagaaagatccaaggatagctcaaaagatcaaaaggttccgcaacaagcaggctcagatgaaacatatatttaccgagccagacgaggatcttttcaacccagattatgtggaggtcgatagaatcctcgaagttgctcacactaaagatgccgagactggcgaggaggttacccactatctggtgaaatggtgcagcctgccttatgaggagtccacttgggagctcgaagaagacgttgatcccgcgaaagtcaaggaattcgaatcactgcaagttctcccggagataaaacacgtcgagcgacccgccagcgacagttggcaaaagctagaaaagagccgcgaatataaaaacagcaatcagctgcgcgagtatcagttagagggtatgaactggctgctgtttaactggtacaataggaaaaattgcatccttgccgatgaaatggggcttgggaaaaccatccagtcaataacgtttttgagcgagatatttttgagaggaattcacggacccttcctgatcatcgctcccttatcaaccatcacgaactgggaaagggagtttaggacctggaccgaaatgaacgccattgtataccatgggagccagattagcagacagatgatccagcagtacgagatggtgtacagggacgcccagggaaacccactgtcaggcgtgttcaagtttcacgtcgtcattactacattcgagatgattttggccgattgcccagagctgaagaagattcactggggaagatggaaagatatcctgacacatggcaggttcaaatggcacttgaatgagaaggatatggagatgatatgcagagccctgttggtttattgcgtgaagcactacaaaggggatgaaaagatcaagagttttatttgggagctaataacccccaccaaggatggacaagcacagacactccagaaccactctgggctttccgcacctgttccgcgcgggcgaaaaggcaaaaagacaaaaaatcagcttctgatccctgagttaaaggatgccgattggctcgccacctgtaaccctgaggtggtcttgcatgacgacgggtacaagaagcacctaaaacagcactgtaataaagtgctcctccgcgttcggatgttgtattaccttaaggctgaaattctcggcgaggccgccgagaaagccttcgaaggctcccccgctcgagagctcgatgtgcctctgccggatatcgactacatggagataccagtcgactggtgggacgccgaagccgacaagtcactcctcataggtgtgtttaagcacggttatgagaggtacaacgctatgagggcagaccctgcactatgttttctcgagaaagtcggcatgcccgacgagaagtccctgagcgccgagcagggcgtaaccgatggcacgagcgatatccccgagcgccagcaccggtag

SEQ ID NO: 295540 - DNA, 1122 bp, Artificial Sequence
  derived and/or modified sequence
atgtgccagagccacatgattggcttctgcaccagctctgtgaatgaggagacagagacccagggcgaccagatcagctgccccaaccccaccaccctggtgttccgcacccagatcagcagcctgcccagcctgcagctgagcaacctgaaggtgctgaaccacagccccatgtctgatgcctctgtgaactttgactacaagagccccagcccctttgactgcagcacagaccaggaggagaagattgaagatgtggccagccactgcctgccccagaaggacctgtacacagctgaggaggaggccgccaccctcttccccaggaagatgaccagccacaacggcatggaggacagcggcggcggcggcactggagtgaagaagaagaggaagaagaaggagcccggggaccaggagggcgccgccaagggcagcaaggaccgggagcccaagcccaagaggaagcgggagcccaaggagcccaaggagcccaggaaggccaaggagcccaagaaggccaaggagcacaaggagcccaagcagaaggatggagccaagaaggccaggaagccccgggaggccagcggcaccaaggaggccaaggagaagaggagctgcacagacagcgctgcccggaccaagagcaggaaggccagcaaggagcagggccccacccctgtggagaagaagaagaagggcaagaggaagtctgagaccaccgtggagagcctggagctggaccagggcctgaccaaccccagcctgcggagccctgaggagagcacagagagcacagacagccagaagagaagaagtggccggcaggtgaagaggaggaagtacaatgaagacctggacttcaaggtggtggatgatgatggagagaccatcgctgtgctgggcgccggccgcaccagcgccctgagcgccagcaccctggcctggcaggccgaggagcccccagaagatgatgccaacatcatcgagaagatcctggccagcaagacagtgcaggaggtgcaccctggagagcccccatttgacctggagctgttctacgtgaagtacagaaacctgtatgtgtacctgaagtacagcctgtacctgggcttcatctag

SEQ ID NO: 295541 - DNA, 1578 bp, Artificial Sequence
  derived and/or modified sequence
tgagccagcaagacagtgcaggaggtgcaccctggagagcccccatttgacctggagctgttctacgtgaagtacagaaacttctcctacctgcactgcaagtgggccaccatggaggagctggagaaggaccccagaattgcccagaagatcaagcgcttcaggaacaagcaggcccagatgaagcacatcttcacagagccagatgaggacctcttcaacccagactatgtggaggtggaccgcatcctggaggtggcccacaccaaggatgctgagaccggggaggaggtgacccactacctggtgaagtggtgcagcctgccctatgaggagagcacctgggagctggaggaggatgtggaccctgccaaggtgaaggagtttgagagcctgcaggtgctgcctgagatcaagcacgtggagaggcctgccagtgacagctggcagaagctggagaagagccgggagtacaagaacagcaaccagctgcgggagtaccagctggagggcatgaactggctgctcttcaactggtacaacaggaagaactgcatcctggctgatgagatgggcctgggcaagaccatccagagcatcaccttcctgtctgagatcttcctgcggggcatccacggccccttcctgatcatcgcccccctgagcaccatcaccaactgggagcgggagttccgcacctggacagagatgaatgccatcgtgtaccacggcagccagatcagccggcagatgatccagcagtatgagatggtgtacagagatgcccagggcaaccccctgagcggggtcttcaagttccacgtggtgatcaccacctttgagatgatcctggccgactgcccagagctgaagaagatccactggggccgctggaaggacatcctgacccacggccgcttcaagtggcacctgaatgagaaggacatggagatgatctgccgggccctgctggtgtactgtgtgaagcactacaagggagatgagaagatcaagagcttcatctgggagctgatcacccccaccaaggatggccaggcccagaccctgcagaaccacagcggcctgagcgcccctgtgccccggggcaggaagggcaagaagaccaagaaccagctgctgatccctgagctgaaggatgctgactggctggccacctgcaaccctgaggtggtgctgcatgatgatggctacaagaagcacctgaagcagcactgcaacaaggtgctgctgcgggtgaggatgctgtactacctgaaggccgagatcctgggggaggccgctgagaaggcctttgagggcagccctgcccgggagctggatgtgcccctgcctgacatcgactacatggagatccctgtggactggtgggatgctgaggccgacaagagcctgctgattggagtcttcaagcacggctatgaaagatacaatgccatgagagctgaccctgccctgtgcttcctggagaaggtgggcatgccagatgagaagagcctgtctgctgagcagggcgtgacagatggcaccagtgacatccctgagcggcagcacaggtag

SEQ ID NO: 295542 - DNA, 1122 bp, Artificial Sequence
  derived and/or modified sequence
atgtgccagagccacatgatcggcttctgcaccagcagcgtgaacgaggagaccgaaacgcaaggggatcagatctcttgcccaaacccaaccactctcgtgttcagaacccaaatctccagtcttccttccctgcaactttctaatcttaaagttttgaaccattcccctatgtctgatgcctccgtaaactttgactataagtcgccttctccatttgactgcagcaccgatcaggaagagaaaatcgaggacgtcgctagccactgtctgccacagaaagacctgtacacggccgaagaggaggcggccacactcttccctagaaaaatgacttcccataacggtatggaggactctggcggaggtggtactggggtgaagaaaaagcggaaaaaaaaagagccaggggatcaggagggggcggccaagggaagcaaggatcgagagccgaagccaaagcgaaaacgtgagcctaaagaaccaaaggagcccaggaaagcgaaagaacccaaaaaggccaaagaacataaggagcctaagcagaaagatggtgccaagaaagcgcggaaacccagggaggcgagcggaactaaagaagccaaagagaagcggtcttgcactgactccgcggccaggaccaagagccgcaaggccagtaaagagcaaggacctactcccgtcgagaagaaaaagaaaggaaagagaaagtcagaaacaacggtggagagcctggagctggatcaggggttgactaatccgagtctgagaagcccagaggagtccacggaatcgaccgactcacagaaaagacggtctggcaggcaggttaaaagaagaaaatataacgaggatcttgatttcaaggtggtggatgacgatggcgagactatcgctgttctcggagcaggacgcacctcagccctgtctgcgagcacactagcctggcaggccgaagagcctcctgaggacgacgcaaatattatcgagaagatcctcgcctcaaaaactgtgcaggaggtacatccaggcgagcccccctttgatcttgaattgttttatgtgaagtacaggaacctctatgtgtatctgaaatactcactgtacctgggattcatctag

SEQ ID NO: 295543 - DNA, 1578 bp, Artificial Sequence
  derived and/or modified sequence
tgagccagcaagaccgtgcaggaggtgcaccccggcgagccccccttcgacctagagctgttttatgttaaatataggaatttcagctacctgcactgcaagtgggccacaatggaagaactggagaaagatcctcgaatcgcccaaaagataaagcgcttccgtaacaagcaggcgcagatgaaacacatcttcaccgagccggacgaagacttgtttaatccggattacgttgaggtggaccggattctggaggtggcacacaccaaggacgctgagaccggcgaggaggtcacccattatctggtcaagtggtgtagcctgccttatgaggaaagcacatgggagctggaagaggacgtggatcctgctaaagtcaaggaatttgagtctttacaagtgcttcctgaaataaagcatgtcgagaggcctgccagcgacagctggcagaagctcgagaagtctcgggaatataaaaactcgaaccagttaagggaatatcaattggaggggatgaactggctgttgttcaattggtataacaggaaaaactgtatcctggccgacgaaatgggcctggggaaaacaatccagtcaatcacatttctatctgaaatctttttacggggaatccacggccccttcttgatcatcgcccccttgagtaccataactaactgggagagagaatttcggacatggactgagatgaacgcaatagtctatcatggcagccaaataagccgccagatgatccagcagtatgagatggtgtaccgcgacgctcagggcaatcccttatctggagttttcaagttccatgtggtgatcaccacctttgaaatgattttggctgactgtcccgagctaaaaaagatccactggggccgatggaaggacattctgactcacgggcgctttaagtggcacctaaatgagaaggacatggaaatgatttgccgtgccctgctggtctattgtgtgaaacactataaaggagatgagaagatcaagagctttatttgggagttaataactccaaccaaggatggtcaggcccaaaccctgcagaatcactctggcctgtccgctcccgtgcctcgcgggcgaaaaggaaaaaaaaccaagaatcagttactgatccccgaactaaaagacgctgactggctagccacatgcaatcctgaggtcgttcttcatgacgacggatacaagaaacacctgaaacaacactgcaataaagtcttacttcgcgtgcgcatgctgtactacctgaaagctgagattctgggagaggcagctgaaaaagcattcgagggaagccccgcccgagaactggatgtgccactgccggacattgattatatggagatcccagtggactggtgggacgccgaggccgataagtccctgctgatcggcgtcttcaagcacggatatgaaaggtacaatgccatgcgtgctgatcctgccctatgctttctggagaaggtgggcatgcctgatgaaaaatctctcagcgccgagcagggagtgactgatggcactagcgatatccctgaaagacagcaccggtag

SEQ ID NO: 295544 - DNA, 1122 bp, Artificial Sequence
  derived and/or modified sequence
atgtgccaatcacacatgatcggattttgtacctctagcgttaacgaagagactgagactcaaggcgaccagataagttgccctaaccccaccactttagtgttcagaacacagatttcctctctcccctccctgcagctgagcaacttgaaggttctgaaccattctccgatgagcgacgcgagcgtgaactttgattacaagagtccaagcccctttgattgctctactgaccaggaggaaaagatcgaggacgttgcctcacactgtctgccccaaaaggacctgtatacagcagaagaggaggccgctaccttgttcccaaggaagatgactagccacaacgggatggaagactcaggtggaggcggtaccggagttaagaaaaaacggaaaaagaaggaacccggagaccaggagggagctgccaaaggttcaaaggacagagagccgaaaccaaaaaggaagcgtgagcccaaagaacccaaagaaccaaggaaggccaaagagcccaagaaggctaaagagcacaaagagcctaaacaaaaagacggcgcaaaaaaagcacgcaagccacgtgaggctagtggaacaaaagaagctaaggaaaagagatcttgcacagatagcgcagccagaactaagtcccgcaaggcatctaaggagcaggggccaactccggtggagaagaaaaaaaagggaaagcgcaaatccgagactaccgtagaatccctggagctggatcaggggttaactaatccatccctgcggtctccagaagagtctaccgaatctaccgacagtcagaagcgtcggtcaggacgccaggtgaagaggaggaagtataatgaagatttggacttcaaagtagtagacgacgacggtgagacaatcgcagtcctgggtgccggtcgtaccagtgcactctctgcctcgaccctagcttggcaggctgaggagcccccagaggacgatgccaatataatcgagaagatcctggccagcaagacagtacaggaggtccaccccggtgagccaccattcgatctcgaacttttttacgttaagtatcgaaatctgtacgtgtatcttaagtactctctctatttgggttttatctag

SEQ ID NO: 295545 - DNA, 1578 bp, Artificial Sequence
  derived and/or modified sequence
tgagccagcaagactgtacaggaggtgcaccctggagagcccccattcgatcttgagctgttttatgtgaagtatcgcaacttcagctatttacattgtaagtgggccacaatggaagagcttgagaaagacccacgaatcgcccagaaaattaagaggtttagaaataaacaggcccagatgaagcacatcttcactgaacctgatgaggacctatttaaccccgactacgtagaggtcgacagaattttagaagtagcccacacaaaggacgcagagacaggagaggaagtgacccattatcttgtaaaatggtgtagcctgccctacgaggaatccacctgggaattggaagaggatgtagacccagcaaaggtcaaagagtttgaatctctccaggttctcccagaaatcaaacatgtggagcggccagcgtctgattcttggcagaagctggagaagtcaagagagtacaaaaatagtaatcaacttagagagtaccaactggagggtatgaattggctcctcttcaattggtataaccggaaaaattgtatccttgcggacgaaatgggcctgggcaagaccatacagtcgatcaccttcctgagtgagattttcctgaggggcattcatgggccattcttgattattgctccactctctacaatcactaattgggaaagagagtttagaacatggacagaaatgaatgcaatcgtgtaccacgggtcgcagattagcagacagatgatccagcagtacgaaatggtttaccgggacgcgcagggtaaccctctatccggtgtgttcaagttccacgtggtgatcacaacatttgagatgatactggccgattgtcctgaactgaaaaagatccattggggtcgttggaaggacatcctcacacacgggagattcaaatggcacctgaatgagaaggatatggaaatgatctgtcgggcactcctggtgtattgtgtcaaacattacaagggagacgagaagattaaatcgttcatttgggaactaatcacaccaaccaaagatggccaggcgcagactctgcagaaccactccggcttgtccgcacccgttcccagagggagaaagggtaagaaaaccaagaatcagctgctcatcccagaactgaaggacgcagattggctcgctacttgcaaccctgaagtggtgctgcacgacgatggctataaaaaacatctcaaacaacattgcaataaggtcttgctcagagtcaggatgctgtactaccttaaggctgaaattcttggcgaagccgcagaaaaagctttcgaaggctccccagctcgtgagttggacgtgccccttcctgacatcgattacatggagattcctgtcgactggtgggacgcggaggcagacaagtctttgcttatcggggtgtttaagcacggatatgagagatacaatgcgatgcgcgctgaccctgcactgtgtttcctggagaaggtaggtatgcccgatgagaagtccctctcagctgaacagggagtgacggacggtacctcagacattccagaaaggcaacatcgctag

SEQ ID NO: 295546 - DNA, 2477 bp, Artificial Sequence
  derived and/or modified sequence
ctgtttgtattttggctgctgcaggagccattttagcccatgtgtcagtctcatatgattggcttttgtaccagttctgtaaatgaagaaactgagacccagggagatcaaataagttgcccaaatcccacaacgcttgtgttcagaacccagatatcttcactcccaagtctacagttgtcaaatttaaaagttttgaatcactccccaatgtctgatgcctctgtcaattttgactacaaatctccatccccatttgactgcagcactgatcaagaagagaaaattgaagatgttgctagtcactgtctgcctcagaaggacctgtatactgctgaagaggaagctgctaccctttttcctaggaaaatgacatcccataatgggatggaggacagtggaggaggaggtactggagtgaagaagaaacggaagaaaaaggagccaggagaccaagagggtgcagcaaagggaagcaaggacagagagcccaagccaaagaggaaacgagaaccgaaagagccaaaggaacccagaaaggccaaggagccgaagaaggccaaggagcacaaggagccgaagcaaaaagatggggcaaagaaggcacggaagccccgggaggcctcgggcaccaaggaggccaaagagaagaggagctgcactgactctgcagccaggacgaagtccaggaaggccagcaaggagcaaggaccaaccccagtggagaaaaagaagaaaggaaaaaggaaaagtgaaactacagtggagagtttagagctggatcagggcctgacgaacccatctctgcggagtcctgaggagtccactgagtctacagacagccagaaacgacgctcgggaaggcaagtaaagcgcagaaaatacaatgaggacctggacttcaaagtggtggatgatgatggggaaacaattgctgttcttggagctggtcgaacatctgcactctcagcctctacactggcctggcaggcggaggagcctccagaagatgatgcaaacatcattgagaagatcctggcatctaagactgtccaggaggttcacccaggagaacctccgttcgacttggagctgttctacgttaagtatagaaatttgtacgtctatttaaagtattctctgtatttgggttttatatgaataaaactttttttctcttgtgactttattatcttctacatcttcagagtcttgcctctaaggcatgacccacaggtcttggctgactcaagtttaccttaggcagtaacgctcaattatagctgcacacagaattacctggagagcttttttaaacctctaaagcctttgctccacccaagaccattggctcagactcagtggggcccaaggattgttgtgtttttaaaaactccttgggcaattctcatatgcaaccagggtagagaaccactctcctgtagcatatgctcttttcccctcttgtatattttcctttctgctacagacccactttcactaatgtgtgttaatgataacctgcccacagctgccctgcctctgttctcagccagtttctctagaagctgcagagagatcagttgcttggaattactccgttttgttttgttttctgttgttgcccttaaggggaaggtctttctaagcccaatctccagcagtttcacaataaaccattttactatttctgtgttaggtggtcaccgtgtttattgaacaccttaaagctcgatcatttgctagttatgtgcttgcctgacaatttgtatgtctttggatagttcctacttacattgtaaatgggccacaatggaagagctcgaaaaggatcctcgcatcgcacagaagatcaagcgatttaggaataaacaagcccagatgaagcacatttttacggaggtgaagcaatatttactgactcatttgactgctgcttttcttgcagcagtaaatactgtgtttacgtttctaagtccaagttaaattcctatacagatctgttgctcaagtcaaattgataaatgtgtgctgatttgcaacaaaactagtctagattcaagtcaaagaaaactatccaccaaagttaaggatcaaaccttataaactgacaactcataacggcgtgcatcttggtctgaatactaataaatagctagagtgagaggaatacgcacacaattcttttgtccctgctccctcaacccactgcaacccaaaaaggacatttcagaaggtcctaaagtttgaatgtaaaaaacaaaacaaatctaaaagtgagagaaagtaaacaaataaataattttatttatgtaaacttgggaatttctaagtattgtacctatagcaagaggaaggactgatggattttaatattaaacaaatctataatgctatatatcagaaaatgccacaaaccttaaccttaatgtgttattcttggaataaagactaaaccctgtaatagagcctacaca

SEQ ID NO: 295547 - DNA, 536 bp, Artificial Sequence
  derived and/or modified sequence
gttcatgttgtggaggcgttgataccctcatgagaaattctgttacttccataaaagtcctgaagaaataaatatcttccttcaatagatgaaaatgaaaatacagaaaaaagagaagcagttgtcaaatttaaaagttttgaatcactccccaatgtctgatgcctctgtcaattttgactacaaatctccatccccatttgactgcagcactgatcaagaagagaaaattgaagatgttgctagtcactgtctgcctcagaaggacctgtatactgctgaagaggaagctgctaccctttttcctaggaaaatgacatcccataatgggatggaggacagtggaggaggaggtactggagtgaagaagaaacggaagaaaaaggagccaggagaccaagagggtgcagcaaagggaagcaaggacagagagcccaagccaaagaggaaacgagaaccgaaagagccaaaggaacccagaaaggccaaggagccgaagaaggccaaggagcacaaggagccgaagcaaaaagatg

SEQ ID NO: 295548 - DNA, 1635 bp, Artificial Sequence
  derived and/or modified sequence
tggcatctaagactgtccaggaggttcacccaggagaacctccgttcgacttggagctgttctacgttaagtatagaaatttttcctacttacattgtaaatgggccacaatggaagagctcgaaaaggatcctcgcatcgcacagaagatcaagcgatttaggaataaacaagcccagatgaagcacatttttacggagcctgatgaagacttgttcaatccagactatgtagaagttgatcgcatcttggaggtggcccacaccaaggatgcagaaacaggggaggaggtaacacattacctggtgaagtggtgctcactaccatatgaagaaagcacgtgggagctagaggaagatgtagatcctgcaaaagttaaagaatttgaatctcttcaagttctccctgaaattaagcatgtggagcggcctgcttcagactcctggcagaaacttgagaagtctcgcgagtataagaacagtaaccagctccgggagtaccagctggaagggatgaactggcttctttttaactggtataacagaaaaaactgtattttggctgatgagatgggcctagggaaaaccatccagtccatcacattcctttcagaaatatttctgagaggaatccacggcccttttctcattatcgcccctctctccaccatcactaactgggagcgggagttccggacatggacagagatgaatgccattgtgtaccacggcagccagatcagcaggcagatgatccagcagtatgaaatggtgtacagagacgcccagggaaaccccctttcaggagtcttcaagttccacgtcgtcatcacaacatttgaaatgatcctagcagactgcccagagttgaagaagattcactggggccggtggaaggacatcctgactcatggccgattcaagtggcatctgaacgagaaggacatggagatgatttgccgtgccctcctggtgtactgtgtcaagcattataagggggacgagaagatcaagagtttcatttgggaactgatcacacctaccaaagatgggcaagcccagaccctccagaaccactcaggcttatctgccccagtccccagagggaggaaggggaagaagacgaagaaccagttgctaatcccagagctaaaggatgcagattggctagccacctgcaaccccgaggtggtcttgcatgatgatggctataagaaacacctcaaacagcactgcaacaaagtacttttgcgagtccggatgctgtactacctaaaagctgaaatactgggagaagcagctgagaaagcatttgaaggatctcctgccagggagctggatgtacctctgcctgacatcgactacatggagatcccagtggactggtgggatgctgaagccgataagtcacttctcattggcgtgttcaagcatggttatgaaaggtacaatgccatgcgagcagacccagcactttgcttcctggagaaagttgggatgcccgatgagaagtccctttctgcagaacagggtgttacagatgggacctcagacattcctgaaaggcaacacagataaagaagacaatgctgaggacaaagtagatggcctccagaaacaaacggagagttccagt

SEQ ID NO: 295549 - DNA, 1122 bp, Artificial Sequence
  derived and/or modified sequence
atgtgccagagccacatgatcggcttctgcaccagcagcgtgaacgaggagaccgagacccagggcgaccagatcagctgccccaaccccaccaccctggtgttcagaacccagatcagcagcctgcccagcctgcagctgagcaacctgaaggtgctgaaccacagccccatgagcgacgccagcgtgaacttcgactacaagagccccagccccttcgactgcagcaccgaccaggaggagaagatcgaggacgtggccagccactgcctgccccagaaggacctgtacaccgccgaggaggaggccgccaccctgttccccagaaagatgaccagccacaacggcatggaggacagcggcggcggcggcaccggcgtgaagaagaagagaaagaagaaggagcccggcgaccaggagggcgccgccaagggcagcaaggacagagagcccaagcccaagagaaagagagagcccaaggagcccaaggagcccagaaaggccaaggagcccaagaaggccaaggagcacaaggagcccaagcagaaggacggcgccaagaaggccagaaagcccagagaggccagcggcaccaaggaggccaaggagaagagaagctgcaccgacagcgccgccagaaccaagagcagaaaggccagcaaggagcagggccccacccccgtggagaagaagaagaagggcaagagaaagagcgagaccaccgtggagagcctggagctggaccagggcctgaccaaccccagcctgagaagccccgaggagagcaccgagagcaccgacagccagaagagaagaagcggcagacaggtgaagagaagaaagtacaacgaggacctggacttcaaggtggtggacgacgacggcgagaccatcgccgtgctgggcgccggcagaaccagcgccctgagcgccagcaccctggcctggcaggccgaggagccccccgaggacgacgccaacatcatcgagaagatcctggccagcaagaccgtgcaggaggtgcaccccggcgagccccccttcgacctggagctgttctacgtgaagtacagaaacctgtacgtgtacctgaagtacagcctgtacctgggcttcatctag

SEQ ID NO: 295550 - DNA, 1578 bp, Artificial Sequence
  derived and/or modified sequence
tgagccagcaagaccgtgcaggaggtgcaccccggcgagccccccttcgacctggagctgttctacgtgaagtacagaaacttcagctacctgcactgcaagtgggccaccatggaggagctggagaaggaccccagaatcgcccagaagatcaagagattcagaaacaagcaggcccagatgaagcacatcttcaccgagcccgacgaggacctgttcaaccccgactacgtggaggtggacagaatcctggaggtggcccacaccaaggacgccgagaccggcgaggaggtgacccactacctggtgaagtggtgcagcctgccctacgaggagagcacctgggagctggaggaggacgtggaccccgccaaggtgaaggagttcgagagcctgcaggtgctgcccgagatcaagcacgtggagagacccgccagcgacagctggcagaagctggagaagagcagagagtacaagaacagcaaccagctgagagagtaccagctggagggcatgaactggctgctgttcaactggtacaacagaaagaactgcatcctggccgacgagatgggcctgggcaagaccatccagagcatcaccttcctgagcgagatcttcctgagaggcatccacggccccttcctgatcatcgcccccctgagcaccatcaccaactgggagagagagttcagaacctggaccgagatgaacgccatcgtgtaccacggcagccagatcagcagacagatgatccagcagtacgagatggtgtacagagacgcccagggcaaccccctgagcggcgtgttcaagttccacgtggtgatcaccaccttcgagatgatcctggccgactgccccgagctgaagaagatccactggggcagatggaaggacatcctgacccacggcagattcaagtggcacctgaacgagaaggacatggagatgatctgcagagccctgctggtgtactgcgtgaagcactacaagggcgacgagaagatcaagagcttcatctgggagctgatcacccccaccaaggacggccaggcccagaccctgcagaaccacagcggcctgagcgcccccgtgcccagaggcagaaagggcaagaagaccaagaaccagctgctgatccccgagctgaaggacgccgactggctggccacctgcaaccccgaggtggtgctgcacgacgacggctacaagaagcacctgaagcagcactgcaacaaggtgctgctgagagtgagaatgctgtactacctgaaggccgagatcctgggcgaggccgccgagaaggccttcgagggcagccccgccagagagctggacgtgcccctgcccgacatcgactacatggagatccccgtggactggtgggacgccgaggccgacaagagcctgctgatcggcgtgttcaagcacggctacgagagatacaacgccatgagagccgaccccgccctgtgcttcctggagaaggtgggcatgcccgacgagaagagcctgagcgccgagcagggcgtgaccgacggcaccagcgacatccccgagagacagcacagatag

SEQ ID NO: 295551 - protein, 178 aa, Artificial Sequence
  derived and/or modified sequence
MSDGNPELLSTSQTYNGQSENNEDYEIPPITPPNLPEPSLLHLGDHEASYHSLCHGLTPNGLLPAYSYQAMDLPAIMVSNMLAQDSHLLSGQLPTIQEMVHSEVAAYDSGRPGPLLGRPAMLASHMSALSQSQLISQMGIRSSIAHSSPSPPGSKSATPSPSSSTQEEESEVHFKISG

SEQ ID NO: 295552 - protein, 604 aa, Artificial Sequence
  derived and/or modified sequence
MAKESGISLKEIQVLARQWKVGPEKRVPAMPGSPVEVKIQSRSSPPTMPPLPPINPGGPRPVSFTPTALSNGINHSPPTLNGAPSPPQRFSNGPASSTSSALTNQQLPATCGARQLSKLKRFLTTLQQFGNDISPEIGEKVRTLVLALVNSTVTIEEFHCKLQEATNFPLRPFVIPFLKANLPLLQRELLHCARAAKQTPSQYLAQHEHLLLNTSIASPADSSELLMEVHGNGKRPSPERREENSFDRDTIAPEPPAKRVCTISPAPRHSPALTVPLMNPGGQFHPTPPPLQHYTLEDIATSHLYREPNKMLEHREVRDRHHSLGLNGGYQDELVDHRLTEREWADEWKHLDHALNCIMEMVEKTRRSMAVLRRCQESDREELNYWKRRYNENTELRKTGTELVSRQHSPGSADSLSNDSQREFNSRPGTGYVPVEFWKKTEEAVNKVKIQAMSEVQKAVAEAEQKAFEVIATERARMEQTIADVKRQAAEDAFLVINEQEESTENCWNCGRKASETCSGCNIARYCGSFCQHKDWERHHRLCGQNLHGQSPHGQGRPLLPVGRGSSARSADCSVPSPALDKTSATTSRSSTPASVTAIDTNGL

SEQ ID NO: 295553 - protein, 263 aa, Artificial Sequence
  derived and/or modified sequence
MPGSPVEVKIQSRSSPPTMPPLPPINPGGPRPVSFTPTALSNGINHSPPTLNGAPSPPQRFSNGPASSTSSALTNQQLPATCGARQLSKLKRFLTTLQQFGNDISPEIGEKVRTLVLALVNSTVTIEEFHCKLQEATNFPLRPFVIPFLKANLPLLQRELLHCARAAKQTPSQYLAQHEHLLLNTSIASPADSSELLMEVHGNGKRPSPESCIIHLKSMGVASRHEYFSGTLQMPAHPVRNSTLENLWVDCSRSLRSTVLPFP

SEQ ID NO: 295554 - protein, 575 aa, Artificial Sequence
  derived and/or modified sequence
MPGSPVEVKIQSRSSPPTMPPLPPINPGGPRPVSFTPTALSNGINHSPPTLNGAPSPPQRFSNGPASSTSSALTNQQLPATCGARQLSKLKRFLTTLQQFGNDISPEIGEKVRTLVLALVNSTVTIEEFHCKLQEATNFPLRPFVIPFLKANLPLLQRELLHCARAAKQTPSQYLAQHEHLLLNTSIASPADSSELLMEVHGNGKRPSPERREENSFDRDTIAPEPPAKRVCTISPAPRHSPALTVPLMNPGGQFHPTPPPLQHYTLEDIATSHLYREPNKMLEHREVRDRHHSLGLNGGYQDELVDHRLTEREWADEWKHLDHALNCIMEMVEKTRRSMAVLRRCQESDREELNYWKRRYNENTELRKTGTELVSRQHSPGSADSLSNDSQREFNSRPGTGYVPVEFWKKTEEAVNKVKIQAMSEVQKAVAEAEQKAFEVIATERARMEQTIADVKRQAAEDAFLVINEQEESTENCWNCGRKASETCSGCNIARYCGSFCQHKDWERHHRLCGQNLHGQSPHGQGRPLLPVGRGSSARSADCSVPSPALDKTSATTSRSSTPASVTAIDTNGL

SEQ ID NO: 295555 - protein, 80 aa, Artificial Sequence
  derived and/or modified sequence
MAKESGISLKEIQVLARQWKVGPEKRVPAMPGSPVEVKIQSRSSPPTMPPLPPINPGGPRPVSFTPTALSNGINHSPPTL

SEQ ID NO: 295556 - protein, 152 aa, Artificial Sequence
  derived and/or modified sequence
MSEVQKAVAEAEQKAFEVIATERARMEQTIADVKRQAAEDAFLVINEQEESTENCWNCGRKASETCSGCNIARYCGSFCQHKDWERHHRLCGQNLHGQSPHGQGRPLLPVGRGSSARSADCSVPSPALDKTSATTSRSSTPASVTAIDTNGL

SEQ ID NO: 295557 - DNA, 7737 bp, Artificial Sequence
  derived and/or modified sequence
ggagggagaaaaagagagagactgactgtatctggggattctggcaaggtgaagagctggtctgtttggcaggaccttcccatctgggatccatctgtgtttccctggaatgggacaggcagctctagtcagtgagaaatcgcagatgtgagagagctgacacatgtccagctaatgaaaggaggaggaaggctggtctccgattgagctttgaagattaggaggagaaaaagaggagctttggaatatctatttcaaataaatttggtgtatttaagaatctggattgtttataatttgggcatttgggaggtggggttttgccatgttgcccaggtgggtctcaaactcctgggctaaagcgatcttcccatgttggctgcccaaagtgctgggattacaggcaagagccaccataccagttcctgtctagatattatgatgaagattgaggatggtagtttttgtggagcacaatcctgactgtacctgtgatgttgcattcatcttttggaacataagcagatcaccaggtgaatggctaaagaatctggaataagcttgaaagaaatacaggtcctggcaaggcaatggaaagttggtcctgagaaaagggtgccagcgatgcctggatcgcctgtggaagtgaagatacagtccagatcctcacctcccaccatgccacccctcccaccaataaatcctggaggaccgaggccagtgtccttcactcctactgcattaagcaatggcatcaaccattctcctcctaccctgaatggtgccccatcaccgccacagagattcagcaatggtcctgcctcctccacatcatctgcactcacaaatcagcaattgccagccacttgtggtgctcgacaactcagcaagttgaaacgctttcttaccactctgcaacagtttggcaatgacatctcccctgagattggggagaaggtgcggactcttgttcttgcactggtgaactcaacagtgacaattgaggaattccactgtaagctccaagaagccacaaactttccccttcgtccttttgtgattccatttctcaaggccaacctgcccctgctgcagcgggaactgctgcactgcgctcgggcggccaagcagaccccatcccagtacctggctcagcacgaacaccttctgctcaacacaagcattgcatcgcctgctgactcgtcagagttgctcatggaggtgcacggaaatgggaagaggcccagtccagagaggagagaagagaatagttttgatagagacacaattgctcctgagcctcctgccaagagagtatgtaccatcagccctgctcctcggcacagtcctgctctcactgtgcccctcatgaatcccgggggccaattccatcctacccctccacctcttcagcattacaccttagaggatattgcaacttctcacctgtatcgggaacccaacaagatgctagagcatcgagaagttcgtgatagacaccacagtcttggtctaaatggaggctatcaagatgagttggtagatcatcgtttgacagaaagggaatgggctgatgaatggaaacatcttgaccatgcgctgaattgcattatggaaatggtagagaaaacaaggcgctctatggcagttctgcggcgctgtcaggaatcagatcgtgaagaactcaactactggaaaagacggtacaatgaaaacacagagctgaggaaaacggggaccgagttggtctccaggcagcacagccctgggagtgcagattctctcagcaatgattctcagagagagttcaacagcaggccaggtacaggatacgtacctgtggagttttggaaaaaaacagaagaagctgtgaataaggtgaaaattcaggccatgtcagaagtacagaaggccgtcgctgaggcagagcagaaagcctttgaagtgattgcaacagagagagcacgaatggagcaaaccatagcggatgtcaagcggcaggccgcagaggatgctttcctcgtcatcaatgagcaagaggagtccacggagaactgctggaactgtggccgcaaagccagcgagacatgcagtggctgcaatatcgcgcgatactgtggctctttctgccagcacaaggactgggagcggcaccaccgcctctgtggtcagaacctgcatggccagagcccccacggccagggccggccgctgcttcctgtaggcaggggctcctctgccaggtccgccgactgcagcgtgcccagcccagccctcgacaagacctcggcaaccacatcgcgttcctcaacacctgcttctgtgacagctatcgacaccaacggactctgagccccggactctgcttaccctgatggctgctcagcaccacagagtgcttgggctgagggactgactgttggaacccgtgcatgtagctgccgggtcatcagcaagaaatgaattggaggcaggaagagtccaagcctgaataataacaccccacagcctctctgtgcacttgctgtctgcggagccagtgtgccattctctgcacatgggcagccagcctgagctgcctcctccatggctttcctggtttgttcctctctccactgaagctgacttagccggccccttttcagtgtagaccaccagctcccctccccatctccttgagtcagcagactgtccaatgtgctcagccaggctggaggcggcaggcggcaggcagcaggctgtggaggaggcccctcggtcagggagcggcctgcctcacccctgaatagctccttcggccccatctccatcctcagcagatgacactgattggcctcacggggacttgggtaagcaacaggcggcattcaggactcttctcaaccctgctgttcagacttgataagatctcagagtccacaggaaagaagtcactgttgcaataaaagcacccgtagtagcaaaaacataaaacaaataaaacttcccccacatcacagatgattttggacaagattttccaaccttgctggctactttagtttgggacctgttttttttctcatttgattttgcttgtgcagaaaatagtttccagcacatggattgatctgagagagaatgaggctcagttgtggatagtctgttttctctgagcatgttggccaactagtatcgtcaaattattgagtggatcatctcttggaaatgcagaacttctgccaccacttggctatttgcacagtcatcttgttctgtgtccttttatctctcagaccacacacatctggaacgctgtgggcatcttctgcccatgggctccatttggcacctgctgagccacagttgtcctgctggatgtgctgtgcaggttggtaggacttgcccccactgtcaaggcctggtctcatctgaaaagccctcctggacctcaaagaattcttcagacctcatagttacaggtcattatatctactatgttgatttatcatcaggcacacaacttctgtttccttctcttgtgttatctgatagcgtccctccttgagctcatcagaaaggttttatgaaatgtgaaccattttgggaaaagctgatcaatttttcttcctagcttcccattttcaaatgggacatcactcatatccctttcagaatgttaggaactgcctcccacattcttccctgtctttttgggttttgttttttgttgttgtggtggttttttaacacaaagtctcactctgttgcccaggctggagtgcagtggcatgatcttggctcactgcaacctctgccttccaggttcaagcaattctcctgcctcagcctcccgagtagctgagattacaggcgcccaccaccacgcccagctaatttttgtatttttagtagagacagggtttcaccatgttggccaggctgatctcgaactcctgacctcaggtgacctgccttggcctcccaaagtgcagggattacaagcgtgagccaccatgcccggcctgtctttttggttttgatgggagtctgaggaccccgacccctcctgctctccatctttgagcctctggcatcctctcacacccagaaatcagttggagtaagtttaattggccctgctccagctggcctttgaagcacaagtttaaatctccaccttctgtgcactgaccagagtctaaaataaaagttgtcagtaccataaaggaaaagggatccacacaggtagccttctccttggatacaggtacatcttactgtaagaatttcaagtcctggctgggcgcagtggctcactcctgtaatcccagcactttgagagaccgaggcaggcagatcacttgaggtcaggaattcaagaccaacctggccaacatggtgaaaccctgtctctaataaaaaaaaaatagaaaaatcagccgggtgtggtggcacacacctgtaatcctagctactcaggaggctgaggcaagagaatctcttgaacctgtgagccagaggttgcagtgagccgagattccaccactgcactccagcctgggcaacagagcaaaactctgtctcaaaaaaaaaaaaaaaaaggcaaaattaaagaatttcaagtccctaatttactctaaccaagcattttcagtcttacaaagaaatctagtgcacgacacctttaaaatgcctagatttccattgcctaaagtaaggtgtgaccagtgaaacaacagcagagaatcatgttcctttgctgtggaacacataagccccacagttttccagtcagcctaatacatgggtatcccccgaccccatctgcctccttaagccacagtccttggtggggaactctaagggggacggagtcagtaccccggacagggccacatttgcatgagacatggctgtctcacaggtcacagagccattacaacagcttactagtttttcatggatttgttggattaacaccttaagcaggttttttattgttattttgtttgtttgtttgttttgagacgggagtttctctcttgtctcccaggctggagtgcaatcgcgcaatctcggctcacggtaacctctgcctcccaggttcaagcgagtctcctgcctcagccttctgagtagctgggattacaggcatgcgccaccacgcccaactaattttgtatttttagtagagacggggtttctccttgttggtcaggctggtctcaaaccccggacctcaggtgatccccccaccttggcctcccaaagtgccaggattacaggcatgagccactgtgtccggtcttgagcaggtttttaaaatctccagtggccataaaactagccagggtagctcatgcttttactggttggaataaggagccaaaaccaacaaaataatatttattagggctcgatgcccatttctgtggctaaggcttaggtttggtgtgcagagcctggcctgctcttgtgggctgtggttgctgtgacagtttcgttttctgaatctttgtaatgctcttccaccctgctcgtgctgcccagaggctgatctgcaaacctgggcagtattccacactgaagctcagtttgcaaaccttctgctgtgttaattctggtcagtttcacacagaagtcacgagggcctctgcccaggaccttctattcacatttcaagaatccctttctgaaattctccaactctctggtcaggaggaggagcaccattggggcggggtaggcagctagaggcgcaggagcgaatccaggttccttgcgtggttcccagcctctgctgacagcacctcagctaccaggtggggagtggaaattcagcctgcttagaggactgacctctacagttcatatttgcagtgacataaaaggcaaagaggagctggcatggtggtacagaaggtatcagtcaagcgcaggctcttcagaaacctagaaactaaaaagagatgcaacatgtgactggccatcagccagacatgtctagggtgagaccagtgctcagcaccacccgccaaggaacactgatgagttgtgggacattatggtcggccaagtgaggaatgattgcagggaccagagaagaccaaagatgccagatgtccccagagtttcttgagggctgggtttcacgtctttgcttgtcctttttgtccccacttgcctgcaccgtgcctgactcatccagtggggaaggtgactcaagaagttgtttaagcctaggcctaggcagtccacttcgggaggtgggggcactccacactggggggccctgcagctccagggctggtgctctagcagatccgctcaggcacggttgggtgaccgtggggtcaccgattgcgtagattatttctagggcagtgctgggttagaaatgtctgtctggaaacaggacacatcttgccaccacaagtccacacctggccttggctgctgcccgctctctgcagcgtggatttcctttgcccatttgggccagaaggtcaccaggagttcatcactgcttagtgtcaacttgacatcttcagcttccagacagaaaacccatgctttactttgtacagccctgtcccagagttagtaagcctcggcttgtcacctgcttgcaaagggtatagacatcattctgggtagttctagaggatatcgcaacaagtgcgtttgaaggttcagcacagctggaattgtacggtagtgagctcttcaaaatgaaaacagaatgaccggatggccatctgtcctggaaactgtagaattgaataaatcactgaaaatagaacacttcttggaggctttcttcagaactgaactagaaacaaggtttccaggctcccaggtcagtagaccaaaccaacttccttagatttttttttttaagctgtttgcagaaaactgggtggtagcgtgtctgaaccaaacggaagaatagccagcggagcatggactgttccagcacgggccagatggccagctgtcgagagcagccctgcccagattgcggtgggggctgtgccagcggctccgcagggcccttccaactctggagtgtctgtagttcttgtgaaaccaaaacgttgactacctgcctctttcctcgggcatcgacgtgctcatttccaaagatgatggtgcaggtgaccttttccatcgtgagctaagagaaggttaggaggcctgaggggcgggccttgtgtcccctcctccccctccacagcccctgaggtggagcttccctcacagaccccatctggtcgagcctacggctgcccagtgtacactcagtgatgcttataccaaatagggcatgtgcgctggtgtctgttggggacagccccatccctaccttggagtcggcagagaagcagcaataagcattaggcgaatgattgaaagggctgctgcgccaagaggccttcagtccccttaacgtggctttccaacttcctgacgaggctacaaaggctccgctcacaaaagaaagccaataatgtaaataaatagaaaacgaagcctccacgcgtggtttttaaagggggatgatgaatgtgacaccacccacagaatgcattagaatctggtttttctgtgctttgtcattttactctgataggaatttttgttacctaactctgtgcataacttatttaatgtactgtataaatgaaccaaaactgttaaatatgtatttagtttgttctacttaaagtagtcaataaaaaggctatattcctt

SEQ ID NO: 295558 - DNA, 1815 bp, Artificial Sequence
  derived and/or modified sequence
atggccaaggagtccgggatatccttaaaggagatccaagtcttagctcggcagtggaaggttgggccagaaaaacgagtgcctgctatgccaggtagccccgttgaggtcaagattcagtctagatccagtcccccaaccatgcctcctctgcctccaattaatccaggggggccccggcctgtgagttttactcccaccgcgctgtccaacggcattaaccactctccgcccaccctcaatggggcgccatccccccctcagaggttcagcaatggccccgcatcttccacgagtagtgcactcacaaaccaacagctgcccgcaacgtgcggagctcgccaactgagcaagttaaagcgctttctgactaccctgcaacaatttggtaatgatatctcccctgagattggggagaaagtgcgcactctggtgctcgctttggtgaatagcacggtgacaatcgaagagtttcactgcaagctgcaggaagctaccaacttcccactgaggccctttgtaattccatttttgaaggcgaaccttcccttgttacagcgggagctacttcactgcgctagggccgcgaaacagacgccttcacagtacctggcacaacatgaacacctgttactgaacacatcaattgcctctcccgccgactcctccgaattactgatggaagtccatggaaacggcaagcgtcccagtccagagcgaagagaggaaaattccttcgacagggataccattgccccagagcccccagccaagcgcgtatgtacaatatctccagcccccagacattctcctgccttgacagtacccttaatgaatccgggagggcagttccatccaactcctccaccattacagcactacacattggaggacattgccacttctcacctctatagggaaccaaacaagatgctcgaacaccgcgaggtgcgggaccgccaccattctctgggcctaaacggcggttatcaagacgaattggtggaccaccggctgaccgaaagggaatgggcagacgagtggaagcacttggaccatgcattgaactgcattatggaaatggttgagaagactcgacgaagcatggccgtgctgaggaggtgccaggagtctgaccgggaggagcttaactactggaaaagaaggtacaacgagaataccgagctgcgtaagacgggaactgagcttgtttcccggcaacacagtcccggttcagcagacagcctgtctaacgatagtcaaagggaattcaactcacgacccgggactggctacgttcctgtcgagttctggaagaagaccgaagaagcagtgaacaaggtaaaaattcaagccatgagcgaagtccagaaggcagtggccgaagccgagcaaaaagcgtttgaagtgattgcgaccgagcgggctaggatggagcaaaccatagcggatgttaagagacaggcggccgaagacgcgttcctcgtcattaacgagcaggaggaatcaactgagaattgttggaattgtgggcggaaggccagtgaaacttgtagcggatgcaacatcgctagatattgcggtagcttttgtcagcataaggattgggaacggcaccacagattatgcggacaaaaccttcacgggcaatctcctcatggccagggacgccccctacttcccgtggggcgcggctcatccgcaaggtctgctgattgcagcgtgccttcacctgccctcgataagacgtcagcaacaacgagccgatcaagcacgccggcttctgtgactgcgatcgacaccaatggcctgtag

SEQ ID NO: 295559 - DNA, 1815 bp, Artificial Sequence
  derived and/or modified sequence
atggccaaagagtctggaatttcactaaaagaaatccaggtccttgctcgtcagtggaaagtagggcctgagaaaagggtcccagccatgccggggagtcctgtcgaggtcaaaattcagtctcggtcatcccccccgacgatgcctccgctcccaccaataaatcctggaggcccaagacccgtgagtttcacacccaccgccttatctaatgggattaatcactctccacctaccttaaacggggcgccatcgcccccccagcggtttagcaatggccccgcgagttccacaagtagcgcactgactaatcaacagctgcccgcgacgtgtggcgcccggcaattgagtaagttaaagaggtttctgactactctgcagcagttcggcaacgacatttcccctgagattggcgaaaaagtgcgaaccctggttctggcactggtaaattccacggtcacgattgaggagtttcattgtaaactgcaagaagcaaccaacttccctctgagaccctttgtcattccattcctgaaggcaaatctcccattgttgcagagagaactgctccactgcgctagagcagcgaagcagaccccatctcagtatctagcccaacatgaacacctgttactcaacacctccatagcaagccctgcggactcctccgagctgctgatggaagtccacggcaacggtaaaaggccaagtcctgagaggagagaggagaacagctttgatagggatacgattgctcccgagcctcccgctaaaagagtttgtaccattagtccagcgcctcggcattccccagctcttacagtcccactgatgaacccaggaggccagttccatcctaccccacccccactgcagcattataccctggaagatatcgcaacttcgcatctatatcgggaaccgaacaagatgttggagcaccgcgaagtgagagaccgacaccatagcctgggtctcaacggtgggtaccaggacgagttagtcgatcaccgcctgacggagcgagaatgggccgacgaatggaagcatctggaccacgcgctgaactgcatcatggagatggtagaaaaaacccgccggtccatggccgtcttgaggagatgccaggaatccgaccgagaagaactgaattattggaagcggcggtacaatgagaacactgagttgcggaagaccgggacggagctggtatcaaggcaacactcacctggctccgcagatagcctttccaacgactctcagagggagttcaatagccggccggggacgggttacgtgcccgtggagttctggaaaaaaacagaagaagcagtgaataaagtcaagatccaggccatgtccgaggtccagaaggcagtcgccgaggctgagcaaaaggctttcgaggtgatcgcaacggaacgtgcccggatggagcagacaatagccgatgtaaagaggcaggctgcggaggatgctttcttggttattaacgagcaggaggaatctaccgaaaattgctggaattgcggacgtaaggccagcgaaacttgctcaggctgtaacatagctagatactgcggctctttctgtcagcacaaggactgggaacgccaccatcgcctctgcggtcaaaatctgcatggccaatctcctcacgggcaagggcggcccctcctaccagtcgggcggggctcctccgcccgttccgctgactgttcggtgccatctccagcacttgacaaaacgtctgcaacaacgtctagaagctctacccctgcatcggtgactgccattgacacaaatggtttgtag

SEQ ID NO: 295560 - DNA, 243 bp, Artificial Sequence
  derived and/or modified sequence
atggccaaagagtccggcatatcactcaaggagatacaggtcctggcaagacagtggaaggtcggccctgagaaaagggtgcccgcaatgccaggaagcccggtggaggttaagattcaatctcgatccagccctcctaccatgccaccgctgcctcccattaacccaggtggcccgcgacctgtcagcttcaccccgaccgccctcagcaacggtataaatcattcacctcctacactctag

SEQ ID NO: 295561 - DNA, 1815 bp, Artificial Sequence
  derived and/or modified sequence
atggccaaggagagcggcatcagcctgaaggagatccaggtgctggcccggcagtggaaggtgggccctgagaagagggtgcctgccatgcctggcagccctgtggaggtgaagatccagagccgcagcagcccccccaccatgccacccctgccccccatcaaccctgggggccccaggcctgtgtccttcacccccacagccctgagcaatggcatcaaccacagcccccccaccctgaatggagcccccagccccccccagcgcttcagcaatggacctgccagcagcaccagcagcgccctgaccaaccagcagctgcctgccacctgtggggcccggcagctgagcaagctgaagcgcttcctgaccaccctgcagcagtttggaaatgacatcagccctgagattggagagaaggtgaggaccctggtgctggccctggtgaacagcacagtgaccatcgaggagttccactgcaagctgcaggaggccaccaacttccccctgcggccctttgtgatccccttcctgaaggccaacctgcccctgctgcagcgggagctgctgcactgtgcccgggccgccaagcagacccccagccagtacctggcccagcacgagcacctgctgctgaacaccagcatcgccagccctgctgacagcagcgagctgctgatggaggtgcacggcaatggcaagaggcccagccctgagcggcgggaggagaacagctttgaccgggacaccatcgcccctgagcccccagccaagagggtgtgcaccatcagccctgcccccaggcacagccctgccctgactgtgcccctgatgaaccctgggggccagttccaccccaccccaccacccctgcagcactacaccctggaggacatcgccaccagccacctgtaccgggagcccaacaagatgctggagcaccgggaggtgcgggacagacaccacagcctgggcctgaatggaggctaccaggatgagctggtggaccaccggctgacagagcgggagtgggcagatgagtggaagcacctggaccacgccctgaactgcatcatggagatggtggagaagacccggcgctccatggctgtgctgcggcgctgccaggagagtgaccgggaggagctgaactactggaagaggcgctacaatgaaaatacagagctgaggaagacaggaacagagctggtgtcccggcagcacagccctggcagcgctgacagcctgagcaatgacagccagcgggagttcaacagccggcccggcaccggctacgtgcctgtggagttctggaagaagacagaggaggccgtgaacaaggtgaagatccaggccatgtctgaggtgcagaaggctgtggccgaggccgagcagaaggcctttgaggtgattgccacagagcgggccaggatggagcagaccatcgcagatgtgaagaggcaggccgcagaagatgccttcctggtgatcaatgagcaggaggagagcacagagaactgctggaactgtggcaggaaggccagcgagacctgcagcggctgcaacatcgcccgctactgcggcagcttctgccagcacaaggactgggagcggcaccaccggctgtgtggccagaacctgcacggccagagcccccacggccagggccggcccctgctgcctgtgggccggggcagcagcgcccggtctgctgactgcagcgtgcccagccctgccctggacaagaccagcgccaccaccagccgcagcagcaccccagcctctgtgacagccatcgacaccaacggcctgtag

SEQ ID NO: 295562 - DNA, 243 bp, Artificial Sequence
  derived and/or modified sequence
atggccaaggagagcggcatcagcctgaaggagatccaggtgctggcccggcagtggaaggtgggccctgagaagagggtgcctgccatgcctggcagccctgtggaggtgaagatccagagccgcagcagcccccccaccatgccacccctgccccccatcaaccctgggggccccaggcctgtgtccttcacccccacagccctgagcaatggcatcaaccacagcccccccaccctgtag

SEQ ID NO: 295563 - DNA, 1815 bp, Artificial Sequence
  derived and/or modified sequence
atggccaaggagagcggcatcagcctgaaggagatccaggtgctggctcgacaatggaaagttggaccggagaagcgcgttccagcgatgcccggttcacccgtggaagtgaagatacagagtcgcagttctccacctacaatgccgccacttccccctatcaatcctggtggaccccggcctgttagtttcactcctacagccctgtcaaatggaattaatcatagccctccgaccctgaacggagccccaagcccaccacaaagatttagcaacgggccggcctctagcaccagtagcgctttaaccaatcagcagcttcccgctacctgcggcgcacgacagttgtcgaaactaaaaaggttcttgacaacgcttcagcaattcggaaacgacattagccccgaaattggcgaaaaagttagaacacttgtgctagcattagtgaactcaaccgttactatcgaagagttccattgtaaactgcaagaggccaccaactttccattgcgtcccttcgtgatcccattccttaaagcaaatttgccactgttgcaacgggaacttcttcattgcgccagggccgctaaacagacccccagccagtacctcgcccagcacgaacatctgcttctcaacactagtattgccagtccagccgactccagtgagctcctgatggaagtgcacggcaatgggaagcggcccagccctgagagaagggaagaaaattccttcgaccgggatactatcgcaccagagccacctgccaagagagtctgcacaatcagcccagcccccaggcactctcctgctttaaccgtccccctgatgaatcctggagggcagtttcaccctactcccccacccctccagcactacaccctggaggatatagcgacctcacacctataccgggagccaaataagatgctggagcatcgagaggttcgagatcgccaccatagtctcggcttaaacggcggctaccaagatgaactggtggaccacagattgacagagagggaatgggcagacgagtggaaacatctcgaccatgcgctgaactgtattatggagatggttgaaaagactcgccgttctatggccgtgctgcgaaggtgccaggaatccgacagagaagaactcaactactggaaaaggcggtacaatgagaatacagaactgcggaagaccggaactgaactagtatctcgccagcatagtcccggctccgcggattccctgagcaatgattcgcagcgcgagtttaatagccggcctggcacaggatacgttcctgtggagttctggaagaagaccgaagaggccgttaacaaagttaaaatacaggcaatgtccgaggtccaaaaggcagttgccgaggctgagcagaaggccttcgaggtgattgcaacagagcgcgcccggatggagcagaccatcgctgacgtgaagaggcaagctgccgaggacgccttcctggtgattaatgaacaggaggagtcaacagagaattgttggaattgcgggagaaaagctagtgaaacttgttcgggatgtaatatagcaaggtattgcggcagtttctgtcagcacaaggactgggaaagacaccatagactctgtggccagaatttgcatggtcagtctccccatggacaaggaaggccactcctgccagtgggccgggggagtagtgcgcgatccgcagactgctcagtcccgagccccgctctggataagacctccgctacgactagtagaagctcaacgccagcctccgttacagcaatcgacaccaacggcctctag

SEQ ID NO: 295564 - DNA, 1815 bp, Artificial Sequence
  derived and/or modified sequence
atggccaaggagagcggcatcagcctgaaggagatccaggtgctggcacggcaatggaaagtgggcccagaaaagcgggttcccgctatgcccgggtcccctgtagaggtcaagatccagtctcgatcctcccccccgactatgccccccctgcccccaatcaatcccgggggaccccggccggttagcttcacacccacggcactcagcaatgggattaaccactcacctcctacactaaacggagcgccctctcctccccagagattctctaacggacctgcaagctccacatcttcagccctgactaaccagcagcttcctgcaacatgcggcgcacgtcagctgagcaagctgaagaggttcctcactactctccaacagtttggtaacgatatctcacccgagatcggcgaaaaggtgcgcacgttggtactggctctggtcaatagtaccgtgaccatcgaggaatttcattgcaagttacaggaagcaacaaattttcccttgcgccccttcgtgatacccttcctcaaggctaacctgcctttattacagcgcgaactcctgcattgtgcgcgagccgctaagcagacaccaagccagtacctcgctcagcacgagcatctgctactcaatacctccattgcatctcccgccgattcctcagaactgctgatggaagtgcatggcaacggaaaaaggccgtcaccagagagacgggaagagaatagtttcgatcgggacactattgcaccagagccccccgccaaacgggtgtgtacaatcagccctgccccccgtcacagtcctgcactgacagtcccacttatgaatccagggggacagttccaccccacgcctcccccactccagcattatacactagaggatatcgccacgtctcacctgtacagggaacctaataagatgctcgaacatcgcgaggtgagagacaggcatcattcccttgggttgaatggcggctatcaggatgaactggtggatcaccgactgaccgaacgcgaatgggcagatgagtggaagcatctggaccatgcgctaaattgtattatggaaatggtggaaaaaacacggcggtctatggccgtcctccgtcggtgtcaggagtctgatcgcgaggaactgaactactggaagcgacgctacaatgaaaacactgagcttcggaaaaccggcacggaactggtgtcacggcagcattcgcccggaagtgctgacagcctgtcgaatgattcacagcgtgaatttaactctagaccaggcactggatacgtccctgttgaattttggaagaagaccgaggaagcagtgaataaggttaaaatacaggccatgtctgaggtccagaaggccgtggcagaagccgagcagaaggcttttgaggtaattgccaccgagagggccaggatggagcaaacaatcgcagatgtgaaacgtcaagccgccgaggacgcctttctggtgattaatgagcaggaggagagcaccgaaaattgttggaactgcgggaggaaagcaagtgagacatgttcaggatgcaacattgcccgctattgcgggtcgttctgccagcacaaagactgggagcgacaccaccggctgtgcggccagaatctgcacgggcagagcccgcatgggcagggtcggccccttcttccagttgggcgcggcagttccgccagaagtgcagattgttctgtgccctctcccgctctggataaaacgtccgccaccacatcaagatcatcaacaccggcaagcgttaccgcaatagacaccaacgggctgtag

SEQ ID NO: 295565 - DNA, 243 bp, Artificial Sequence
  derived and/or modified sequence
atggccaaggagagcggcatcagcctgaaggagatccaggtgctggcccgccagtggaaggtgggccctgaaaagcgcgtccccgcaatgccgggatcaccagtcgaggtcaaaattcagtcccgctcctctccgcctacaatgccaccactcccccctataaacccaggcggcccacgacccgtgtccttcacgccaaccgccctgtctaatggtattaatcacagccctccgaccctctag

SEQ ID NO: 295566 - DNA, 1815 bp, Artificial Sequence
  derived and/or modified sequence
atggccaaggagtcagggatctccctgaaagaaatccaagttctggcccgacaatggaaagtgggaccagaaaagagagttcctgctatgcctggttcacctgtggaagtaaaaatccagtcgagaagtagcccgccaacgatgcccccattgcctcccattaaccctgggggacctagaccggtctccttcaccccgacggcgctctctaacggcataaatcactctccacccactctgaacggagcaccatcaccgcctcagagattttctaacggccctgcatcttcaactagtagcgctctgacgaaccaacaattaccagctacatgcggcgctcggcagctcagtaaattaaaacgctttctgaccactctgcagcaattcggcaatgatatcagcccagaaataggcgagaaagtccgaaccctggtgcttgccttggtgaactccaccgtgaccatcgaagagtttcactgcaagctgcaggaggcaactaacttcccactccggcctttcgtgatccccttcttgaaagcaaatctccccctgcttcagagggaactgctacactgcgctagagccgctaagcagacgccaagccaatatctcgcgcagcatgaacatcttttgctgaatacttcaattgcttcacctgcagactcaagcgagttgctcatggaagtgcacgggaacggaaaaagaccgagcccagagcgcagggaggagaattcttttgacagagataccattgctccagagcctccggcaaagcgtgtctgtacaatatccccagcgccaagacatagtcctgcgttgactgtcccactgatgaaccctggcggacagttccacccaacacctccgccactgcagcattataccttggaggatattgctacatcacatttataccgcgagcctaataagatgcttgagcacagggaagttcgagacagacaccatagtctggggctgaacgggggatatcaggacgaactggtggatcaccggctgaccgagcgagagtgggccgacgagtggaagcacctcgatcacgcgctgaactgcatcatggaaatggtggagaagacgcgcagaagtatggctgtgctgaggcgttgccaggaatccgacagggaggaactgaactactggaagcgtcggtacaatgagaatactgaactgcgaaagaccggcacggagcttgtctctcggcaacatagccctggttcagccgacagccttagcaatgactctcagcgagagtttaattcacggccaggtaccggctatgtgcctgtagagttttggaagaaaactgaggaggccgtaaataaggtgaagatccaagctatgtctgaggtccagaaagccgtcgctgaagctgaacaaaaggcattcgaagtcatcgccaccgagcgcgcacgcatggaacagaccattgccgacgtgaagagacaggcggctgaggacgcatttcttgtgatcaacgaacaggaagagtcaaccgaaaactgctggaactgcgggaggaaagcctcagagacgtgttccgggtgtaatatcgcgaggtactgcggcagtttctgccagcacaaggattgggagagacaccaccggctctgtgggcaaaacctgcatgggcagtcacctcatggtcagggcagaccactcctgccagtggggagggggagcagtgccaggagtgctgactgcagcgtgccttctccagcccttgataaaacatccgcaaccacaagcaggtctagcacacccgctagcgtcactgctatagacactaacggtttgtag

SEQ ID NO: 295567 - DNA, 1815 bp, Artificial Sequence
  derived and/or modified sequence
atggcaaaggagagtgggatttccctcaaggagatccaggtgcttgctagacagtggaaagttggcccagagaagagagtgccggcaatgccaggcagcccagtggaggtaaaaatccagagccgtagtagtcctcccacaatgcctccgcttcctccaattaaccccggtggcccacggccagtgagtttcactcctaccgcactgagcaatgggattaaccattctcctccaaccctcaacggggcaccatcaccacctcaacgcttttctaacggtccagccagttccacttcctcggcattgactaatcagcagctcccagccacgtgtggggctcgacagttgtcaaagttaaaaaggttcctgacaacattgcagcagtttggcaatgacatctctccggaaattggtgagaaggttcggactttggtgctggctctcgtgaacagtaccgtgacaatcgaagagtttcactgcaaactgcaggaggcaacgaacttccctttacgaccttttgtgatcccttttctgaaggctaatctgccccttctacagagagagctgctacattgcgctagggctgccaaacagacaccctctcagtacctcgcacagcacgagcatctcctcttgaacactagcatagcgagtcctgcggactcatctgagcttctgatggaggttcacgggaatggtaaacggccatcacctgagcggagggaggagaatagcttcgatcgggacacaattgccccagagcctcccgctaagcgtgtgtgtaccatctcaccagcccctagacattcgcctgcactgactgtgcctctcatgaatccaggaggacagttccacccgacacccccaccgttgcaacactatacattagaggacattgcaacaagccacctatacagagagcccaataaaatgctagaacatcgcgaggttcgcgatcggcaccactcgctgggcctgaatggcggatatcaggatgaactggtagatcacaggttgaccgagagagagtgggctgacgagtggaagcatctggaccatgccctaaattgtattatggaaatggttgagaaaactcggaggagtatggctgtgctaagacgctgccaggagagtgatagggaagaactcaactactggaaacgcaggtataacgagaacactgagctgaggaagacaggaaccgagctcgtgtcgcggcaacactccccgggttcggctgactccctgagcaatgatagccagcgtgagttcaattctaggcctgggaccggctacgtgcccgtggagttctggaaaaagaccgaggaagcggtgaacaaggttaagattcaggctatgtccgaagtgcaaaaagcagttgcagaagcagaacagaaggcatttgaagttatagccacagagcgagctagaatggaacaaacaattgctgacgtgaaacggcaagccgcagaagatgctttcttggtcatcaatgagcaggaagaatccacagagaattgctggaattgcggacgtaaagctagtgagacatgctctggatgtaacatagctcggtattgtgggtccttttgccaacataaagactgggaacggcatcaccgcctgtgtggccagaatctccacggccagtccccacacggccaaggaaggccgctcctgccagtggggcgaggctcgtccgccagatcagccgattgttcggttccatcacctgctctggataaaacctcagccaccacatcaaggagcagcacccccgcttctgtcacagcgatcgataccaacggcctctag

SEQ ID NO: 295568 - DNA, 243 bp, Artificial Sequence
  derived and/or modified sequence
atggctaaagaaagtgggatctcgctgaaggagatccaggtgctggctaggcagtggaaggtgggaccggaaaaaagggtcccagctatgccaggatcccctgttgaagttaagatccagagcaggagtagcccacccaccatgccaccactgccccctatcaatcctggcggacctcggcctgtgtcgttcacacctaccgccctgtctaacgggatcaatcacagccctcctactctgtag

SEQ ID NO: 295569 - DNA, 7617 bp, Artificial Sequence
  derived and/or modified sequence
agcagcggtggtggtgtctggttagctcggcggctgcagatctcgcggcgacgcctgcgagggacccgggccgcgggtcgaggcgggcggcgcctgcgagggacccgtgtcgcgggtagaggcgggcggcgcgcggcggcggcgctcggcgatggtaggcgtccctggagcggccgccttccagcaggtggggttttgccatgttgcccaggtgggtctcaaactcctgggctaaagcgatcttcccatgttggctgcccaaagtgctgggattacaggcaagagccaccataccagttcctgtctagatattatgatgaagattgaggatggtagtttttgtggagcacaatcctgactgtacctgtgatgttgcattcatcttttggaacataagcagatcaccaggtgaatggctaaagaatctggaataagcttgaaagaaatacaggtcctggcaaggcaatggaaagttggtcctgagaaaagggtgccagcgatgcctggatcgcctgtggaagtgaagatacagtccagatcctcacctcccaccatgccacccctcccaccaataaatcctggaggaccgaggccagtgtccttcactcctactgcattaagcaatggcatcaaccattctcctcctaccctgaatggtgccccatcaccgccacagagattcagcaatggtcctgcctcctccacatcatctgcactcacaaatcagcaattgccagccacttgtggtgctcgacaactcagcaagttgaaacgctttcttaccactctgcaacagtttggcaatgacatctcccctgagattggggagaaggtgcggactcttgttcttgcactggtgaactcaacagtgacaattgaggaattccactgtaagctccaagaagccacaaactttccccttcgtccttttgtgattccatttctcaaggccaacctgcccctgctgcagcgggaactgctgcactgcgctcgggcggccaagcagaccccatcccagtacctggctcagcacgaacaccttctgctcaacacaagcattgcatcgcctgctgactcgtcagagttgctcatggaggtgcacggaaatgggaagaggcccagtccagagaggagagaagagaatagttttgatagagacacaattgctcctgagcctcctgccaagagagtatgtaccatcagccctgctcctcggcacagtcctgctctcactgtgcccctcatgaatcccgggggccaattccatcctacccctccacctcttcagcattacaccttagaggatattgcaacttctcacctgtatcgggaacccaacaagatgctagagcatcgagaagttcgtgatagacaccacagtcttggtctaaatggaggctatcaagatgagttggtagatcatcgtttgacagaaagggaatgggctgatgaatggaaacatcttgaccatgcgctgaattgcattatggaaatggtagagaaaacaaggcgctctatggcagttctgcggcgctgtcaggaatcagatcgtgaagaactcaactactggaaaagacggtacaatgaaaacacagagctgaggaaaacggggaccgagttggtctccaggcagcacagccctgggagtgcagattctctcagcaatgattctcagagagagttcaacagcaggccaggtacaggatacgtacctgtggagttttggaaaaaaacagaagaagctgtgaataaggtgaaaattcaggccatgtcagaagtacagaaggccgtcgctgaggcagagcagaaagcctttgaagtgattgcaacagagagagcacgaatggagcaaaccatagcggatgtcaagcggcaggccgcagaggatgctttcctcgtcatcaatgagcaagaggagtccacggagaactgctggaactgtggccgcaaagccagcgagacatgcagtggctgcaatatcgcgcgatactgtggctctttctgccagcacaaggactgggagcggcaccaccgcctctgtggtcagaacctgcatggccagagcccccacggccagggccggccgctgcttcctgtaggcaggggctcctctgccaggtccgccgactgcagcgtgcccagcccagccctcgacaagacctcggcaaccacatcgcgttcctcaacacctgcttctgtgacagctatcgacaccaacggactctgagccccggactctgcttaccctgatggctgctcagcaccacagagtgcttgggctgagggactgactgttggaacccgtgcatgtagctgccgggtcatcagcaagaaatgaattggaggcaggaagagtccaagcctgaataataacaccccacagcctctctgtgcacttgctgtctgcggagccagtgtgccattctctgcacatgggcagccagcctgagctgcctcctccatggctttcctggtttgttcctctctccactgaagctgacttagccggccccttttcagtgtagaccaccagctcccctccccatctccttgagtcagcagactgtccaatgtgctcagccaggctggaggcggcaggcggcaggcagcaggctgtggaggaggcccctcggtcagggagcggcctgcctcacccctgaatagctccttcggccccatctccatcctcagcagatgacactgattggcctcacggggacttgggtaagcaacaggcggcattcaggactcttctcaaccctgctgttcagacttgataagatctcagagtccacaggaaagaagtcactgttgcaataaaagcacccgtagtagcaaaaacataaaacaaataaaacttcccccacatcacagatgattttggacaagattttccaaccttgctggctactttagtttgggacctgttttttttctcatttgattttgcttgtgcagaaaatagtttccagcacatggattgatctgagagagaatgaggctcagttgtggatagtctgttttctctgagcatgttggccaactagtatcgtcaaattattgagtggatcatctcttggaaatgcagaacttctgccaccacttggctatttgcacagtcatcttgttctgtgtccttttatctctcagaccacacacatctggaacgctgtgggcatcttctgcccatgggctccatttggcacctgctgagccacagttgtcctgctggatgtgctgtgcaggttggtaggacttgcccccactgtcaaggcctggtctcatctgaaaagccctcctggacctcaaagaattcttcagacctcatagttacaggtcattatatctactatgttgatttatcatcaggcacacaacttctgtttccttctcttgtgttatctgatagcgtccctccttgagctcatcagaaaggttttatgaaatgtgaaccattttgggaaaagctgatcaatttttcttcctagcttcccattttcaaatgggacatcactcatatccctttcagaatgttaggaactgcctcccacattcttccctgtctttttgggttttgttttttgttgttgtggtggttttttaacacaaagtctcactctgttgcccaggctggagtgcagtggcatgatcttggctcactgcaacctctgccttccaggttcaagcaattctcctgcctcagcctcccgagtagctgagattacaggcgcccaccaccacgcccagctaatttttgtatttttagtagagacagggtttcaccatgttggccaggctgatctcgaactcctgacctcaggtgacctgccttggcctcccaaagtgcagggattacaagcgtgagccaccatgcccggcctgtctttttggttttgatgggagtctgaggaccccgacccctcctgctctccatctttgagcctctggcatcctctcacacccagaaatcagttggagtaagtttaattggccctgctccagctggcctttgaagcacaagtttaaatctccaccttctgtgcactgaccagagtctaaaataaaagttgtcagtaccataaaggaaaagggatccacacaggtagccttctccttggatacaggtacatcttactgtaagaatttcaagtcctggctgggcgcagtggctcactcctgtaatcccagcactttgagagaccgaggcaggcagatcacttgaggtcaggaattcaagaccaacctggccaacatggtgaaaccctgtctctaataaaaaaaaaatagaaaaatcagccgggtgtggtggcacacacctgtaatcctagctactcaggaggctgaggcaagagaatctcttgaacctgtgagccagaggttgcagtgagccgagattccaccactgcactccagcctgggcaacagagcaaaactctgtctcaaaaaaaaaaaaaaaaaggcaaaattaaagaatttcaagtccctaatttactctaaccaagcattttcagtcttacaaagaaatctagtgcacgacacctttaaaatgcctagatttccattgcctaaagtaaggtgtgaccagtgaaacaacagcagagaatcatgttcctttgctgtggaacacataagccccacagttttccagtcagcctaatacatgggtatcccccgaccccatctgcctccttaagccacagtccttggtggggaactctaagggggacggagtcagtaccccggacagggccacatttgcatgagacatggctgtctcacaggtcacagagccattacaacagcttactagtttttcatggatttgttggattaacaccttaagcaggttttttattgttattttgtttgtttgtttgttttgagacgggagtttctctcttgtctcccaggctggagtgcaatcgcgcaatctcggctcacggtaacctctgcctcccaggttcaagcgagtctcctgcctcagccttctgagtagctgggattacaggcatgcgccaccacgcccaactaattttgtatttttagtagagacggggtttctccttgttggtcaggctggtctcaaaccccggacctcaggtgatccccccaccttggcctcccaaagtgccaggattacaggcatgagccactgtgtccggtcttgagcaggtttttaaaatctccagtggccataaaactagccagggtagctcatgcttttactggttggaataaggagccaaaaccaacaaaataatatttattagggctcgatgcccatttctgtggctaaggcttaggtttggtgtgcagagcctggcctgctcttgtgggctgtggttgctgtgacagtttcgttttctgaatctttgtaatgctcttccaccctgctcgtgctgcccagaggctgatctgcaaacctgggcagtattccacactgaagctcagtttgcaaaccttctgctgtgttaattctggtcagtttcacacagaagtcacgagggcctctgcccaggaccttctattcacatttcaagaatccctttctgaaattctccaactctctggtcaggaggaggagcaccattggggcggggtaggcagctagaggcgcaggagcgaatccaggttccttgcgtggttcccagcctctgctgacagcacctcagctaccaggtggggagtggaaattcagcctgcttagaggactgacctctacagttcatatttgcagtgacataaaaggcaaagaggagctggcatggtggtacagaaggtatcagtcaagcgcaggctcttcagaaacctagaaactaaaaagagatgcaacatgtgactggccatcagccagacatgtctagggtgagaccagtgctcagcaccacccgccaaggaacactgatgagttgtgggacattatggtcggccaagtgaggaatgattgcagggaccagagaagaccaaagatgccagatgtccccagagtttcttgagggctgggtttcacgtctttgcttgtcctttttgtccccacttgcctgcaccgtgcctgactcatccagtggggaaggtgactcaagaagttgtttaagcctaggcctaggcagtccacttcgggaggtgggggcactccacactggggggccctgcagctccagggctggtgctctagcagatccgctcaggcacggttgggtgaccgtggggtcaccgattgcgtagattatttctagggcagtgctgggttagaaatgtctgtctggaaacaggacacatcttgccaccacaagtccacacctggccttggctgctgcccgctctctgcagcgtggatttcctttgcccatttgggccagaaggtcaccaggagttcatcactgcttagtgtcaacttgacatcttcagcttccagacagaaaacccatgctttactttgtacagccctgtcccagagttagtaagcctcggcttgtcacctgcttgcaaagggtatagacatcattctgggtagttctagaggatatcgcaacaagtgcgtttgaaggttcagcacagctggaattgtacggtagtgagctcttcaaaatgaaaacagaatgaccggatggccatctgtcctggaaactgtagaattgaataaatcactgaaaatagaacacttcttggaggctttcttcagaactgaactagaaacaaggtttccaggctcccaggtcagtagaccaaaccaacttccttagatttttttttttaagctgtttgcagaaaactgggtggtagcgtgtctgaaccaaacggaagaatagccagcggagcatggactgttccagcacgggccagatggccagctgtcgagagcagccctgcccagattgcggtgggggctgtgccagcggctccgcagggcccttccaactctggagtgtctgtagttcttgtgaaaccaaaacgttgactacctgcctctttcctcgggcatcgacgtgctcatttccaaagatgatggtgcaggtgaccttttccatcgtgagctaagagaaggttaggaggcctgaggggcgggccttgtgtcccctcctccccctccacagcccctgaggtggagcttccctcacagaccccatctggtcgagcctacggctgcccagtgtacactcagtgatgcttataccaaatagggcatgtgcgctggtgtctgttggggacagccccatccctaccttggagtcggcagagaagcagcaataagcattaggcgaatgattgaaagggctgctgcgccaagaggccttcagtccccttaacgtggctttccaacttcctgacgaggctacaaaggctccgctcacaaaagaaagccaataatgtaaataaatagaaaacgaagcctccacgcgtggtttttaaagggggatgatgaatgtgacaccacccacagaatgcattagaatctggtttttctgtgctttgtcattttactctgataggaatttttgttacctaactctgtgcataacttatttaatgtactgtataaatgaaccaaaactgttaaatatgtatttagtttgttctacttaaagtagtcaataaaaaggctatattccttttctg

SEQ ID NO: 295570 - DNA, 1416 bp, Artificial Sequence
  derived and/or modified sequence
ggagggagaaaaagagagagactgactgtatctggggattctggcaaggtgaagagctggtctgtttggcaggaccttcccatctgggatccatctgtgtttccctggaatgggacaggcagctctagtcagtgagaaatcgcagatgtgagagagctgacacatgtccagctaatgaaaggaggaggaaggctggtctccgattgagctttgaagattaggaggagaaaaagaggagctttggaatatctatttcaaataaatttggtgtatttaagaatctggattgtttataatttgggcatttgggaggtggggttttgccatgttgcccaggtgggtctcaaactcctgggctaaagcgatcttcccatgttggctgcccaaagtgctgggattacaggcaagagccaccataccagttcctgtctagatattatgatgaagattgaggatggtagtttttgtggagcacaatcctgactgtacctgtgatgttgcattcatcttttggaacataagcagatcaccaggtgaatggctaaagaatctggaataagcttgaaagaaatacaggtcctggcaaggcaatggaaagttggtcctgagaaaagggtgccagcgatgcctggatcgcctgtggaagtgaagatacagtccagatcctcacctcccaccatgccacccctcccaccaataaatcctggaggaccgaggccagtgtccttcactcctactgcattaagcaatggcatcaaccattctcctcctaccctgaatggtgccccatcaccgccacagagattcagcaatggtcctgcctcctccacatcatctgcactcacaaatcagcaattgccagccacttgtggtgctcgacaactcagcaagttgaaacgctttcttaccactctgcaacagtttggcaatgacatctcccctgagattggggagaaggtgcggactcttgttcttgcactggtgaactcaacagtgacaattgaggaattccactgtaagctccaagaagccacaaactttccccttcgtccttttgtgattccatttctcaaggccaacctgcccctgctgcagcgggaactgctgcactgcgctcgggcggccaagcagaccccatcccagtacctggctcagcacgaacaccttctgctcaacacaagcattgcatcgcctgctgactcgtcagagttgctcatggaggtgcacggaaatgggaagaggcccagtccagagagctgcataatacatctaaaatctatgggagtagcttccagacatgagtatttttcgggaactcttcagatgcctgcacacccggtaagaaactctactctagagaatttatgggtcgactgttccagaagcctcaggagtacagttctgccttttccttga

SEQ ID NO: 295571 - DNA, 575 bp, Artificial Sequence
  derived and/or modified sequence
gattgagctttgaagattaggaggagaaaaagaggagctttggaatatctatttcaaataaatttggtgtatttaagaatctggattgtttataatttgggcatttgggaggtggggttttgccatgttgcccaggtgggtctcaaactcctgggctaaagcgatcttcccatgttggctgcccaaagtgctgggattacaggcaagagccaccataccagttcctgtctagatattatgatgaagattgaggatggtagtttttgtggagcacaatcctgactgtacctgtgatgttgcattcatcttttggaacataagcagatcaccaggtgaatggctaaagaatctggaataagcttgaaagaaatacaggtcctggcaaggcaatggaaagttggtcctgagaaaagggtgccagcgatgcctggatcgcctgtggaagtgaagatacagtccagatcctcacctcccaccatgccacccctcccaccaataaatcctggaggaccgaggccagtgtccttcactcctactgcattaagcaatggcatcaaccattctcctcctaccct

SEQ ID NO: 295572 - DNA, 1815 bp, Artificial Sequence
  derived and/or modified sequence
atggccaaggagagcggcatcagcctgaaggagatccaggtgctggccagacagtggaaggtgggccccgagaagagagtgcccgccatgcccggcagccccgtggaggtgaagatccagagcagaagcagcccccccaccatgccccccctgccccccatcaaccccggcggccccagacccgtgagcttcacccccaccgccctgagcaacggcatcaaccacagcccccccaccctgaacggcgcccccagccccccccagagattcagcaacggccccgccagcagcaccagcagcgccctgaccaaccagcagctgcccgccacctgcggcgccagacagctgagcaagctgaagagattcctgaccaccctgcagcagttcggcaacgacatcagccccgagatcggcgagaaggtgagaaccctggtgctggccctggtgaacagcaccgtgaccatcgaggagttccactgcaagctgcaggaggccaccaacttccccctgagacccttcgtgatccccttcctgaaggccaacctgcccctgctgcagagagagctgctgcactgcgccagagccgccaagcagacccccagccagtacctggcccagcacgagcacctgctgctgaacaccagcatcgccagccccgccgacagcagcgagctgctgatggaggtgcacggcaacggcaagagacccagccccgagagaagagaggagaacagcttcgacagagacaccatcgcccccgagccccccgccaagagagtgtgcaccatcagccccgcccccagacacagccccgccctgaccgtgcccctgatgaaccccggcggccagttccaccccacccccccccccctgcagcactacaccctggaggacatcgccaccagccacctgtacagagagcccaacaagatgctggagcacagagaggtgagagacagacaccacagcctgggcctgaacggcggctaccaggacgagctggtggaccacagactgaccgagagagagtgggccgacgagtggaagcacctggaccacgccctgaactgcatcatggagatggtggagaagaccagaagaagcatggccgtgctgagaagatgccaggagagcgacagagaggagctgaactactggaagagaagatacaacgagaacaccgagctgagaaagaccggcaccgagctggtgagcagacagcacagccccggcagcgccgacagcctgagcaacgacagccagagagagttcaacagcagacccggcaccggctacgtgcccgtggagttctggaagaagaccgaggaggccgtgaacaaggtgaagatccaggccatgagcgaggtgcagaaggccgtggccgaggccgagcagaaggccttcgaggtgatcgccaccgagagagccagaatggagcagaccatcgccgacgtgaagagacaggccgccgaggacgccttcctggtgatcaacgagcaggaggagagcaccgagaactgctggaactgcggcagaaaggccagcgagacctgcagcggctgcaacatcgccagatactgcggcagcttctgccagcacaaggactgggagagacaccacagactgtgcggccagaacctgcacggccagagcccccacggccagggcagacccctgctgcccgtgggcagaggcagcagcgccagaagcgccgactgcagcgtgcccagccccgccctggacaagaccagcgccaccaccagcagaagcagcacccccgccagcgtgaccgccatcgacaccaacggcctgtag

SEQ ID NO: 295573 - DNA, 243 bp, Artificial Sequence
  derived and/or modified sequence
atggccaaggagagcggcatcagcctgaaggagatccaggtgctggccagacagtggaaggtgggccccgagaagagagtgcccgccatgcccggcagccccgtggaggtgaagatccagagcagaagcagcccccccaccatgccccccctgccccccatcaaccccggcggccccagacccgtgagcttcacccccaccgccctgagcaacggcatcaaccacagcccccccaccctgtag

SEQ ID NO: 295574 - DNA, 1122 bp, Artificial Sequence
  derived and/or modified sequence
atgcagctggccgccagaatcagacccagagacctggaggagttcttcagcaccgtgggcaaggtgagagacgtgagaatgatcagcgacagaaacagcagaagaagcaagggcatcgcctacgtggagttcgtggacgtgagcagcgtgcccctggccatcggcctgaccggccagagagtgctgggcgtgcccatcatcgtgcaggccagccaggccgagaagaacagagccgccgccatggccaacaacctgcagaagggcagcgccggccccatgagactgtacgtgggcagcctgcacttcaacatcaccgaggacatgctgagaggcatcttcgagcccttcggcagaatcgagagcatccagctgatgatggacagcgagaccggcagaagcaagggctacggcttcatcaccttcagcgacagcgagtgcgccaagaaggccctggagcagctgaacggcttcgagctggccggcagacccatgaaggtgggccacgtgaccgagagaaccgacgccagcagcgccagcagcttcctggacagcgacgagctggagagaaccggcatcgacctgggcaccaccggcagactgcagctgatggccagactggccgagggcaccggcctgcagatcccccccgccgcccagcaggccctgcagatgagcggcagcctggccttcggcgccgtggccgagttcagcttcgtgatcgacctgcagaccagactgagccagcagaccgaggccagcgccctggccgccgccgccagcgtgcagcccctggccacccagtgcttccagctgagcaacatgttcaacccccagaccgaggaggaggtgggctgggacaccgagatcaaggacgacgtgatcgaggagtgcaacaagcacggcggcgtgatccacatctacgtggacaagaacagcgcccagggcaacgtgtacgtgaagtgccccagcatcgccgccgccatcgccgccgtgaacgccctgcacggcagatggttcgccggcaagatgatcaccgccgcctacgtgcccctgcccacctaccacaacctgttccccgacagcatgaccgccacccagctgctggtgcccagcagaagatag

SEQ ID NO: 295575 - DNA, 1122 bp, Artificial Sequence
  derived and/or modified sequence
atgcagctcgcagcccgcataagaccacgagacttagaggagtttttcagcactgttggaaaggtgcgagatgtacggatgatctctgaccggaactctaggagatctaaaggaatcgcttatgttgagtttgtcgatgtatcctccgtgcccttggcgataggcctcaccggacagcgcgtcctcggggtgcctattatcgttcaggcctctcaggctgaaaagaacagggccgctgctatggccaacaaccttcagaaaggatccgctggacccatgcgcctgtatgtcggaagccttcacttcaacataactgaggacatgctccgcggaattttcgaaccattcgggcgcatcgagtctattcagctgatgatggattccgaaacgggtaggtccaagggttacgggttcataacgttttctgacagtgagtgtgcaaaaaaggcgcttgaacagctcaatggcttcgagctggccggacggcctatgaaagttggtcacgtcaccgagcggacagacgcctcctccgcatcgtccttcctggactccgacgaactggagagaaccggcatcgacctggggaccactggtaggctgcagctgatggctaggctagcagaggggacgggactacaaatccctccagccgcccagcaagctctgcaaatgtctggcagccttgcattcggcgccgtggcagagttctccttcgtgatcgatttgcaaacacggctgtcacaacagaccgaagcgtcagccttggctgctgccgcgtcggttcagcctctagctacacagtgtttccaactcagcaacatgtttaatccccagactgaagaagaagtgggatgggatactgagatcaaggatgatgttattgaggagtgcaataaacacggaggcgtaattcacatttacgtagacaaaaactctgctcagggtaatgtttacgtcaaatgtccctctatcgctgccgccatcgcagctgtgaatgcactacacggtagatggtttgctggcaagatgattacagccgcctatgtacctctccccacttaccataacctcttccctgattctatgaccgcgactcagctattagtaccgtcccggagatag

SEQ ID NO: 295576 - DNA, 1122 bp, Artificial Sequence
  derived and/or modified sequence
atgcagctggccgcccgcatccggccccgggacctggaggagttcttcagcacagtgggcaaggtgagagatgtgaggatgatcagtgacaggaacagccgccgcagcaaaggaattgcctacgtggagtttgtggatgtgtcctctgtgcccctggccatcggcctgaccggccagagggtgctgggcgtgcccatcatcgtgcaggccagccaggccgagaagaacagagctgctgccatggccaacaacctgcagaagggcagcgctggccccatgaggctgtatgtgggcagcctgcacttcaacatcacagaggacatgctgcggggcatctttgagcccttcggcagaattgagagcatccagctgatgatggacagcgagaccggccgcagcaagggctacggcttcatcaccttcagtgacagtgaatgtgccaagaaggccctggagcagctgaatggatttgagctggccggccggcccatgaaggtgggccacgtgacagagaggacagatgccagcagcgccagcagcttcctggacagtgatgagctggagaggacaggcatcgacctgggcaccaccggccgcctgcagctgatggcccggctggccgagggcaccggcctgcagatccccccagctgcccagcaggccctgcagatgagcggcagcctggccttcggggctgtggccgagttctcctttgtgattgacctgcagacccggctgagccagcagacagaggccagcgccctggccgccgccgcctctgtgcagcccctggccacccagtgcttccagctgagcaacatgttcaacccccagacagaggaggaggtgggctgggacacagagatcaaggatgatgtgattgaggagtgcaacaagcacggcggcgtcatccacatctacgtggacaagaacagcgcccagggcaatgtgtatgtgaagtgccccagcattgctgctgccatcgctgctgtgaatgccctgcacggccgctggtttgctgggaagatgatcacagctgcctacgtgcccctgcccacctaccacaacctcttcccagacagcatgacagccacccagctgctggtgcccagcagaagatag

SEQ ID NO: 295577 - DNA, 1122 bp, Artificial Sequence
  derived and/or modified sequence
atgcagctggccgcccggatccggccccgggacctggaggagttcttctcaactgtgggcaaggtccgagacgtgagaatgatctccgatcgaaattccaggcgttcgaagggcatagcgtatgtggagttcgtggatgtgagctccgtgcccctggcaatcggtttaacgggccaacgcgtcctgggtgtgcccattatagttcaggccagccaagctgaaaagaatagagctgccgccatggcgaacaatctgcagaagggtagtgccggtcctatgcgcttgtatgtggggagcctgcacttcaatatcactgaagacatgctcaggggaatttttgagccctttggccggatcgaatccatacaactgatgatggattcggagaccggccgttcgaagggatacggcttcattactttcagtgactcggaatgcgctaaaaaggcactggagcagttgaacggcttcgagctggcaggtaggcccatgaaagtgggccatgtgaccgagcggactgatgcttcctcagcctctagcttcctcgactctgatgagctggaacgtaccggaattgatctgggcacaacaggtcggctgcagctgatggcgcggcttgccgaaggtaccggcctgcaaatccctcccgcagctcagcaggctctgcagatgtctggaagcctcgcgttcggggcggtagctgagttttcctttgtgattgacctgcagacgaggctctcccagcagaccgaggcgtccgctttggctgctgccgcatccgtacagccactggccacacaatgttttcagttatccaatatgtttaatccccaaactgaagaggaggtcggctgggacaccgaaataaaagatgatgtcattgaagaatgcaacaagcacggaggggttatccatatctatgttgacaagaatagtgctcagggcaatgtgtacgtgaaatgcccctccatcgccgccgccatcgccgccgttaatgccttgcatgggcggtggtttgcggggaaaatgataaccgctgcttacgtgcccctccctacctaccacaatcttttcccagactctatgaccgccacccagctgctcgtccctagccgacgttag

SEQ ID NO: 295578 - DNA, 1122 bp, Artificial Sequence
  derived and/or modified sequence
atgcagttggctgccaggataaggccccgtgacctggaggagttcttctctacagtaggcaaagtgagagacgtcagaatgatttcagaccggaacagcaggagatctaaaggtatcgcttatgtggagttcgtcgacgtgtcctctgttcctctcgccattggattgaccggtcagcgagttctcggtgtgcctattattgtgcaagcttctcaggccgagaaaaatagggccgcagctatggccaacaatctccagaaaggaagcgccggtccgatgaggctatacgtgggaagcctgcacttcaatataacagaagacatgttacgcggaatctttgaacccttcggccgaattgagtctattcagttgatgatggactcagagacgggcaggtctaagggttacggattcataacattctccgattctgagtgtgccaagaaggccctggagcagctgaacggatttgagcttgctggacggccaatgaaagtcggccacgtgacggagcgcacagatgcaagttctgcaagtagcttccttgattcagacgagctggagaggaccggtattgaccttggtactaccggcaggctccaattgatggctcgactggcagagggaaccgggctccagattccgcctgccgctcaacaggccctccagatgtcagggagcctcgcctttggagcagtcgccgagttctcttttgttattgacctccagacccgactcagccagcaaaccgaggcctcggccttagccgcagccgcaagcgtgcagcctctggcgacccagtgttttcagctgtcaaacatgttcaacccacagacagaagaagaagtgggatgggacacggagataaaagacgatgtaattgaggagtgtaataagcatggaggcgttattcacatttatgttgacaagaatagcgctcaaggcaatgtttacgtgaagtgtcctagcatcgcggctgccatagccgcagtcaatgccctccacggcaggtggtttgccggaaaaatgattactgctgcctacgtgcctttacccacctatcacaacttgttccccgatagcatgaccgctacacagctgctggtacctagcaggagatag

SEQ ID NO: 295579 - DNA, 435 bp, Artificial Sequence
  derived and/or modified sequence
atgcccagcagcgcccacgcccacgccatcctgaaggatgcccaggacagccctggggtggtgctgggccagggcgtcatccgggccggcaagggctgggagaatggacctgagagccaccgggtgcgctaccggggcaagaagaacacagactggcacaccaggagccctgccctgaccttcaccgtgctgtggcccagctgccccctggtgcccatcgtgctgggcctgaaccctggcttctgcccctgtgcccggagcagcggggagtgcaaccacagcggccacatcatcgagggcacccgctgggaccagggccagctgtgcctgctcttcaccctgagcagagctgacatccgggcctgctggagggtgggggagcagcagtatgtgtccctcttcacccacgtgcagatgcagcaccccagcctgtag

SEQ ID NO: 295580 - DNA, 399 bp, Artificial Sequence
  derived and/or modified sequence
atgagctttgagtaccgccactacaagcgggaggccaagatctgcacctgccggggcggctgggcccacgtgctgctgtgcatcggcgtgtcccagggcgcctgtgccgagcacctgccccacaggcctgctgtggagaaggatgtgcctggggccggggaggtgctcttcatgtgctcctggaggatcttccctgtggccagcgccagccccagcagcagcatcagcggcctggccggccacagcgtcttcctggtgcccggcctggccgcccaccctggcagccacagcgaccagcccccaggagtgcccagcaggaggaagagccggctggagcgctggagccccagcgtgagccgcagcaccagccccccaacagaggcccccttctgcctgtag

SEQ ID NO: 295581 - protein, 302 aa, Artificial Sequence
  derived and/or modified sequence
MRLGSPGLLFLLFSSLRADTQEKEVRAMVGSDVELSCACPEGSRFDLNDVYVYWQTSESKTVVTYHIPQNSSLENVDSRYRNRALMSPAGMLRGDFSLRLFNVTPQDEQKFHCLVLSQSLGFQEVLSVEVTLHVAANFSVPVVSAPHSPSQDELTFTCTSINGYPRPNVYWINKTDNSLLDQALQNDTVFLNMRGLYDVVSVLRIARTPSVNIGCCIENVLLQQNLTVGSQTGNDIGERDKITENPVSTGEKNAATWSILAVLCLLVVVAVAIGWVCRDRCLQHSYAGAWAVSPETELTGHV

SEQ ID NO: 295582 - DNA, 909 bp, Artificial Sequence
  derived and/or modified sequence
atgaggcttggctcacctggcctcctgtttctcctgttttcctctcttcgcgcggatactcaggagaaggaagtgagagctatggtgggctctgacgtcgaactctcatgtgcctgtcccgagggatctcgttttgatctgaatgacgtgtacgtttactggcaaacttcagagtccaaaactgtggtgacctatcatattcctcaaaacagttcacttgaaaacgtcgattcaagatacaggaaccgggccctgatgtctcccgccgggatgcttcggggcgattttagtctccgattgttcaatgtaacgccacaggatgagcagaagttccactgtctcgtactctctcagagcctgggctttcaggaggtgctgtcagtcgaggtgactttgcacgttgcggccaatttcagcgtgccagtcgtgagcgctccccatagcccgtcacaggacgagctcaccttcacctgcaccagcattaatggttatcccaggcccaacgtctattggatcaacaagactgacaactccctcttagaccaggctcttcaaaacgataccgtgttcctgaatatgaggggcttgtatgacgtcgtttccgtcctccgtattgcccgcacaccaagcgtgaatattggctgttgtatcgaaaacgtcttgctgcagcaaaatctcactgtagggtcacaaactgggaatgacatcggggagagagacaaaataactgaaaatccagtctctactggcgaaaagaatgcagctacatggtccatattggcggtgttgtgcctgcttgttgtcgttgcagtcgctataggatgggtgtgccgcgacagatgtctgcaacacagctatgcaggcgcctgggccgtgagcccggagacagagctaacgggccatgtttag

SEQ ID NO: 295583 - DNA, 1009 bp, Artificial Sequence
  derived and/or modified sequence
ggcccgaggtctccgcccgcaccatgcggctgggcagtcctggactgctcttcctgctcttcagcagccttcgagctgatactcaggagaaggaagtcagagcgatggtaggcagcgacgtggagctcagctgcgcttgccctgaaggaagccgttttgatttaaatgatgtttacgtatattggcaaaccagtgagtcgaaaaccgtggtgacctaccacatcccacagaacagctccttggaaaacgtggacagccgctaccggaaccgagccctgatgtcaccggccggcatgctgcggggcgacttctccctgcgcttgttcaacgtcaccccccaggacgagcagaagtttcactgcctggtgttgagccaatccctgggattccaggaggttttgagcgttgaggttacactgcatgtggcagcaaacttcagcgtgcccgtcgtcagcgccccccacagcccctcccaggatgagctcaccttcacgtgtacatccataaacggctaccccaggcccaacgtgtactggatcaataagacggacaacagcctgctggaccaggctctgcagaatgacaccgtcttcttgaacatgcggggcttgtatgacgtggtcagcgtgctgaggatcgcacggacccccagcgtgaacattggctgctgcatagagaacgtgcttctgcagcagaacctgactgtcggcagccagacaggaaatgacatcggagagagagacaagatcacagagaatccagtcagtaccggcgagaaaaacgcggccacgtggagcatcctggctgtcctgtgcctgcttgtggtcgtggcggtggccataggctgggtgtgcagggaccgatgcctccaacacagctatgcaggtgcctgggctgtgagtccggagacagagctcactgaatcctggaacctgctccttctgctctcgtgactgactgtgttctctatgcaacttccaataaaacctcttcatttgaaaggaaaaaa

SEQ ID NO: 295584 - DNA, 7080 bp, Artificial Sequence
  derived and/or modified sequence
gcgcagttagagccgatctcccgcgccccgaggttgctcctctccgaggtctcccgcggcccaagttctccgcgccccgaggtctccgcgccccgaggtctccgcggcccgaggtctccgcccgcaccatgcggctgggcagtcctggactgctcttcctgctcttcagcagccttcgagctgatactcaggagaaggaagtcagagcgatggtaggcagcgacgtggagctcagctgcgcttgccctgaaggaagccgttttgatttaaatgatgtttacgtatattggcaaaccagtgagtcgaaaaccgtggtgacctaccacatcccacagaacagctccttggaaaacgtggacagccgctaccggaaccgagccctgatgtcaccggccggcatgctgcggggcgacttctccctgcgcttgttcaacgtcaccccccaggacgagcagaagtttcactgcctggtgttgagccaatccctgggattccaggaggttttgagcgttgaggttacactgcatgtggcagcaaacttcagcgtgcccgtcgtcagcgccccccacagcccctcccaggatgagctcaccttcacgtgtacatccataaacggctaccccaggcccaacgtgtactggatcaataagacggacaacagcctgctggaccaggctctgcagaatgacaccgtcttcttgaacatgcggggcttgtatgacgtggtcagcgtgctgaggatcgcacggacccccagcgtgaacattggctgctgcatagagaacgtgcttctgcagcagaacctgactgtcggcagccagacaggaaatgacatcggagagagagacaagatcacagagaatccagtcagtaccggcgagaaaaacgcggccacgtggagcatcctggctgtcctgtgcctgcttgtggtcgtggcggtggccataggctgggtgtgcagggaccgatgcctccaacacagctatgcaggtgcctgggctgtgagtccggagacagagctcactggccacgtttgaccggagctcaccgcccagagcgtggacagggcttccgtgagacgccaccgtgagaggccaggtggcagcttgagcatggactcccagactgcaggggagcacttggggcagcccccagaaggaccactgctggatcccagggagaacctgctggcgttggctgtgatcctggaatgaggccctttcaaaagcgtcatccacaccaaaggcaaatgtccccaagtgagtgggctccccgctgtcactgccagtcacccacaggaagggactggtgatgggctgtctctacccggagcgtgcgggattcagcaccaggctcttcccagtaccccagacccactgtgggtcttcccgtgggatgcgggatcctgagaccgaagggtgtttggtttaaaaagaagactgggcgtccgctcttccaggacggcctctgtgctgctggggtcacgcgaggctgtttgcaggggacacggtcacaggagctcttctgccctgaacgctcccaacctgcctcccgcccggaagccacaggacccactcatgtgtgtgcccacaagtgtagttagccgtccacaccgaggagcccccggaagtccccactgggcttcagtgtcctctgccacattccctgggaggaacaatgtccctcggctgttccggtgaaaagttgagccacctttggaagacgcacgggtggagtttgccagaagaaaggctgtgccagggccgtgtttggctacaggggctgccggggctcttggctctgcagcgagaaagacacagcccagcagggctggagacgcccatgtccagcaggcgcaggcctggcaacacggtccccagagtcctgagcagcagttaggtgcatggagagggtatcacctggtggccacagtcccccttctcacctcagcaatgatccccaaagtgagaggtggctcccccggcccccaccaccctcagcagccccaccccactcaaccctgagggtccccagggtcctgatgaagacctccgaccccagcgccaggctcctcggagcccaacagtcccaagggggcaggagacggggtggtccagtgctgaggggtacagccctgggccctgaccagccccggcacctgccatgctggttcccggaatgaatcagctgctgactgtctccagaagggctggaaaggatgctgccaggtgacccgaggtgcactcgccccagggagatggagtagacagcctggcctggccctcgggacacattgtctgccccggggctatgggcaaatgcccctccttcttacttcccagaatcccctgacattcccagggtcagccaggacctgttacagccctggtcacttggaactgacagctgtgtgaggcctgcacttctcagacccagacttagaacaaaaggaggagtgaggactcaaggctacaatgaggttccagtacttgttacaagaaattggttttctgcaaaaaaagtccctacctgagcctttaggtgaatgtgggatccactcccgcttttaacatgaaagcattagaagatgtgtggtgtttataaaagaacagttgtcatcaccgggcattgattggcagggacaaggagctgcttgggtgtggaaagttggggcgttggaaagtgggctgtggtgcccatttgcagtgactgtgaagtgactccaggacggacctgcgggggcacccagaggtcctaagccccaggactgagggtcgtgcatcaccactcgggtgtcccgggaggtgccctgggcccggggacctcacaggcaggacggcgacactaatgcagggagagggagtctggccccagcttttcctatcagaggcgattttccttcaccaggggatgggcaggaaagaggcaggggccccagaagcttctgtccctcatgcctgagggcacgggggacacttggaggctgctgtcaccactgtgcgtccaaggccatgctctctgcgggtcagtgcctgagtctcgcctccctgctggtccctgaagccccctcagaagccctgcctgtcacgtcggcatttgtgagacctaccctgtaacgcctgcccctctcagcccaacatcagcttcctctttctcccttgctgtagacaggctggattccagtgttgggacagccatctccagaaacctgacttaagagagtaagatgcaaatcgtgcctgtatccagtggctttggtgggtgcagggagtcttgggcacagccagctcagctgtctgtggtatgagcaggaacaggtgccactcctgctcaggggaccctgccctacaccaggctgttccgtccccctggaggacatggggccaggtctggaggcattttgggttgtcacagctgggggctgttcctcggcttcagcgggtggaagcctcagatgctgttcaacatcttctggacacgggaggccccgacagagagaagcgtccacccgcaagtccacagtctgaggtctcccctcagagaccctgccctgcacacccacctccagccaaaggtcctgcctgccccagggctcaggggaaccttgccggtctgtggaacaggagaggggactctcgccagctgcaccaccctgcacgtagtaggtgtgcggtaaacatccaccagggaggctccagtcaaggctggcagatggggcggtccatccctagggcaggtgacagaagggaaaaggctgcctgctggcccccgagccaggtagcacatgcttgtgcctcagtttcccctcctgtaaagtgaggcgctggatccaggttctgtctactgggctctgcagcttggacgctcctaagaccaagcgacccaccctggggagggcagctatggctttggaatagctgtccaggcccgggtgcctccaagacggccaccacaccctgcctgtgctgcaggggtgcaggggtaaggggcaagactccagaggcctcctctctgcatctccttgtcttcagtggccggaggtgaggcctgagctcaggggaggggcttctgccacgaaccctatggcggggcacagcacacttttcccagggaggacccctgggccccctgcattatccccagcggagtgtggggtcaccttccaagagcgacattgagaagctccagctctaggagtgtgcagactcttaaccaggcaggcccaggccctggggcacacaaaggcggggcctgctctccccagctgcccctgccaatgggggctggactgtcctaccctcctcccttctacctccccactgtcttccctctccactgtcaccactgcctccctcttccactgtcctccatgcactgccctccctccaccttcccccacccccaccactccccatgctgtccccaggctccccccgctctcccccctccccactgtccccctccccatgctgtacccagctcaccccgctctcccctctccccactgtcccccctcccactccccatgctgtccccagctcaccctacatggacttggcgatgtccttccatggctcaccggtctgaatttccatgatgagccgggcctgcagctttgctcccctatccctgcccaggctgcagctgtccatgcagggagcgagctccagcacctgcggagtccttccgtgggggcctctccgtgccacagcagccagggacctcaggtgcctgtgcatgacaccaccgcccatcctcatcctgagccagcctctcaggatcaggacttggtttggcggcgttaaccttagagcctgcaaggggcttcctcctggtgggtctggccgtagcctggggaggccacagctccaggccactccagacctcccttcctctgggccttccatgtggtggcaaccaccgcagctgtaagggagggaaaatggagcgtttgttctcgggctgggctggggtctgggggaagccatgggcgtgaagactggagtattatttgatggagaagcggccactcctggagaccggcggcaaacacagaagcacagcgtggaaggtgctggtgtcagcccacacgggtgatggggtcagactcaggagtcacactcaggagtcaccaggctcaaagggcccaggcaccgcaagtcctgctcagccccagacacaatgcattcctgttgccctcgccctcagccaggccccacgcaggccagggagcactggcaaagcttggcaaccctctgggggccagccttcatccaggccgaaggtggtcagtggcccaccatggcccaggtagaaaactcacggattaagatttcatgcccgactccaaaggcaagagactttattattttattttttttgagccagagtatcgctctgtcacctaggctggagtgcaatctctgctcattgcaacatctgcctcccgaactcaagcaattctgcctcagcctcccaagtagctgggattacaggtgtgcgccaccatgcccaggtaattgtatttttagtagagacagggtttcaccatgttggtcaggctggtttcaaactcctgacctcaaatgatctgcccacctcgacctcccaaagtgctgggattacaggtgcgagccaccgcacctggctaccagacacttcagagttacaggttagtttttctttttcttttatttttttttttttggcggaggtgcagggggagttaaacaaacaaacaaaataaacaggccgggtgcggtggctcatgcctgtaatcccagcactttaggaggcctaggtgggtggatcacgagatcaggggttcaagaccagcctggccgagatggtaaaaccccgtctccactaaaaatacaaaaattggccaggcacggtggctcacacctgtaatcccagtactttgggaggctgaggtgggcagatcacctgaggtcaggagttcaagaccaacctgaccaacatggagaaaccccatctctactaaaaatacaaaattagccaggtgtggtggtgcatgcctgtaattccagctactcgggaggctgaggcaggagaattgcttgaacccaggaggcagaggttgcagtgggccaagatggcgccattgcactccagcctgggaacaagagcgaaactctgactaaaaaagaaagaaagaaagaaaaaaattagttgggcacggtggcaggcgcctgtaatcccaggtactcaggaggctgaggcaggagaattgcttgaacccgggaggcagaggtcgcagtgagccgagattgcaccactgccctccagcctgggtgacagagcaagactccgtctcaaaaaaaaaaaaaaaaaaaattggatacattgtaatacctcaaatacttgtaagtgaagcaccccagttcccatagagctgccgcactcagaggcttctgtaacctgcctgctcccagcattctatttagggtctggtatgtccagaatttgcagacacagcaattcctgcagcagcagtgcaccatgtggaaggggccccatgaccagcccactgtgagctcacacgtgatgactgaggcttcttcacacagcagggctctgggtgtgatacccagggcacacgcgtttgcacaggcacaggccacacaagttctcacatgctcagccccataagccgtgctggacaggcatggccatttacacccaggatcctgctgagaacagcaaccaactcaccaccctcgcatcatgatccttgccacacaggggctctggtggctttggtggcctgggctgtggctctgctgccagccaccttgagtgaagatccgggttctctgggtgctactcagctgctatgtggggagctggcccctggggtgatgagggcccttcccaacccgccctcagcccttggacagccaggatcacccggggctgtctgcatacagacttctcaggggagttctcagcttggacccttatctccccagaatcctggaacctgctccttctgctctcgtgactgactgtgttctctatgcaacttccaataaaacctcttcatttgaaaggaaaaaa

SEQ ID NO: 295585 - DNA, 909 bp, Artificial Sequence
  derived and/or modified sequence
atgaggctgggcagccctggcctgctcttcctgctcttcagcagcctgcgggctgacacccaggagaaggaggtgcgggccatggtgggcagtgatgtggagctgagctgtgcctgcccagagggcagcagatttgacctgaatgatgtgtatgtgtactggcagaccagcgagagcaagacagtggtgacctaccacatcccccagaacagcagcctggagaatgtggacagccgctacagaaacagagccctgatgagccctgctggcatgctgcggggggacttcagcctgcggctcttcaacgtgaccccccaggatgagcagaagttccactgcctggtgctgagccagagcctgggcttccaggaggtgctgtctgtggaggtgaccctgcacgtggccgccaacttctctgtgcctgtggtgtctgccccccacagccccagccaggatgagctgaccttcacctgcaccagcatcaatggctacccccggcccaacgtgtactggatcaacaagacagacaacagcctgctggaccaggccctgcagaatgacaccgtcttcctgaacatgaggggcctgtatgatgtggtgtctgtgctgagaattgcccggacccccagcgtgaacatcggctgctgcattgaaaatgtgctgctgcagcagaacctgactgtgggcagccagacaggaaatgacatcggggagcgggacaagatcacagagaaccctgtgtccactggagagaagaatgctgccacctggagcatcctggccgtgctgtgcctgctggtggtggtggccgtggccatcggctgggtgtgccgggaccgctgcctgcagcacagctatgctggggcctgggccgtgtccccagagacagagctgactggacatgtgtag

SEQ ID NO: 295586 - DNA, 909 bp, Artificial Sequence
  derived and/or modified sequence
atgcggctgggcagccccggcctgctgttcctgctgttcagcagcctgcgggccgatacccaggagaaagaagtcagagccatggtgggctctgacgttgagctgagttgtgcttgtcctgaaggctcacggttcgatttaaacgacgtgtacgtgtactggcagaccagtgagtcaaagaccgtggtgacatatcatatccctcaaaacagctccctagaaaatgtggattcacgttaccggaaccgggcactcatgtccccggctggcatgctgcgcggcgatttttctttgaggctgtttaacgtgactccacaagatgaacaaaagttccattgcctggtcttgtctcagagtctgggctttcaggaagtccttagcgtggaggtaaccctgcacgtggctgccaacttttccgtgccagttgtttccgcaccgcacagtccgtctcaagacgaattgacttttacctgcacctctatcaacggttatcctaggcccaatgtgtattggattaataagacagacaattcactcctggaccaggccctgcagaatgacactgtcttcctcaatatgagaggtctgtacgatgtcgtgtccgtcttgcgcattgccagaactcctagcgtgaacattggctgttgcatagagaacgttctcctccaacagaacctgactgtgggatctcaaacaggaaatgacatcggtgaacgagacaaaataacagagaatcctgtctctactggggagaagaatgccgcaacatggtccatcctggcggtgttgtgcctgctggtggtagtggccgttgccattgggtgggtttgtcgggatcgatgtttacaacacagctatgctggtgcgtgggcggtatctcccgagacagaactaacaggccatgtgtag

SEQ ID NO: 295587 - DNA, 909 bp, Artificial Sequence
  derived and/or modified sequence
atgcgcctggggtcacccggtctgttgttcttgttattttcaagtctccgcgctgatacgcaggagaaagaggtgcgcgcaatggtgggcagtgatgtcgagctctcttgcgcttgccccgaaggtagcaggttcgatcttaacgacgtgtacgtgtactggcagacaagtgaatctaagactgtggtgacataccacatccctcaaaacagcagtttagagaacgttgactcccgttaccggaacagggccctgatgagccccgcaggcatgctgcgcggagacttttccctgagattgtttaacgttacaccacaggatgaacagaagttccactgcctggtgctgagccaatcactgggattccaagaagttctcagtgtggaagtcactctccacgtggcggcaaacttctccgtgcccgtcgttagcgcaccacactctcccagccaggatgaattgaccttcacctgtacatctataaatggctatccacgccctaatgtctattggatcaataagacagacaactccctactggaccaggcacttcagaacgatacggtcttcttgaacatgaggggcttgtatgatgttgtgtcagttctccgcatagcaagaacaccttccgtaaacatcggctgctgcatcgagaacgtgctgctccagcagaatctcaccgtgggtagccagactgggaacgacataggcgagcgcgataagattacggagaatccggtgtccacaggcgaaaagaacgctgctacctggagcatacttgccgtgttatgcctcttggtcgtagtggctgtggctatcggctgggtgtgtagagatcggtgtctgcagcacagttatgcaggcgcttgggcagtgtccccagagactgaactgaccggacatgtgtag

SEQ ID NO: 295588 - DNA, 909 bp, Artificial Sequence
  derived and/or modified sequence
atgagactgggcagccccggcctgctgttcctgctgttcagcagcctgagagccgacacccaggagaaggaggtgagagccatggtgggcagcgacgtggagctgagctgcgcctgccccgagggcagcagattcgacctgaacgacgtgtacgtgtactggcagaccagcgagagcaagaccgtggtgacctaccacatcccccagaacagcagcctggagaacgtggacagcagatacagaaacagagccctgatgagccccgccggcatgctgagaggcgacttcagcctgagactgttcaacgtgaccccccaggacgagcagaagttccactgcctggtgctgagccagagcctgggcttccaggaggtgctgagcgtggaggtgaccctgcacgtggccgccaacttcagcgtgcccgtggtgagcgccccccacagccccagccaggacgagctgaccttcacctgcaccagcatcaacggctaccccagacccaacgtgtactggatcaacaagaccgacaacagcctgctggaccaggccctgcagaacgacaccgtgttcctgaacatgagaggcctgtacgacgtggtgagcgtgctgagaatcgccagaacccccagcgtgaacatcggctgctgcatcgagaacgtgctgctgcagcagaacctgaccgtgggcagccagaccggcaacgacatcggcgagagagacaagatcaccgagaaccccgtgagcaccggcgagaagaacgccgccacctggagcatcctggccgtgctgtgcctgctggtggtggtggccgtggccatcggctgggtgtgcagagacagatgcctgcagcacagctacgccggcgcctgggccgtgagccccgagaccgagctgaccggccacgtgtag

SEQ ID NO: 295589 - DNA, 3199 bp, Artificial Sequence
  derived and/or modified sequence
gggctgtctgtggcctcagcgctcggcaggcgcgcactcagctccacacccggctctctcggcatctcagacccgggaaaaatccctctgctttctctggccagtttcacacaatcatcaggtgagccgaggatccattggaggaaggcattatctgtatccagaggaaatagccaaggatattcagaggtgtgcctgggaagtttgagctgcagcagtggaaccttaatgcccaggatgatcctgtctaacaccacagcggtgacgccctttctgaccaagctgtggcaggagacagttcagcagggtggcaacatgtcgggcctggcccgcaggtccccccgcagcagtgacggcaagctggaggccctctacgtcctcatggtactgggattcttcggcttcttcaccctgggcatcatgctgagctacatccgctccaagaagctggagcactcgaacgacccattcaacgtctacatcgagtccgatgcctggcaagagaaggacaaggcctatgtccaggcccgggtcctggagagctacaggtcgtgctatgtcgttgaaaaccatctggccatagaacaacccaacacacaccttcctgagacgaagccttccccatgaaccccaccactggctaaaactggacacatcctgcctggcaacctgattttctaatcacattcctctcatactctttattgtgatggataccactggatttctttttggctgttgtaaggggtgaggggtggattaatgacactgtttcactgtttctctaaaatcacgttcttttgtgatagactgtcagtggttcccccatatctgtccctgccttgctaaatttagcagaatccctgaggacatggcctctgagaatagcagctgcatttcccagactcccttgcagctagcaaggttgtgtgactaagccctggccagtaggcatggaagtgaagactgtaatgtccaagtaatccttggaaagaaaagaacgtgcccttaactaactttgtcctgcttcccagtggctggatgtggaggaggtggagagcagttatgagactgggaaagaacggggcactcaaagagccacacacatctgggcctgggcgacgtggatcctccttaccacccaccaggccagatttacaggagagagaaatccactccactcttccttaagccactgttattctgatctctgttaaggtcgcagaatcaatgcccttactgatacacctaccttataggactgaacctaaaggcatgacatttccatacttgtcacaagcacacactgattctgcccttgtcacttctgtgctcactcttgtggctctatcctcctcctgcccttccgccttccactcctcccttgcacccatcctgcacacatctccctgaaaacacacaggcacatacactcatatacatagacacacatacacacctcaatctagaaagaacttgctttgtacagggctgagatggaggagaaaaaaatgcccccttcagaatgcataccaaggggaaggtgctcggtcactgtgggagcagggaaaggtgcccccactccccgagagccaggggaaggagtggctctgggcagagagggacacatagcactggggtggcaggtccttttgaggtgatgggccggttttgtgagatgaattgtatcccccaaaaagacaggtaccttcaatgtgacctaattgggaaatagagtctttgcagatgatctagttgagatgaggtcattggggtgggccctcacccaatatgactggagtccttatcggaagagggaaattcagacacagatgcatagggaggacaccatgccgtgacagaggcagagggtgcagtgacacagccacaaaccaaggaaggccgaggatggatgcgcatccccatcccaagaagtcgggaagaagccaggaaggctcctctcccacaggtttcagaggaagcacagccctgcttgaattcaaacttttggcctccagaactgtgagtcagtacctgttgttgaagccacccagcttaggatactctggcagcctactgccatacagtattgggatactatagtgagcccatgcagcacctctcacccacccagagatggagctgctctgccttccagcggggcacccggagggctgccccagcagatagagagggcctccgttctgccacctgccttgaaagggtctccagctgccatatgtagcattggagtcctctgcaatgcgacatcctgaaagctcagctgcctgggcattcctgaagagtatggaatatttaaatgaaacatatttttttaaaacctgcgcataagataaaagcagcccgtgtgcatcttgggccatcctcaaatggacagacttggtcttgtgaggttccagtccttgtttcacataataaacactggcatggctcagcccctgagttaccacagtccttgagatgagtggttctttgggttacaaagtcctctgaaagtctagtgagagctgtgatctttgccccacccgaataatgcatatggacaccacaccttgcctgccgtgtccaggattcatgaccagtagcagcccagctatgcctgccacgtctcatggcccctgtgtaagccagacccttcttaggcagttgcatattcccagactgaggcagggcaggtttgcagagagagacccagagtgcacgtgacccgcagtgtgatccctggcacgcactgactttgatattccaggcacacggactggctatttatcaccacttctttttccccactaagattcctgtgccttttaaggcagagggagatccctatggcgttagtcttcccaggccttaaagggcccttgtcttcactcacaaacctcttatctcttcttctccttcctctacattttaaagggggagagggaaaagtaaccgggagacaaattgagccacatattttcagacacttgttaccatattttaaaatctggcttcacatacacagagtctttgctatgcaccatgtactgttctaagcttcttaaaaatagaatctcaattattattttgcaggcaatactctatgcattcattagctaggacaacaatgcatttgcagtagtgagatttcgctaaaaaattaaagccatttactatgaaaaaaaaaaaaaaaaaa

SEQ ID NO: 295590 - DNA, 3171 bp, Artificial Sequence
  derived and/or modified sequence
gggctgtctgtggcctcagcgctcggcaggcgcgcactcagctccacacccggctctctcggcatctcagacccggtttcacacaatcatcaggtgagccgaggatccattggaggaaggcattatctgtatccagaggaaatagccaaggatattcagaggtgtgcctgggaagtttgagctgcagcagtggaaccttaatgcccaggatgatcctgtctaacaccacagcggtgacgccctttctgaccaagctgtggcaggagacagttcagcagggtggcaacatgtcgggcctggcccgcaggtccccccgcagcagtgacggcaagctggaggccctctacgtcctcatggtactgggattcttcggcttcttcaccctgggcatcatgctgagctacatccgctccaagaagctggagcactcgaacgacccattcaacgtctacatcgagtccgatgcctggcaagagaaggacaaggcctatgtccaggcccgggtcctggagagctacaggtcgtgctatgtcgttgaaaaccatctggccatagaacaacccaacacacaccttcctgagacgaagccttccccatgaaccccaccactggctaaaactggacacatcctgcctggcaacctgattttctaatcacattcctctcatactctttattgtgatggataccactggatttctttttggctgttgtaaggggtgaggggtggattaatgacactgtttcactgtttctctaaaatcacgttcttttgtgatagactgtcagtggttcccccatatctgtccctgccttgctaaatttagcagaatccctgaggacatggcctctgagaatagcagctgcatttcccagactcccttgcagctagcaaggttgtgtgactaagccctggccagtaggcatggaagtgaagactgtaatgtccaagtaatccttggaaagaaaagaacgtgcccttaactaactttgtcctgcttcccagtggctggatgtggaggaggtggagagcagttatgagactgggaaagaacggggcactcaaagagccacacacatctgggcctgggcgacgtggatcctccttaccacccaccaggccagatttacaggagagagaaatccactccactcttccttaagccactgttattctgatctctgttaaggtcgcagaatcaatgcccttactgatacacctaccttataggactgaacctaaaggcatgacatttccatacttgtcacaagcacacactgattctgcccttgtcacttctgtgctcactcttgtggctctatcctcctcctgcccttccgccttccactcctcccttgcacccatcctgcacacatctccctgaaaacacacaggcacatacactcatatacatagacacacatacacacctcaatctagaaagaacttgctttgtacagggctgagatggaggagaaaaaaatgcccccttcagaatgcataccaaggggaaggtgctcggtcactgtgggagcagggaaaggtgcccccactccccgagagccaggggaaggagtggctctgggcagagagggacacatagcactggggtggcaggtccttttgaggtgatgggccggttttgtgagatgaattgtatcccccaaaaagacaggtaccttcaatgtgacctaattgggaaatagagtctttgcagatgatctagttgagatgaggtcattggggtgggccctcacccaatatgactggagtccttatcggaagagggaaattcagacacagatgcatagggaggacaccatgccgtgacagaggcagagggtgcagtgacacagccacaaaccaaggaaggccgaggatggatgcgcatccccatcccaagaagtcgggaagaagccaggaaggctcctctcccacaggtttcagaggaagcacagccctgcttgaattcaaacttttggcctccagaactgtgagtcagtacctgttgttgaagccacccagcttaggatactctggcagcctactgccatacagtattgggatactatagtgagcccatgcagcacctctcacccacccagagatggagctgctctgccttccagcggggcacccggagggctgccccagcagatagagagggcctccgttctgccacctgccttgaaagggtctccagctgccatatgtagcattggagtcctctgcaatgcgacatcctgaaagctcagctgcctgggcattcctgaagagtatggaatatttaaatgaaacatatttttttaaaacctgcgcataagataaaagcagcccgtgtgcatcttgggccatcctcaaatggacagacttggtcttgtgaggttccagtccttgtttcacataataaacactggcatggctcagcccctgagttaccacagtccttgagatgagtggttctttgggttacaaagtcctctgaaagtctagtgagagctgtgatctttgccccacccgaataatgcatatggacaccacaccttgcctgccgtgtccaggattcatgaccagtagcagcccagctatgcctgccacgtctcatggcccctgtgtaagccagacccttcttaggcagttgcatattcccagactgaggcagggcaggtttgcagagagagacccagagtgcacgtgacccgcagtgtgatccctggcacgcactgactttgatattccaggcacacggactggctatttatcaccacttctttttccccactaagattcctgtgccttttaaggcagagggagatccctatggcgttagtcttcccaggccttaaagggcccttgtcttcactcacaaacctcttatctcttcttctccttcctctacattttaaagggggagagggaaaagtaaccgggagacaaattgagccacatattttcagacacttgttaccatattttaaaatctggcttcacatacacagagtctttgctatgcaccatgtactgttctaagcttcttaaaaatagaatctcaattattattttgcaggcaatactctatgcattcattagctaggacaacaatgcatttgcagtagtgagatttcgctaaaaaattaaagccatttactatgaaaaaaaaaaaaaaaaaa

SEQ ID NO: 295591 - DNA, 3392 bp, Artificial Sequence
  derived and/or modified sequence
gtgctggaggccccgttggtctccatttgcaggtgtctcgctcagcgcagctgcccagagccctgtgtcctgagtgatttccagtagattagcagctctgggtctaagcttttaagaaaaaaaaaaaattgcactacccttcagtaggggcagcattcacatctcacacccaggcagaagcagaaacggccaggaatccaccccactttctgggcctgacaaggccacagtttgagaacgttcagcacaggccaagcatcagatggattttgaacatctctggctcctaccatttctgcctccaccatccctttactcactgtgcaagctacaaaagctgaggggacaggaacaaggatgatttctgatggcatatttagaggtgtgcctgggaagtttgagctgcagcagtggaaccttaatgcccaggatgatcctgtctaacaccacagcggtgacgccctttctgaccaagctgtggcaggagacagttcagcagggtggcaacatgtcgggcctggcccgcaggtccccccgcagcagtgacggcaagctggaggccctctacgtcctcatggtactgggattcttcggcttcttcaccctgggcatcatgctgagctacatccgctccaagaagctggagcactcgaacgacccattcaacgtctacatcgagtccgatgcctggcaagagaaggacaaggcctatgtccaggcccgggtcctggagagctacaggtcgtgctatgtcgttgaaaaccatctggccatagaacaacccaacacacaccttcctgagacgaagccttccccatgaaccccaccactggctaaaactggacacatcctgcctggcaacctgattttctaatcacattcctctcatactctttattgtgatggataccactggatttctttttggctgttgtaaggggtgaggggtggattaatgacactgtttcactgtttctctaaaatcacgttcttttgtgatagactgtcagtggttcccccatatctgtccctgccttgctaaatttagcagaatccctgaggacatggcctctgagaatagcagctgcatttcccagactcccttgcagctagcaaggttgtgtgactaagccctggccagtaggcatggaagtgaagactgtaatgtccaagtaatccttggaaagaaaagaacgtgcccttaactaactttgtcctgcttcccagtggctggatgtggaggaggtggagagcagttatgagactgggaaagaacggggcactcaaagagccacacacatctgggcctgggcgacgtggatcctccttaccacccaccaggccagatttacaggagagagaaatccactccactcttccttaagccactgttattctgatctctgttaaggtcgcagaatcaatgcccttactgatacacctaccttataggactgaacctaaaggcatgacatttccatacttgtcacaagcacacactgattctgcccttgtcacttctgtgctcactcttgtggctctatcctcctcctgcccttccgccttccactcctcccttgcacccatcctgcacacatctccctgaaaacacacaggcacatacactcatatacatagacacacatacacacctcaatctagaaagaacttgctttgtacagggctgagatggaggagaaaaaaatgcccccttcagaatgcataccaaggggaaggtgctcggtcactgtgggagcagggaaaggtgcccccactccccgagagccaggggaaggagtggctctgggcagagagggacacatagcactggggtggcaggtccttttgaggtgatgggccggttttgtgagatgaattgtatcccccaaaaagacaggtaccttcaatgtgacctaattgggaaatagagtctttgcagatgatctagttgagatgaggtcattggggtgggccctcacccaatatgactggagtccttatcggaagagggaaattcagacacagatgcatagggaggacaccatgccgtgacagaggcagagggtgcagtgacacagccacaaaccaaggaaggccgaggatggatgcgcatccccatcccaagaagtcgggaagaagccaggaaggctcctctcccacaggtttcagaggaagcacagccctgcttgaattcaaacttttggcctccagaactgtgagtcagtacctgttgttgaagccacccagcttaggatactctggcagcctactgccatacagtattgggatactatagtgagcccatgcagcacctctcacccacccagagatggagctgctctgccttccagcggggcacccggagggctgccccagcagatagagagggcctccgttctgccacctgccttgaaagggtctccagctgccatatgtagcattggagtcctctgcaatgcgacatcctgaaagctcagctgcctgggcattcctgaagagtatggaatatttaaatgaaacatatttttttaaaacctgcgcataagataaaagcagcccgtgtgcatcttgggccatcctcaaatggacagacttggtcttgtgaggttccagtccttgtttcacataataaacactggcatggctcagcccctgagttaccacagtccttgagatgagtggttctttgggttacaaagtcctctgaaagtctagtgagagctgtgatctttgccccacccgaataatgcatatggacaccacaccttgcctgccgtgtccaggattcatgaccagtagcagcccagctatgcctgccacgtctcatggcccctgtgtaagccagacccttcttaggcagttgcatattcccagactgaggcagggcaggtttgcagagagagacccagagtgcacgtgacccgcagtgtgatccctggcacgcactgactttgatattccaggcacacggactggctatttatcaccacttctttttccccactaagattcctgtgccttttaaggcagagggagatccctatggcgttagtcttcccaggccttaaagggcccttgtcttcactcacaaacctcttatctcttcttctccttcctctacattttaaagggggagagggaaaagtaaccgggagacaaattgagccacatattttcagacacttgttaccatattttaaaatctggcttcacatacacagagtctttgctatgcaccatgtactgttctaagcttcttaaaaatagaatctcaattattattttgcaggcaatactctatgcattcattagctaggacaacaatgcatttgcagtagtgagatttcgctaaaaaattaaagccatttactatgaaaaaaaaaaaaaaaaaa

SEQ ID NO: 295592 - DNA, 3338 bp, Artificial Sequence
  derived and/or modified sequence
caaccaccaaacagacaagcccttcggcctgtcctggagggcgttgaatggcatggcctggagctcaaccaggagaaccgtgctcaggaggaagagaccagaaggataactcaaaaagttctgagaagttcctaagaccacctgaagagaaggagcctgctgccaatggtgtggacaccgcagtgtgcttgaggagacttcagaaacgagaactggaaaaatccctctgctttctctggccagtttcacacaatcatcaggtgagccgaggatccattggaggaaggcattatctgtatccagaggaaatagccaaggatattcagaggtgtgcctgggaagtttgagctgcagcagtggaaccttaatgcccaggatgatcctgtctaacaccacagcggtgacgccctttctgaccaagctgtggcaggagacagttcagcagggtggcaacatgtcgggcctggcccgcaggtccccccgcagcagtgacggcaagctggaggccctctacgtcctcatggtactgggattcttcggcttcttcaccctgggcatcatgctgagctacatccgctccaagaagctggagcactcgaacgacccattcaacgtctacatcgagtccgatgcctggcaagagaaggacaaggcctatgtccaggcccgggtcctggagagctacaggtcgtgctatgtcgttgaaaaccatctggccatagaacaacccaacacacaccttcctgagacgaagccttccccatgaaccccaccactggctaaaactggacacatcctgcctggcaacctgattttctaatcacattcctctcatactctttattgtgatggataccactggatttctttttggctgttgtaaggggtgaggggtggattaatgacactgtttcactgtttctctaaaatcacgttcttttgtgatagactgtcagtggttcccccatatctgtccctgccttgctaaatttagcagaatccctgaggacatggcctctgagaatagcagctgcatttcccagactcccttgcagctagcaaggttgtgtgactaagccctggccagtaggcatggaagtgaagactgtaatgtccaagtaatccttggaaagaaaagaacgtgcccttaactaactttgtcctgcttcccagtggctggatgtggaggaggtggagagcagttatgagactgggaaagaacggggcactcaaagagccacacacatctgggcctgggcgacgtggatcctccttaccacccaccaggccagatttacaggagagagaaatccactccactcttccttaagccactgttattctgatctctgttaaggtcgcagaatcaatgcccttactgatacacctaccttataggactgaacctaaaggcatgacatttccatacttgtcacaagcacacactgattctgcccttgtcacttctgtgctcactcttgtggctctatcctcctcctgcccttccgccttccactcctcccttgcacccatcctgcacacatctccctgaaaacacacaggcacatacactcatatacatagacacacatacacacctcaatctagaaagaacttgctttgtacagggctgagatggaggagaaaaaaatgcccccttcagaatgcataccaaggggaaggtgctcggtcactgtgggagcagggaaaggtgcccccactccccgagagccaggggaaggagtggctctgggcagagagggacacatagcactggggtggcaggtccttttgaggtgatgggccggttttgtgagatgaattgtatcccccaaaaagacaggtaccttcaatgtgacctaattgggaaatagagtctttgcagatgatctagttgagatgaggtcattggggtgggccctcacccaatatgactggagtccttatcggaagagggaaattcagacacagatgcatagggaggacaccatgccgtgacagaggcagagggtgcagtgacacagccacaaaccaaggaaggccgaggatggatgcgcatccccatcccaagaagtcgggaagaagccaggaaggctcctctcccacaggtttcagaggaagcacagccctgcttgaattcaaacttttggcctccagaactgtgagtcagtacctgttgttgaagccacccagcttaggatactctggcagcctactgccatacagtattgggatactatagtgagcccatgcagcacctctcacccacccagagatggagctgctctgccttccagcggggcacccggagggctgccccagcagatagagagggcctccgttctgccacctgccttgaaagggtctccagctgccatatgtagcattggagtcctctgcaatgcgacatcctgaaagctcagctgcctgggcattcctgaagagtatggaatatttaaatgaaacatatttttttaaaacctgcgcataagataaaagcagcccgtgtgcatcttgggccatcctcaaatggacagacttggtcttgtgaggttccagtccttgtttcacataataaacactggcatggctcagcccctgagttaccacagtccttgagatgagtggttctttgggttacaaagtcctctgaaagtctagtgagagctgtgatctttgccccacccgaataatgcatatggacaccacaccttgcctgccgtgtccaggattcatgaccagtagcagcccagctatgcctgccacgtctcatggcccctgtgtaagccagacccttcttaggcagttgcatattcccagactgaggcagggcaggtttgcagagagagacccagagtgcacgtgacccgcagtgtgatccctggcacgcactgactttgatattccaggcacacggactggctatttatcaccacttctttttccccactaagattcctgtgccttttaaggcagagggagatccctatggcgttagtcttcccaggccttaaagggcccttgtcttcactcacaaacctcttatctcttcttctccttcctctacattttaaagggggagagggaaaagtaaccgggagacaaattgagccacatattttcagacacttgttaccatattttaaaatctggcttcacatacacagagtctttgctatgcaccatgtactgttctaagcttcttaaaaatagaatctcaattattattttgcaggcaatactctatgcattcattagctaggacaacaatgcatttgcagtagtgagatttcgctaaaaaattaaagccatttactatgaaaaaaaaaaaaaaaaaa

SEQ ID NO: 295593 - DNA, 3320 bp, Artificial Sequence
  derived and/or modified sequence
caaccaccaaacagacaagcccttcggcctgtcctggagggcgttgaatggcatggcctggagctcaaccaggagaaccgtgctcaggaggaagagaccagaaggataactcaaaaagttctgagaagttcctaagaccacctgaagagaaggagcctgctgccaatggtgtggacaccgcagtgtgcttgaggagacttcagaaacgagaactggaaaaatccctctgctttctctggccagtttcacacaatcatcaggtgagccgaggatccattggaggaaggcattatctgtatccagaggaaatagccaaggatattcagaggtgtgcctgggaagtttgagctgcagcagtggaaccttaatgcccaggatgatcctgtctaacaccacagcggtgacgccctttctgaccaagctgtggcaggagacagttcagcagggtggcaacatgtcgggcctggcccgcaggtccccccgcagcagtgacggcaagctggaggccctctacgtcctcatggtactgggattcttcggcttcttcaccctgggcatcatgctgagctacatccgctccaagaagctggagcactcgaacgacccattcaacgtctacatcgagtccgatgcctggcaagagaaggacaaggcctatgtccaggcccgggtcctggagagctacaggtcgtgctatgtcgttgaaaaccatctggccatagaacaacccaacacacaccttcctgagacgaagccttccccatgaaccccaccactggctaaaactggacacatcctgcctggcaacctgattttctaatcacattcctctcatactctttattgtgatggataccactggatttctttttggctgttgtaaggggtgaggggtggattaatgacactgtttcactgtttctctaaaatcacgttcttttgtgatagactgtcagtggttcccccatatctgtccctgccttgctaaatttagcagaatccctgaggacatggcctctgagaatagcagctgcatttcccagactcccttgcagctagcaaggttgtgtgactaagccctggccagtaggcatggaagtgaagactgtaatgtccaagtaatccttggaaagaaaagaacgtgcccttaactaactttgtcctgcttcccagtggctggatgtggaggaggtggagagcagttatgagactgggaaagaacggggcactcaaagagccacacacatctgggcctgggcgacgtggatcctccttaccacccaccaggccagatttacaggagagagaaatccactccactcttccttaagccactgttattctgatctctgttaaggtcgcagaatcaatgcccttactgatacacctaccttataggactgaacctaaaggcatgacatttccatacttgtcacaagcacacactgattctgcccttgtcacttctgtgctcactcttgtggctctatcctcctcctgcccttccgccttccactcctcccttgcacccatcctgcacacatctccctgaaaacacacaggcacatacactcatatacatagacacacatacacacctcaatctagaaagaacttgctttgtacagggctgagatggaggagaaaaaaatgcccccttcagaatgcataccaaggggaaggtgctcggtcactgtgggagcagggaaaggtgcccccactccccgagagccaggggaaggagtggctctgggcagagagggacacatagcactggggtggcaggtccttttgaggtgatgggccggttttgtgagatgaattgtatcccccaaaaagacaggtaccttcaatgtgacctaattgggaaatagagtctttgcagatgatctagttgagatgaggtcattggggtgggccctcacccaatatgactggagtccttatcggaagagggaaattcagacacagatgcatagggaggacaccatgccgtgacagaggcagagggtgcagtgacacagccacaaaccaaggaaggccgaggatggatgcgcatccccatcccaagaagtcgggaagaagccaggaaggctcctctcccacaggtttcagaggaagcacagccctgcttgaattcaaacttttggcctccagaactgtgagtcagtacctgttgttgaagccacccagcttaggatactctggcagcctactgccatacagtattgggatactatagtgagcccatgcagcacctctcacccacccagagatggagctgctctgccttccagcggggcacccggagggctgccccagcagatagagagggcctccgttctgccacctgccttgaaagggtctccagctgccatatgtagcattggagtcctctgcaatgcgacatcctgaaagctcagctgcctgggcattcctgaagagtatggaatatttaaatgaaacatatttttttaaaacctgcgcataagataaaagcagcccgtgtgcatcttgggccatcctcaaatggacagacttggtcttgtgaggttccagtccttgtttcacataataaacactggcatggctcagcccctgagttaccacagtccttgagatgagtggttctttgggttacaaagtcctctgaaagtctagtgagagctgtgatctttgccccacccgaataatgcatatggacaccacaccttgcctgccgtgtccaggattcatgaccagtagcagcccagctatgcctgccacgtctcatggcccctgtgtaagccagacccttcttaggcagttgcatattcccagactgaggcagggcaggtttgcagagagagacccagagtgcacgtgacccgcagtgtgatccctggcacgcactgactttgatattccaggcacacggactggctatttatcaccacttctttttccccactaagattcctgtgccttttaaggcagagggagatccctatggcgttagtcttcccaggccttaaagggcccttgtcttcactcacaaacctcttatctcttcttctccttcctctacattttaaagggggagagggaaaagtaaccgggagacaaattgagccacatattttcagacacttgttaccatattttaaaatctggcttcacatacacagagtctttgctatgcaccatgtactgttctaagcttcttaaaaatagaatctcaattattattttgcaggcaatactctatgcattcattagctaggacaacaatgcatttgcagtagtgagatttcgctaaaaaattaaagccatttactatg

SEQ ID NO: 295594 - DNA, 666 bp, Artificial Sequence
  derived and/or modified sequence
gagaaccgtgctcaggaggaagagaccagaaggataactcaaaaagttctgagaagttcctaagaccacctgaagagaaggagcctgctgccaatggtgtggacaccgcagtgtgcttgaggagacttcagaaacgagaactgtttcacacaatcatcaggtgagccgaggatccattggaggaaggcattatctgtatccagaggaaatagccaaggatattcagaggtgtgcctgggaagtttgagctgcagcagtggaaccttaatgcccaggatgatcctgtctaacaccacagcggtgacgccctttctgaccaagctgtggcaggagacagttcagcagggtggcaacatgtcgggcctggcccgcaggtccccccgcagcagtgacggcaagctggaggccctctacgtcctcatggtactgggattcttcggcttcttcaccctgggcatcatgctgagctacatccgctccaagaagctggagcactcgaacgacccattcaacgtctacatcgagtccgatgcctggcaagagaaggacaaggcctatgtccaggcccgggtcctggagagctacaggtcgtgctatgtcgttgaaaaccatctggccatagaacaacccaacacacaccttcctgagacgaagccttccccatga

SEQ ID NO: 295595 - DNA, 1204 bp, Artificial Sequence
  derived and/or modified sequence
gaaatcacaaattacaaaacgtcagagtactttctggaaataagccttcctctccagggaacaacgcatttgacacttgactgggatacactaccggatcctccgagggtgatggttctcaagaaggcagaagcaatggtgaccaatagacctccttaaaggctgagccgctgggcaccttcctactcctctcgaccgtgctaggatgactgcagcagagtccccgagtcctttgatgcaagggtctagcaaccaccaaacagacaagcccttcggcctgtcctggagggcgttgaatggcatggcctggagctcaaccaggagaaccgtgctcaggaggaagagaccagaaggataactcaaaaagttctgagaagttcctaagaccacctgaagagaaggagcctgctgccaatggtgtggacaccgcagtgtgcttgaggagacttcagaaacgagaactggaaaaatccctctgctttctctggccagtttcacacaatcatcaggtgagccgaggatccattggaggaaggcattatctgtatccagaggaaatagccaaggatattcagaggtgtgcctgggaagtttgagctgcagcagtggaaccttaatgcccaggatgatcctgtctaacaccacagcggtgacgccctttctgaccaagctgtggcaggagacagttcagcagggtggcaacatgtcgggcctggcccgcaggtccccccgcagcagtgacggcaagctggaggccctctacgtcctcatggtactgggattcttcggcttcttcaccctgggcatcatgctgagctacatccgctccaagaagctggagcactcgaacgacccattcaacgtctacatcgagtccgatgcctggcaagagaaggacaaggcctatgtccaggcccgggtcctggagagctacaggtcgtgctatgtcgttgaaaaccatctggccatagaacaacccaacacacaccttcctgagacgaagccttccccatgaaccccaccactggctaaaactggacacatcctgcctggcaacctgattttctaatcacattcctctcatactctttattgtgatggataccactggatttctttttggctgttgtaaggggtgaggggtggattaatgacactgtttcactgtttctctaaaatcacgttcttttgtgatagactgtca

SEQ ID NO: 295596 - DNA, 3154 bp, Artificial Sequence
  derived and/or modified sequence
gggctgtctgtggcctcagcgctcggcaggcgcgcactcagctccacacccggctctctcggcatctcagacccggtttcacacaatcatcaggtgagccgaggatccattggaggaaggcattatctgtatccagaggaaatagccaaggatattcagaggtgtgcctgggaagtttgagctgcagcagtggaaccttaatgcccaggatgatcctgtctaacaccacagcggtgacgccctttctgaccaagctgtggcaggagacagttcagcagggtggcaacatgtcgggcctggcccgcaggtccccccgcagcagtgacggcaagctggaggccctctacgtcctcatggtactgggattcttcggcttcttcaccctgggcatcatgctgagctacatccgctccaagaagctggagcactcgaacgacccattcaacgtctacatcgagtccgatgcctggcaagagaaggacaaggcctatgtccaggcccgggtcctggagagctacaggtcgtgctatgtcgttgaaaaccatctggccatagaacaacccaacacacaccttcctgagacgaagccttccccatgaaccccaccactggctaaaactggacacatcctgcctggcaacctgattttctaatcacattcctctcatactctttattgtgatggataccactggatttctttttggctgttgtaaggggtgaggggtggattaatgacactgtttcactgtttctctaaaatcacgttcttttgtgatagactgtcagtggttcccccatatctgtccctgccttgctaaatttagcagaatccctgaggacatggcctctgagaatagcagctgcatttcccagactcccttgcagctagcaaggttgtgtgactaagccctggccagtaggcatggaagtgaagactgtaatgtccaagtaatccttggaaagaaaagaacgtgcccttaactaactttgtcctgcttcccagtggctggatgtggaggaggtggagagcagttatgagactgggaaagaacggggcactcaaagagccacacacatctgggcctgggcgacgtggatcctccttaccacccaccaggccagatttacaggagagagaaatccactccactcttccttaagccactgttattctgatctctgttaaggtcgcagaatcaatgcccttactgatacacctaccttataggactgaacctaaaggcatgacatttccatacttgtcacaagcacacactgattctgcccttgtcacttctgtgctcactcttgtggctctatcctcctcctgcccttccgccttccactcctcccttgcacccatcctgcacacatctccctgaaaacacacaggcacatacactcatatacatagacacacatacacacctcaatctagaaagaacttgctttgtacagggctgagatggaggagaaaaaaatgcccccttcagaatgcataccaaggggaaggtgctcggtcactgtgggagcagggaaaggtgcccccactccccgagagccaggggaaggagtggctctgggcagagagggacacatagcactggggtggcaggtccttttgaggtgatgggccggttttgtgagatgaattgtatcccccaaaaagacaggtaccttcaatgtgacctaattgggaaatagagtctttgcagatgatctagttgagatgaggtcattggggtgggccctcacccaatatgactggagtccttatcggaagagggaaattcagacacagatgcatagggaggacaccatgccgtgacagaggcagagggtgcagtgacacagccacaaaccaaggaaggccgaggatggatgcgcatccccatcccaagaagtcgggaagaagccaggaaggctcctctcccacaggtttcagaggaagcacagccctgcttgaattcaaacttttggcctccagaactgtgagtcagtacctgttgttgaagccacccagcttaggatactctggcagcctactgccatacagtattgggatactatagtgagcccatgcagcacctctcacccacccagagatggagctgctctgccttccagcggggcacccggagggctgccccagcagatagagagggcctccgttctgccacctgccttgaaagggtctccagctgccatatgtagcattggagtcctctgcaatgcgacatcctgaaagctcagctgcctgggcattcctgaagagtatggaatatttaaatgaaacatatttttttaaaacctgcgcataagataaaagcagcccgtgtgcatcttgggccatcctcaaatggacagacttggtcttgtgaggttccagtccttgtttcacataataaacactggcatggctcagcccctgagttaccacagtccttgagatgagtggttctttgggttacaaagtcctctgaaagtctagtgagagctgtgatctttgccccacccgaataatgcatatggacaccacaccttgcctgccgtgtccaggattcatgaccagtagcagcccagctatgcctgccacgtctcatggcccctgtgtaagccagacccttcttaggcagttgcatattcccagactgaggcagggcaggtttgcagagagagacccagagtgcacgtgacccgcagtgtgatccctggcacgcactgactttgatattccaggcacacggactggctatttatcaccacttctttttccccactaagattcctgtgccttttaaggcagagggagatccctatggcgttagtcttcccaggccttaaagggcccttgtcttcactcacaaacctcttatctcttcttctccttcctctacattttaaagggggagagggaaaagtaaccgggagacaaattgagccacatattttcagacacttgttaccatattttaaaatctggcttcacatacacagagtctttgctatgcaccatgtactgttctaagcttcttaaaaatagaatctcaattattattttgcaggcaatactctatgcattcattagctaggacaacaatgcatttgcagtagtgagatttcgctaaaaaattaaagccatttactatga

SEQ ID NO: 295597 - DNA, 796 bp, Artificial Sequence
  derived and/or modified sequence
atttgcaggtgtctcgctcagcgcagctgcccagagccctgtgtcctgagtgatttccagtagattagcagctctgggtctaagcttttaagaaaaaaaaaaaattgcactacccttcagtaggggcagcattcacatctcacacccaggcagaagcagaaacggccaggaatccaccccactttctgggcctgacaaggccacagtttgagaacgttcagcacaggccaagcatcagatggattttgaacatctctggctcctaccatttctgcctccaccatccctttactcactgtgcaagctacaaaagctgaggggacaggaacaaggatgatttctgatggcatatttagaggtgtgcctgggaagtttgagctgcagcagtggaaccttaatgcccaggatgatcctgtctaacaccacagcggtgacgccctttctgaccaagctgtggcaggagacagttcagcagggtggcaacatgtcgggcctggcccgcaggtccccccgcagcagtgacggcaagctggaggccctctacgtcctcatggtactgggattcttcggcttcttcaccctgggcatcatgctgagctacatccgctccaagaagctggagcactcgaacgacccattcaacgtctacatcgagtccgatgcctggcaagagaaggacaaggcctatgtccaggcccgggtcctggagagctacaggtcgtgctatgtcgttgaaaaccatctggccatagaacaacccaacacacaccttcctgagacgaagccttccccatga

SEQ ID NO: 295598 - DNA, 3181 bp, Artificial Sequence
  derived and/or modified sequence
gggctgtctgtggcctcagcgctcggcaggcgcgcactcagctccacacccggctctctcggcatctcagacccgggaaaaatccctctgctttctctggccagtttcacacaatcatcaggtgagccgaggatccattggaggaaggcattatctgtatccagaggaaatagccaaggatattcagaggtgtgcctgggaagtttgagctgcagcagtggaaccttaatgcccaggatgatcctgtctaacaccacagcggtgacgccctttctgaccaagctgtggcaggagacagttcagcagggtggcaacatgtcgggcctggcccgcaggtccccccgcagcagtgacggcaagctggaggccctctacgtcctcatggtactgggattcttcggcttcttcaccctgggcatcatgctgagctacatccgctccaagaagctggagcactcgaacgacccattcaacgtctacatcgagtccgatgcctggcaagagaaggacaaggcctatgtccaggcccgggtcctggagagctacaggtcgtgctatgtcgttgaaaaccatctggccatagaacaacccaacacacaccttcctgagacgaagccttccccatgaaccccaccactggctaaaactggacacatcctgcctggcaacctgattttctaatcacattcctctcatactctttattgtgatggataccactggatttctttttggctgttgtaaggggtgaggggtggattaatgacactgtttcactgtttctctaaaatcacgttcttttgtgatagactgtcagtggttcccccatatctgtccctgccttgctaaatttagcagaatccctgaggacatggcctctgagaatagcagctgcatttcccagactcccttgcagctagcaaggttgtgtgactaagccctggccagtaggcatggaagtgaagactgtaatgtccaagtaatccttggaaagaaaagaacgtgcccttaactaactttgtcctgcttcccagtggctggatgtggaggaggtggagagcagttatgagactgggaaagaacggggcactcaaagagccacacacatctgggcctgggcgacgtggatcctccttaccacccaccaggccagatttacaggagagagaaatccactccactcttccttaagccactgttattctgatctctgttaaggtcgcagaatcaatgcccttactgatacacctaccttataggactgaacctaaaggcatgacatttccatacttgtcacaagcacacactgattctgcccttgtcacttctgtgctcactcttgtggctctatcctcctcctgcccttccgccttccactcctcccttgcacccatcctgcacacatctccctgaaaacacacaggcacatacactcatatacatagacacacatacacacctcaatctagaaagaacttgctttgtacagggctgagatggaggagaaaaaaatgcccccttcagaatgcataccaaggggaaggtgctcggtcactgtgggagcagggaaaggtgcccccactccccgagagccaggggaaggagtggctctgggcagagagggacacatagcactggggtggcaggtccttttgaggtgatgggccggttttgtgagatgaattgtatcccccaaaaagacaggtaccttcaatgtgacctaattgggaaatagagtctttgcagatgatctagttgagatgaggtcattggggtgggccctcacccaatatgactggagtccttatcggaagagggaaattcagacacagatgcatagggaggacaccatgccgtgacagaggcagagggtgcagtgacacagccacaaaccaaggaaggccgaggatggatgcgcatccccatcccaagaagtcgggaagaagccaggaaggctcctctcccacaggtttcagaggaagcacagccctgcttgaattcaaacttttggcctccagaactgtgagtcagtacctgttgttgaagccacccagcttaggatactctggcagcctactgccatacagtattgggatactatagtgagcccatgcagcacctctcacccacccagagatggagctgctctgccttccagcggggcacccggagggctgccccagcagatagagagggcctccgttctgccacctgccttgaaagggtctccagctgccatatgtagcattggagtcctctgcaatgcgacatcctgaaagctcagctgcctgggcattcctgaagagtatggaatatttaaatgaaacatatttttttaaaacctgcgcataagataaaagcagcccgtgtgcatcttgggccatcctcaaatggacagacttggtcttgtgaggttccagtccttgtttcacataataaacactggcatggctcagcccctgagttaccacagtccttgagatgagtggttctttgggttacaaagtcctctgaaagtctagtgagagctgtgatctttgccccacccgaataatgcatatggacaccacaccttgcctgccgtgtccaggattcatgaccagtagcagcccagctatgcctgccacgtctcatggcccctgtgtaagccagacccttcttaggcagttgcatattcccagactgaggcagggcaggtttgcagagagagacccagagtgcacgtgacccgcagtgtgatccctggcacgcactgactttgatattccaggcacacggactggctatttatcaccacttctttttccccactaagattcctgtgccttttaaggcagagggagatccctatggcgttagtcttcccaggccttaaagggcccttgtcttcactcacaaacctcttatctcttcttctccttcctctacattttaaagggggagagggaaaagtaaccgggagacaaattgagccacatattttcagacacttgttaccatattttaaaatctggcttcacatacacagagtctttgctatgcaccatgtactgttctaagcttcttaaaaatagaatctcaattattattttgcaggcaatactctatgcattcattagctaggacaacaatgcatttgcagtagtgagatttcgctaaaaaattaaagccatttactatg

SEQ ID NO: 295599 - DNA, 6882 bp, Artificial Sequence
  derived and/or modified sequence
gcggcggcggcggcggcggcggcagcggcggccaagcggccaggttggcggccggggctccgggccgcgcgaggccacggccacgccgcgccgctgcgcacaaccaacgaggcagagcgccgcccggcgcgagactgcggccgaagcgtggggcgcgcgtgcggaggaccaggcgcggcgcggctgcggctgagagtggagcctttcaggctggcatggagagcttaaggggcaactgaaggagacacactggccaagcgcggagttctgcttacttcagtcctgctgagatactctctcagtccgctcgcaccgaaggaagctgccttgggatcagagcagacataaagctagaaaaatttcaagacagaaacagtctccgccagtcaagaaaccctcaaaagtattttgccatggatatagaagatgaagaaaacatgagttccagcagcactgatgtgaaggaaaaccgcaatctggacaacgtgtcccccaaggatggcagcacacctgggcctggcgagggctctcagctctccaatgggggtggtggtggccccggcagaaagcggcccctggaggagggcagcaatggccactccaagtaccgcctgaagaaaaggaggaaaacaccagggcccgtcctccccaagaacgccctgatgcagctgaatgagatcaagcctggtttgcagtacacactcctgtcccagactgggcccgtgcacgcgcctttgtttgtcatgtctgtggaggtgaatggccaggtttttgagggctctggtcccacaaagaaaaaggcaaaactccatgctgctgagaaggccttgaggtctttcgttcagtttcctaatgcctctgaggcccacctggccatggggaggaccctgtctgtcaacacggacttcacatctgaccaggccgacttccctgacacgctcttcaatggttttgaaactcctgacaaggcggagcctcccttttacgtgggctccaatggggatgactccttcagttccagcggggacctcagcttgtctgcttccccggtgcctgccagcctagcccagcctcctctccctgtcttaccaccattcccacccccgagtgggaagaatcccgtgatgatcttgaacgaactgcgcccaggactcaagtatgacttcctctccgagagcggggagagccatgccaagagcttcgtcatgtctgtggtcgtggatggtcagttctttgaaggctcggggagaaacaagaagcttgccaaggcccgggctgcgcagtctgccctggccgccatttttaacttgcacttggatcagacgccatctcgccagcctattcccagtgagggtcttcagctgcatttaccgcaggttttagctgacgctgtctcacgcctggtcctgggtaagtttggtgacctgaccgacaacttctcctcccctcacgctcgcagaaaagtgctggctggagtcgtcatgacaacaggcacagatgttaaagatgccaaggtgataagtgtttctacaggaacaaaatgtattaatggtgaatacatgagtgatcgtggccttgcattaaatgactgccatgcagaaataatatctcggagatccttgctcagatttctttatacacaacttgagctttacttaaataacaaagatgatcaaaaaagatccatctttcagaaatcagagcgaggggggtttaggctgaaggagaatgtccagtttcatctgtacatcagcacctctccctgtggagatgccagaatcttctcaccacatgagccaatcctggaagaaccagcagatagacacccaaatcgtaaagcaagaggacagctacggaccaaaatagagtctggtgaggggacgattccagtgcgctccaatgcgagcatccaaacgtgggacggggtgctgcaaggggagcggctgctcaccatgtcctgcagtgacaagattgcacgctggaacgtggtgggcatccagggatccctgctcagcattttcgtggagcccatttacttctcgagcatcatcctgggcagcctttaccacggggaccacctttccagggccatgtaccagcggatctccaacatagaggacctgccacctctctacaccctcaacaagcctttgctcagtggcatcagcaatgcagaagcacggcagccagggaaggcccccaacttcagtgtcaactggacggtaggcgactccgctattgaggtcatcaacgccacgactgggaaggatgagctgggccgcgcgtcccgcctgtgtaagcacgcgttgtactgtcgctggatgcgtgtgcacggcaaggttccctcccacttactacgctccaagattaccaagcccaacgtgtaccatgagtccaagctggcggcaaaggagtaccaggccgccaaggcgcgtctgttcacagccttcatcaaggcggggctgggggcctgggtggagaagcccaccgagcaggaccagttctcactcacgccctgacccgggcagacatgatggggggtgcagggggctgtgggcatccagcgtcatcctccagaacctcacatctgaactgggggcaggtgcataccttggggagggagtagggggacacgggggaccaccaggtgtccacggttgtccccagcatctcacatcagacctggggcaggtgcgcagtgtggggaggggatggggtgcgtcagggcccagcatcgccgcctggcatctctctgccgcagcatttccccttctgaaccgtccagtgactgctttcaatctcggtttacgtttagaaattgagttctactgagtagggcttccttaagtttaggaaaatagaaattactttgtgtgaaattcttgaataaataatttattcagagctaggaatgtggtttataaaataggaagtaattgtgtcaggtcacttttatgccacattattttaattgcaaaaaagcatctatatatggaggagggtgggaaaatagaggtaggaaatagtagcctaaaggaaatcgccacacgtctgtctaaacttaggtctcttttctccgtaggtacctccctgggtagttccacacactaggttgtaacagtctctccctgaggagcagactcccagcatggtgtagcgtggccctgtcatgcacatggggtcccgcagcagtgactgtgtgtcctgcagaggcgtgacccaggcccctgtagccctcagcctcctctagaagcttctgtactccttgtaggatcagatcatggaaaacttttctcagtttacttctaagtaatcacagataatacatggccagtaatcccaggctggccattcattcaggttttttaaaggatatttaacttttatggactagaaggaatcacgagggctactgcacaatacatggcctaagttccctctgttccttcctctgaatcgaatggatgtgggtgaccgcccgaaggccttcacaggatggaagtagaatgatttcagtagatactcattcttggaaaatgccatagttttaaattattgtttccagctttatcaaagacatgtttgaaaaataaaaagcatccaagtgagagctggtgagaccacgtgctgctggcgtagtgtaggccagacattgacagtcctgacgggagctcagggctgcccagcgcccagcgtgcacgggacggccccacgacagagggagtcagcccgggaggtcaggagcgcggcgggcgagggccctgtgtggaccacctccaccaagctcagagatttgcaccaggtgccttgttgcctccgctcaggatgaaagaggagctgagagaagtgctctgcctgccagtgcagtgcccagctccaaggctctagagggtgttcaggtgggtctcctggggccatggggagagattggtgcagaccttaccccacagcatacacctgccacagcgaaatccagggtgttggcacctgtgtgtccgtgatgagcctaggaaaccagagcaggggcagaggggcgtcatcctcccaccggacgctgggagctcagaccccaaaactgaaacaccgtggcttcggcggggggtgtgcctcctgatgtcaggagccccatccacgtgtgtccacacagatctcgtcgcagcacggcaggaaggggtgctgcttagggctcattgttggggacatgaccgggttcagcggctagaacatctgccccacagcagcctcctcctccaccgaagagggtagttgtctccctgaagcagtcacagcaggcgtctctgccgctccgtcaccacagtggggttttgttcaggcagatcgcgctggggttctgcacctgcagaaggagaggggtctgttgtcgctggctttcccccaagcaggctcttgcacactctagaaaaaacaccttgtaagtctgtgcatttttattgtcttgataaattgtatttttttctaatggggattgggagatggacttcgtttttaaaaatatgtggattttggttaccaagtttagtgttaatatattccatatacatacaaaactacccggtatgtctggcttttcccttctgtcaggtaatagctaaagtcagcatgattgctccctgtaccaccccaaataagtgagtgcctcaccttgtggggcctgagcagctaccttgagaccatgtgaggtggcacctttccggggtggactcgtgcggccttgaggacaggcacagggcaccctatcccaagccgtccaggcaggaggaaggcagccaaggcaactgggttctgggagccctgggtggggcagctgtggggaggaactgggttcggggagccctgggcggggcggctgttggggggaactgggttcggggtgccctgggcagggggctactggggggcggctgtgaggaggagttgggttcagggagccctgggcggggtggctgtcagggggaactgggttccgggagccctgggccggggcagggggcggctgtaggaaggaactggtttcggggagccctgggcggggcggctgtggggaggaaggtgacgtgcaggggaccagaggctctgcactgctcctaggacagctcatctgtaatcagaaaaaaaataaacaaaatacagaacgctgactcctccgtgagacagatcggggaccttagcactttaatccctcccttctgagcgctcggtgtgcacttttagactatagctgtttcattgacgtgtcactctccatccagtgtccttgatgtggcttttagagacttagcagaaaattcgacacaagcaggaacttgattttttaagaaaaaatattacattttgaggacattttgacaagtaggggaagagagggcttctgttgttttgttttgttttgttttgttaactaaacctgaagtattaattccacaaagacactgtccctcaggaccactcaggtacagctctgccagggacagagtcctgctagtgggaggtctcaggtggggcggtgtgttctgtgccatgaggcagcgacaggtccagatggatgtcgtcaccaccttcctcagctctcatcacctggtcgtacgccaggcccacctcttcccagcaagggacgccaaagaactgcagtttttattctgagtcttaatttaacttttcatcatcttttcctattttggagaattttttgtaattaaaagcaattattttaaaatgtgcaagccagtatctcacaaggcatggatttctgtggaatttatttttattcaaataaccatatttatctccaggctgtggaatcgccactttctttgtgaagacagtgtctctccttgtaatctcacacaggtacactgaggaggggacggctccgtcttcacattgtgcacagatctgaggatgggattagcgaagctgtggagactgcacatccggacctgcccatgtctcaaaacaaacacatgtacagtggctctttttccttctcaaacactttaccccagaagcaggtggtctgccccaggcataaagaaggaaaattggccatctttcccacctctaaattctgtaaaattatagacttgctcaaaagattcctttttatcatccccacgctgtgtaagtggaaagggcattgtgttccgtgtgtgtccagtttacagcgtctctgccccctagcgtgttttgtgacaatctccctgggtgaggagtgggtgcacccagccccgaggccagtggttgctcggggccttccgtgtgagttctagtgttcacttgatgccggggaatagaattagagaaaactctgacctgccgggttccagggactggtggaggtggatggcaggtccgactcgaccatgacttagttgtaagggtgtgtcggctttttcagtctcatgtgaaaatcctcctgtctctggcagcactgtctgcactttcttgtttactgtttgaagggacgagtaccaagccacaagaacacttcttttggccacagcataagctgatggtatgtaaggaaccgatgggccattaaacatgaactgaacggttaaaagcacagtctatggaacgctaatggagtcagcccctaaagctgtttgctttttcaggctttggattacatgcttttaatttgattttagaatctggacactttctatgaatgtaattcggctgagaaacatgttgctgagatgcaatcctcagtgttctctgtatgtaaatctgtgtatacaccacacgttacaactgcatgagcttcctctcgcacaagaccagctggaactgagcatgagacgctgtcaaatacagacaaaggatttgagatgttctcaataaaaagaaaatgtttcacta

SEQ ID NO: 295600 - DNA, 6604 bp, Artificial Sequence
  derived and/or modified sequence
caaaagtattttgccatggatatagaagatgaagaaaacatgagttccagcagcactgatgtgaaggaaaaccgcaatctggacaacgtgtcccccaaggatggcagcacacctgggcctggcgagggctctcagctctccaatgggggtggtggtggccccggcagaaagcggcccctggaggagggcagcaatggccactccaagtaccgcctgaagaaaaggaggaaaacaccagggcccgtcctccccaagaacgccctgatgcagctgaatgagatcaagcctggtttgcagtacacactcctgtcccagactgggcccgtgcacgcgcctttgtttgtcatgtctgtggaggtgaatggccaggtttttgagggctctggtcccacaaagaaaaaggcaaaactccatgctgctgagaaggccttgaggtctttcgttcagtttcctaatgcctctgaggcccacctggccatggggaggaccctgtctgtcaacacggacttcacatctgaccaggccgacttccctgacacgctcttcaatggttttgaaactcctgacaaggcggagcctcccttttacgtgggctccaatggggatgactccttcagttccagcggggacctcagcttgtctgcttccccggtgcctgccagcctagcccagcctcctctccctgtcttaccaccattcccacccccgagtgggaagaatcccgtgatgatcttgaacgaactgcgcccaggactcaagtatgacttcctctccgagagcggggagagccatgccaagagcttcgtcatgtctgtggtcgtggatggtcagttctttgaaggctcggggagaaacaagaagcttgccaaggcccgggctgcgcagtctgccctggccgccatttttaacttgcacttggatcagacgccatctcgccagcctattcccagtgagggtcttcagctgcatttaccgcaggttttagctgacgctgtctcacgcctggtcctgggtaagtttggtgacctgaccgacaacttctcctcccctcacgctcgcagaaaagtgctggctggagtcgtcatgacaacaggcacagatgttaaagatgccaaggtgataagtgtttctacaggaacaaaatgtattaatggtgaatacatgagtgatcgtggccttgcattaaatgactgccatgcagaaataatatctcggagatccttgctcagatttctttatacacaacttgagctttacttaaataacaaagatgatcaaaaaagatccatctttcagaaatcagagcgaggggggtttaggctgaaggagaatgtccagtttcatctgtacatcagcacctctccctgtggagatgccagaatcttctcaccacatgagccaatcctggaagggtctcgctcttacacccaggctggagtgcagtggtgcaatcatggctcactgcagcctcgacctcctgggctcttaagcgatccttccacctcaaccttccaaggagctgggactacagaaccagcagatagacacccaaatcgtaaagcaagaggacagctacggaccaaaatagagtctggtgaggggacgattccagtgcgctccaatgcgagcatccaaacgtgggacggggtgctgcaaggggagcggctgctcaccatgtcctgcagtgacaagattgcacgctggaacgtggtgggcatccagggatccctgctcagcattttcgtggagcccatttacttctcgagcatcatcctgggcagcctttaccacggggaccacctttccagggccatgtaccagcggatctccaacatagaggacctgccacctctctacaccctcaacaagcctttgctcagtggcatcagcaatgcagaagcacggcagccagggaaggcccccaacttcagtgtcaactggacggtaggcgactccgctattgaggtcatcaacgccacgactgggaaggatgagctgggccgcgcgtcccgcctgtgtaagcacgcgttgtactgtcgctggatgcgtgtgcacggcaaggttccctcccacttactacgctccaagattaccaagcccaacgtgtaccatgagtccaagctggcggcaaaggagtaccaggccgccaaggcgcgtctgttcacagccttcatcaaggcggggctgggggcctgggtggagaagcccaccgagcaggaccagttctcactcacgccctgacccgggcagacatgatggggggtgcagggggctgtgggcatccagcgtcatcctccagaacctcacatctgaactgggggcaggtgcataccttggggagggagtagggggacacgggggaccaccaggtgtccacggttgtccccagcatctcacatcagacctggggcaggtgcgcagtgtggggaggggatggggtgcgtcagggcccagcatcgccgcctggcatctctctgccgcagcatttccccttctgaaccgtccagtgactgctttcaatctcggtttacgtttagaaattgagttctactgagtagggcttccttaagtttaggaaaatagaaattactttgtgtgaaattcttgaataaataatttattcagagctaggaatgtggtttataaaataggaagtaattgtgtcaggtcacttttatgccacattattttaattgcaaaaaagcatctatatatggaggagggtgggaaaatagaggtaggaaatagtagcctaaaggaaatcgccacacgtctgtctaaacttaggtctcttttctccgtaggtacctccctgggtagttccacacactaggttgtaacagtctctccctgaggagcagactcccagcatggtgtagcgtggccctgtcatgcacatggggtcccgcagcagtgactgtgtgtcctgcagaggcgtgacccaggcccctgtagccctcagcctcctctagaagcttctgtactccttgtaggatcagatcatggaaaacttttctcagtttacttctaagtaatcacagataatacatggccagtaatcccaggctggccattcattcaggttttttaaaggatatttaacttttatggactagaaggaatcacgagggctactgcacaatacatggcctaagttccctctgttccttcctctgaatcgaatggatgtgggtgaccgcccgaaggccttcacaggatggaagtagaatgatttcagtagatactcattcttggaaaatgccatagttttaaattattgtttccagctttatcaaagacatgtttgaaaaataaaaagcatccaagtgagagctggtgagaccacgtgctgctggcgtagtgtaggccagacattgacagtcctgacgggagctcagggctgcccagcgcccagcgtgcacgggacggccccacgacagagggagtcagcccgggaggtcaggagcgcggcgggcgagggccctgtgtggaccacctccaccaagctcagagatttgcaccaggtgccttgttgcctccgctcaggatgaaagaggagctgagagaagtgctctgcctgccagtgcagtgcccagctccaaggctctagagggtgttcaggtgggtctcctggggccatggggagagattggtgcagaccttaccccacagcatacacctgccacagcgaaatccagggtgttggcacctgtgtgtccgtgatgagcctaggaaaccagagcaggggcagaggggcgtcatcctcccaccggacgctgggagctcagaccccaaaactgaaacaccgtggcttcggcggggggtgtgcctcctgatgtcaggagccccatccacgtgtgtccacacagatctcgtcgcagcacggcaggaaggggtgctgcttagggctcattgttggggacatgaccgggttcagcggctagaacatctgccccacagcagcctcctcctccaccgaagagggtagttgtctccctgaagcagtcacagcaggcgtctctgccgctccgtcaccacagtggggttttgttcaggcagatcgcgctggggttctgcacctgcagaaggagaggggtctgttgtcgctggctttcccccaagcaggctcttgcacactctagaaaaaacaccttgtaagtctgtgcatttttattgtcttgataaattgtatttttttctaatggggattgggagatggacttcgtttttaaaaatatgtggattttggttaccaagtttagtgttaatatattccatatacatacaaaactacccggtatgtctggcttttcccttctgtcaggtaatagctaaagtcagcatgattgctccctgtaccaccccaaataagtgagtgcctcaccttgtggggcctgagcagctaccttgagaccatgtgaggtggcacctttccggggtggactcgtgcggccttgaggacaggcacagggcaccctatcccaagccgtccaggcaggaggaaggcagccaaggcaactgggttctgggagccctgggtggggcagctgtggggaggaactgggttcggggagccctgggcggggcggctgttggggggaactgggttcggggtgccctgggcagggggctactggggggcggctgtgaggaggagttgggttcagggagccctgggcggggtggctgtcagggggaactgggttccgggagccctgggccggggcagggggcggctgtaggaaggaactggtttcggggagccctgggcggggcggctgtggggaggaaggtgacgtgcaggggaccagaggctctgcactgctcctaggacagctcatctgtaatcagaaaaaaaataaacaaaatacagaacgctgactcctccgtgagacagatcggggaccttagcactttaatccctcccttctgagcgctcggtgtgcacttttagactatagctgtttcattgacgtgtcactctccatccagtgtccttgatgtggcttttagagacttagcagaaaattcgacacaagcaggaacttgattttttaagaaaaaatattacattttgaggacattttgacaagtaggggaagagagggcttctgttgttttgttttgttttgttttgttaactaaacctgaagtattaattccacaaagacactgtccctcaggaccactcaggtacagctctgccagggacagagtcctgctagtgggaggtctcaggtggggcggtgtgttctgtgccatgaggcagcgacaggtccagatggatgtcgtcaccaccttcctcagctctcatcacctggtcgtacgccaggcccacctcttcccagcaagggacgccaaagaactgcagtttttattctgagtcttaatttaacttttcatcatcttttcctattttggagaattttttgtaattaaaagcaattattttaaaatgtgcaagccagtatctcacaaggcatggatttctgtggaatttatttttattcaaataaccatatttatctccaggctgtggaatcgccactttctttgtgaagacagtgtctctccttgtaatctcacacaggtacactgaggaggggacggctccgtcttcacattgtgcacagatctgaggatgggattagcgaagctgtggagactgcacatccggacctgcccatgtctcaaaacaaacacatgtacagtggctctttttccttctcaaacactttaccccagaagcaggtggtctgccccaggcataaagaaggaaaattggccatctttcccacctctaaattctgtaaaattatagacttgctcaaaagattcctttttatcatccccacgctgtgtaagtggaaagggcattgtgttccgtgtgtgtccagtttacagcgtctctgccccctagcgtgttttgtgacaatctccctgggtgaggagtgggtgcacccagccccgaggccagtggttgctcggggccttccgtgtgagttctagtgttcacttgatgccggggaatagaattagagaaaactctgacctgccgggttccagggactggtggaggtggatggcaggtccgactcgaccatgacttagttgtaagggtgtgtcggctttttcagtctcatgtgaaaatcctcctgtctctggcagcactgtctgcactttcttgtttactgtttgaagggacgagtaccaagccacaagaacacttcttttggccacagcataagctgatggtatgtaaggaaccgatgggccattaaacatgaactgaacggttaaaagcacagtctatggaacgctaatggagtcagcccctaaagctgtttgctttttcaggctttggattacatgcttttaatttgattttagaatctggacactttctatgaatgtaattcggctgagaaacatgttgctgagatgcaatcctcagtgttctctgtatgtaaatctgtgtatacaccacacgttacaactgcatgagcttcctctcgcacaagaccagctggaactgagcatgagacgctgtcaaatacagacaaaggatttgagatgttctcaataaaaagaaaatgtttcacta

SEQ ID NO: 295601 - DNA, 3563 bp, Artificial Sequence
  derived and/or modified sequence
gcggcggcggcggcggcggcggcagcggcggccaagcggccaggttggcggccggggctccgggccgcgcgaggccacggccacgccgcgccgctgcgcacaaccaacgaggcagagcgccgcccggcgcgagactgcggccgaagcgtggggcgcgcgtgcggaggaccaggcgcggcgcggctgcggctgagagtggagcctttcaggctggcatggagagcttaaggggcaactgaaggagacacactggccaagcgcggagttctgcttacttcagtcctgctgagatactctctcagtccgctcgcaccgaaggaagctgccttgggatcagagcagacataaagctagaaaaatttcaagacagaaacagtctccgccagtcaagaaaccctcaaaagtattttgccatggatatagaagatgaagaaaacatgagttccagcagcactgatgtgaaggaaaaccgcaatctggacaacgtgtcccccaaggatggcagcacacctgggcctggcgagggctctcagctctccaatgggggtggtggtggccccggcagaaagcggcccctggaggagggcagcaatggccactccaagtaccgcctgaagaaaaggaggaaaacaccagggcccgtcctccccaagaacgccctgatgcagctgaatgagatcaagcctggtttgcagtacacactcctgtcccagactgggcccgtgcacgcgcctttgtttgtcatgtctgtggaggtgaatggccaggtttttgagggctctggtcccacaaagaaaaaggcaaaactccatgctgctgagaaggccttgaggtctttcgttcagtttcctaatgcctctgaggcccacctggccatggggaggaccctgtctgtcaacacggacttcacatctgaccaggccgacttccctgacacgctcttcaatggttttgaaactcctgacaaggcggagcctcccttttacgtgggctccaatggggatgactccttcagttccagcggggacctcagcttgtctgcttccccggtgcctgccagcctagcccagcctcctctccctgtcttaccaccattcccacccccgagtgggaagaatcccgtgatgatcttgaacgaactgcgcccaggactcaagtatgacttcctctccgagagcggggagagccatgccaagagcttcgtcatgtctgtggtcgtggatggtcagttctttgaaggctcggggagaaacaagaagcttgccaaggcccgggctgcgcagtctgccctggccgccatttttaacttgcacttggatcagacgccatctcgccagcctattcccagtgagggtcttcagctgcatttaccgcaggttttagctgacgctgtctcacgcctggtcctgggtaagtttggtgacctgaccgacaacttctcctcccctcacgctcgcagaaaagtgctggctggagtcgtcatgacaacaggcacagatgttaaagatgccaaggtgataagtgtttctacaggaacaaaatgtattaatggtgaatacatgagtgatcgtggccttgcattaaatgactgccatgcagaaataatatctcggagatccttgctcagatttctttatacacaacttgagctttacttaaataacaaagatgatcaaaaaagatccatctttcagaaatcagagcgaggggggtttaggctgaaggagaatgtccagtttcatctgtacatcagcacctctccctgtggagatgccagaatcttctcaccacatgagccaatcctggaagggtctcgctcttacacccaggctggagtgcagtggtgcaatcatggctcactgcagcctcgacctcctgggctcttaagcgatccttccacctcaaccttccaaggagctgggactacagaaccagcagatagacacccaaatcgtaaagcaagaggacagctacggaccaaaatagagtctggtgaggggacgattccagtgcgctccaatgcgagcatccaaacgtgggacggggtgctgcaaggggagcggctgctcaccatgtcctgcagtgacaagattgcacgctggaacgtggtgggcatccagggatccctgctcagcattttcgtggagcccatttacttctcgagcatcatcctgggcagcctttaccacggggaccacctttccagggccatgtaccagcggatctccaacatagaggacctgccacctctctacaccctcaacaagcctttgctcagtggcatcagcaatgcagaagcacggcagccagggaaggcccccaacttcagtgtcaactggacggtaggcgactccgctattgaggtcatcaacgccacgactgggaaggatgagctgggccgcgcgtcccgcctgtgtaagcacgcgttgtactgtcgctggatgcgtgtgcacggcaaggttccctcccacttactacgctccaagattaccaagcccaacgtgtaccatgagtccaagctggcggcaaaggagtaccaggccgccaaggtacactgaggaggggacggctccgtcttcacattgtgcacagatctgaggatgggattagcgaagctgtggagactgcacatccggacctgcccatgtctcaaaacaaacacatgtacagtggctctttttccttctcaaacactttaccccagaagcaggtggtctgccccaggcataaagaaggaaaattggccatctttcccacctctaaattctgtaaaattatagacttgctcaaaagattcctttttatcatccccacgctgtgtaagtggaaagggcattgtgttccgtgtgtgtccagtttacagcgtctctgccccctagcgtgttttgtgacaatctccctgggtgaggagtgggtgcacccagccccgaggccagtggttgctcggggccttccgtgtgagttctagtgttcacttgatgccggggaatagaattagagaaaactctgacctgccgggttccagggactggtggaggtggatggcaggtccgactcgaccatgacttagttgtaagggtgtgtcggctttttcagtctcatgtgaaaatcctcctgtctctggcagcactgtctgcactttcttgtttactgtttgaagggacgagtaccaagccacaagaacacttcttttggccacagcataagctgatggtatgtaaggaaccgatgggccattaaacatgaactgaacggttaaaagcacagtctatggaacgctaatggagtcagcccctaaagctgtttgctttttcaggctttggattacatgcttttaatttgattttagaatctggacactttctatgaatgtaattcggctgagaaacatgttgctgagatgcaatcctcagtgttctctgtatgtaaatctgtgtatacaccacacgttacaactgcatgagcttcctctcgcacaagaccagctggaactgagcatgagacgctgtcaaatacagacaaaggatttgagatgttctcaataaaaagaaaatgtttcacta

SEQ ID NO: 295602 - DNA, 704 bp, Artificial Sequence
  derived and/or modified sequence
aaatgtcgctgttcagtgcgttgatcgattctcacatctgaagccagctgtgtattcttgagtggagcctttcaggctggcatggagagcttaaggggcaactgaaggagacacactggccaagcgcggagttctgcttacttcagtcctgctgagatactctctcagtccgctcgcaccgaaggaagctgccttgggatcagagcagacataaagctagaaaaatttcaagacagaaacagtctccgccagtcaagaaaccctcaaaagtattttgccatggatatagaagatgaagaaaacatgagttccagcagcactgatgtgaaggaaaaccgcaatctggacaacgtgtcccccaaggatggcagcacacctgggcctggcgagggctctcagctctccaatgggggtggtggtggccccggcagaaagcggcccctggaggagggcagcaatggccactccaagtaccgcctgaagaaaaggaggaaaacaccagggcccgtcctccccaagaacgccctgatgcagctgaatgagatcaagcctggtttgcagtacacactcctgtcccagactgggcccgtgcacgcgcctttgtttgtcatgtctgtggaggtgaatggccaggtttttgagggctctggtcccacaaagaaaaaggcaaaactccatgctgctgagaaggccttgaggtcttt

SEQ ID NO: 295603 - DNA, 5033 bp, Artificial Sequence
  derived and/or modified sequence
gcggcggcggcggcggcggcggcagcggcggccaagcggccaggttggcggccggggctccgggccgcgcgaggccacggccacgccgcgccgctgcgcacaaccaacgaggcagagcgccgcccggcgcgagactgcggccgaagcgtggggcgcgcgtgcggaggaccaggcgcggcgcggctgcggctgagagtggagcctttcaggctggcatggagagcttaaggggcaactgaaggagacacactggccaagcgcggagttctgcttacttcagtcctgctgagatactctctcagtccgctcgcaccgaaggaagctgccttgggatcagagcagacataaagctagaaaaatttcaagacagaaacagtctccgccagtcaagaaaccctcaaaagtattttgccatggatatagaagatgaagaaaacatgagttccagcagcactgatgtgaaggaaaaccgcaatctggacaacgtgtcccccaaggatggcagcacacctgggcctggcgagggctctcagctctccaatgggggtggtggtggccccggcagaaagcggcccctggaggagggcagcaatggccactccaagtaccgcctgaagaaaaggaggaaaacaccagggcccgtcctccccaagaacgccctgatgcagctgaatgagatcaagcctggtttgcagtacacactcctgtcccagactgggcccgtgcacgcgcctttgtttgtcatgtctgtggaggtgaatggccaggtttttgagggctctggtcccacaaagaaaaaggcaaaactccatgctgctgagaaggccttgaggtctttcgttcagtttcctaatgcctctgaggcccacctggccatggggaggaccctgtctgtcaacacggacttcacatctgaccaggccgacttccctgacacgctcttcaatggttttgaaactcctgacaaggcggagcctcccttttacgtgggctccaatggggatgactccttcagttccagcggggacctcagcttgtctgcttccccggtgcctgccagcctagcccagcctcctctccctgtcttaccaccattcccacccccgagtgggaagaatcccgtgatgatcttgaacgaactgcgcccaggactcaagtatgacttcctctccgagagcggggagagccatgccaagagcttcgtcatgtctgtggtcgtggatggtcagttctttgaaggctcggggagaaacaagaagcttgccaaggcccgggctgcgcagtctgccctggccgccatttttaacttgcacttggatcagacgccatctcgccagcctattcccagtgagggtcttcagctgcatttaccgcaggttttagctgacgctgtctcacgcctggtcctgggtaagtttggtgacctgaccgacaacttctcctcccctcacgctcgcagaaaagtgctggctggagtcgtcatgacaacaggcacagatgttaaagatgccaaggtgataagtgtttctacaggaacaaaatgtattaatggtgaatacatgagtgatcgtggccttgcattaaatgactgccatgcagaaataatatctcggagatccttgctcagatttctttatacacaacttgagctttacttaaataacaaagatgatcaaaaaagatccatctttcagaaatcagagcgaggggggtttaggctgaaggagaatgtccagtttcatctgtacatcagcacctctccctgtggagatgccagaatcttctcaccacatgagccaatcctggaagggtctcgctcttacacccaggctggagtgcagtggtgcaatcatggctcactgcagcctcgacctcctgggctcttaagcgatccttccacctcaaccttccaaggagctgggactacagaaccagcagatagacacccaaatcgtaaagcaagaggacagctacggaccaaaatagagtctggtgaggggacgattccagtgcgctccaatgcgagcatccaaacgtgggacggggtgctgcaaggggagcggctgctcaccatgtcctgcagtgacaagattgcacgctggaacgtggtgggcatccagggatccctgctcagcattttcgtggagcccatttacttctcgagcatcatcctgggcagcctttaccacggggaccacctttccagggccatgtaccagcggatctccaacatagaggacctgccacctctctacaccctcaacaagcctttgctcagtggcatcagcaatgcagaagcacggcagccagggaaggcccccaacttcagtgtcaactggacggtaggcgactccgctattgaggtcatcaacgccacgactgggaaggatgagctgggccgcgcgtcccgcctgtgtaagcacgcgttgtactgtcgctggatgcgtgtgcacggcaaggttccctcccacttactacgctccaagattaccaagcccaacgtgtaccatgagtccaagctggcggcaaaggagtaccaggccgccaaggcgcgtctgttcacagccttcatcaaggcggggctgggggcctgggtggagaagcccaccgagcaggaccagttctcactcacgccctgacccgggcagacatgatggggggtgcagggggctgtgggcatccagcgtcatcctccagaacctcacatctgaactgggggcaggtgcataccttggggagggagtagggggacacgggggaccaccaggtgtccacggttgtccccagcatctcacatcagacctggggcaggtgcgcagtgtggggaggggatggggtgcgtcagggcccagcatcgccgcctggcatctctctgccgcagcatttccccttctgaaccgtccagtgactgctttcaatctcggtttacgtttagaaattgagttctactgagtagggcttccttaagtttaggaaaatagaaattactttgtgtgaaattcttgaataaataatttattcagagctaggaatgtggtttataaaataggaagtaattgtgtcaggtcacttttatgccacattattttaattgcaaaaaagcatctatatatggaggagggtgggaaaatagaggtaggaaatagtagcctaaaggaaatcgccacacgtctgtctaaacttaggtctcttttctccgtaggtacctccctgggtagttccacacactaggttgtaacagtctctccctgaggagcagactcccagcatggtgtagcgtggccctgtcatgcacatggggtcccgcagcagtgactgtgtgtcctgcagaggcgtgacccaggcccctgtagccctcagcctcctctagaagcttctgtactccttgtaggatcagatcatggaaaacttttctcagtttacttctaagtaatcacagataatacatggccagtaatcccaggctggccattcattcaggttttttaaaggatatttaacttttatggactagaaggaatcacgagggctactgcacaatacatggcctaagttccctctgttccttcctctgaatcgaatggatgtgggtgaccgcccgaaggccttcacaggatggaagtagaatgatttcagtagatactcattcttggaaaatgccatagttttaaattattgtttccagctttatcaaagacatgtttgaaaaataaaaagcatccaagtgagagctggtgagaccacgtgctgctggcgtagtgtaggccagacattgacagtcctgacgggagctcagggctgcccagcgcccagcgtgcacgggacggccccacgacagagggagtcagcccgggaggtcaggagcgcggcgggcgagggccctgtgtggaccacctccaccaagctcagagatttgcaccaggtgccttgttgcctccgctcaggatgaaagaggagctgagagaagtgctctgcctgccagtgcagtgcccagctccaaggctctagagggtgttcaggtacactgaggaggggacggctccgtcttcacattgtgcacagatctgaggatgggattagcgaagctgtggagactgcacatccggacctgcccatgtctcaaaacaaacacatgtacagtggctctttttccttctcaaacactttaccccagaagcaggtggtctgccccaggcataaagaaggaaaattggccatctttcccacctctaaattctgtaaaattatagacttgctcaaaagattcctttttatcatccccacgctgtgtaagtggaaagggcattgtgttccgtgtgtgtccagtttacagcgtctctgccccctagcgtgttttgtgacaatctccctgggtgaggagtgggtgcacccagccccgaggccagtggttgctcggggccttccgtgtgagttctagtgttcacttgatgccggggaatagaattagagaaaactctgacctgccgggttccagggactggtggaggtggatggcaggtccgactcgaccatgacttagttgtaagggtgtgtcggctttttcagtctcatgtgaaaatcctcctgtctctggcagcactgtctgcactttcttgtttactgtttgaagggacgagtaccaagccacaagaacacttcttttggccacagcataagctgatggtatgtaaggaaccgatgggccattaaacatgaactgaacggttaaaagcacagtctatggaacgctaatggagtcagcccctaaagctgtttgctttttcaggctttggattacatgcttttaatttgattttagaatctggacactttctatgaatgtaattcggctgagaaacatgttgctgagatgcaatcctcagtgttctctgtatgtaaatctgtgtatacaccacacgttacaactgcatgagcttcctctcgcacaagaccagctggaactgagcatgagacgctgtcaaatacagacaaaggatttgagatgttctcaataaaaagaaaatgtttcacta

SEQ ID NO: 295604 - DNA, 7027 bp, Artificial Sequence
  derived and/or modified sequence
ctgaggcgctgaggcggccgtggcggcggcggcggcggcggcggcagcggcggccaagcggccaggttggcggccggggctccgggccgcgcgaggccacggccacgccgcgccgctgcgcacaaccaacgaggcagagcgccgcccggcgcgagactgcggccgaagcgtggggcgcgcgtgcggaggaccaggcgcggcgcggctgcggctgagagtggagcctttcaggctggcatggagagcttaaggggcaactgaaggagacacactggccaagcgcggagttctgcttacttcagtcctgctgagatactctctcagtccgctcgcaccgaaggaagctgccttgggatcagagcagacataaagctagaaaaatttcaagacagaaacagtctccgccagtcaagaaaccctcaaaagtattttgccatggatatagaagatgaagaaaacatgagttccagcagcactgatgtgaaggaaaaccgcaatctggacaacgtgtcccccaaggatggcagcacacctgggcctggcgagggctctcagctctccaatgggggtggtggtggccccggcagaaagcggcccctggaggagggcagcaatggccactccaagtaccgcctgaagaaaaggaggaaaacaccagggcccgtcctccccaagaacgccctgatgcagctgaatgagatcaagcctggtttgcagtacacactcctgtcccagactgggcccgtgcacgcgcctttgtttgtcatgtctgtggaggtgaatggccaggtttttgagggctctggtcccacaaagaaaaaggcaaaactccatgctgctgagaaggccttgaggtctttcgttcagtttcctaatgcctctgaggcccacctggccatggggaggaccctgtctgtcaacacggacttcacatctgaccaggccgacttccctgacacgctcttcaatggttttgaaactcctgacaaggcggagcctcccttttacgtgggctccaatggggatgactccttcagttccagcggggacctcagcttgtctgcttccccggtgcctgccagcctagcccagcctcctctccctgtcttaccaccattcccacccccgagtgggaagaatcccgtgatgatcttgaacgaactgcgcccaggactcaagtatgacttcctctccgagagcggggagagccatgccaagagcttcgtcatgtctgtggtcgtggatggtcagttctttgaaggctcggggagaaacaagaagcttgccaaggcccgggctgcgcagtctgccctggccgccatttttaacttgcacttggatcagacgccatctcgccagcctattcccagtgagggtcttcagctgcatttaccgcaggttttagctgacgctgtctcacgcctggtcctgggtaagtttggtgacctgaccgacaacttctcctcccctcacgctcgcagaaaagtgctggctggagtcgtcatgacaacaggcacagatgttaaagatgccaaggtgataagtgtttctacaggaacaaaatgtattaatggtgaatacatgagtgatcgtggccttgcattaaatgactgccatgcagaaataatatctcggagatccttgctcagatttctttatacacaacttgagctttacttaaataacaaagatgatcaaaaaagatccatctttcagaaatcagagcgaggggggtttaggctgaaggagaatgtccagtttcatctgtacatcagcacctctccctgtggagatgccagaatcttctcaccacatgagccaatcctggaagggtctcgctcttacacccaggctggagtgcagtggtgcaatcatggctcactgcagcctcgacctcctgggctcttaagcgatccttccacctcaaccttccaaggagctgggactacagaaccagcagatagacacccaaatcgtaaagcaagaggacagctacggaccaaaatagagtctggtgaggggacgattccagtgcgctccaatgcgagcatccaaacgtgggacggggtgctgcaaggggagcggctgctcaccatgtcctgcagtgacaagattgcacgctggaacgtggtgggcatccagggatccctgctcagcattttcgtggagcccatttacttctcgagcatcatcctgggcagcctttaccacggggaccacctttccagggccatgtaccagcggatctccaacatagaggacctgccacctctctacaccctcaacaagcctttgctcagtggcatcagcaatgcagaagcacggcagccagggaaggcccccaacttcagtgtcaactggacggtaggcgactccgctattgaggtcatcaacgccacgactgggaaggatgagctgggccgcgcgtcccgcctgtgtaagcacgcgttgtactgtcgctggatgcgtgtgcacggcaaggttccctcccacttactacgctccaagattaccaagcccaacgtgtaccatgagtccaagctggcggcaaaggagtaccaggccgccaaggcgcgtctgttcacagccttcatcaaggcggggctgggggcctgggtggagaagcccaccgagcaggaccagttctcactcacgccctgacccgggcagacatgatggggggtgcagggggctgtgggcatccagcgtcatcctccagaacctcacatctgaactgggggcaggtgcataccttggggagggagtagggggacacgggggaccaccaggtgtccacggttgtccccagcatctcacatcagacctggggcaggtgcgcagtgtggggaggggatggggtgcgtcagggcccagcatcgccgcctggcatctctctgccgcagcatttccccttctgaaccgtccagtgactgctttcaatctcggtttacgtttagaaattgagttctactgagtagggcttccttaagtttaggaaaatagaaattactttgtgtgaaattcttgaataaataatttattcagagctaggaatgtggtttataaaataggaagtaattgtgtcaggtcacttttatgccacattattttaattgcaaaaaagcatctatatatggaggagggtgggaaaatagaggtaggaaatagtagcctaaaggaaatcgccacacgtctgtctaaacttaggtctcttttctccgtaggtacctccctgggtagttccacacactaggttgtaacagtctctccctgaggagcagactcccagcatggtgtagcgtggccctgtcatgcacatggggtcccgcagcagtgactgtgtgtcctgcagaggcgtgacccaggcccctgtagccctcagcctcctctagaagcttctgtactccttgtaggatcagatcatggaaaacttttctcagtttacttctaagtaatcacagataatacatggccagtaatcccaggctggccattcattcaggttttttaaaggatatttaacttttatggactagaaggaatcacgagggctactgcacaatacatggcctaagttccctctgttccttcctctgaatcgaatggatgtgggtgaccgcccgaaggccttcacaggatggaagtagaatgatttcagtagatactcattcttggaaaatgccatagttttaaattattgtttccagctttatcaaagacatgtttgaaaaataaaaagcatccaagtgagagctggtgagaccacgtgctgctggcgtagtgtaggccagacattgacagtcctgacgggagctcagggctgcccagcgcccagcgtgcacgggacggccccacgacagagggagtcagcccgggaggtcaggagcgcggcgggcgagggccctgtgtggaccacctccaccaagctcagagatttgcaccaggtgccttgttgcctccgctcaggatgaaagaggagctgagagaagtgctctgcctgccagtgcagtgcccagctccaaggctctagagggtgttcaggtgggtctcctggggccatggggagagattggtgcagaccttaccccacagcatacacctgccacagcgaaatccagggtgttggcacctgtgtgtccgtgatgagcctaggaaaccagagcaggggcagaggggcgtcatcctcccaccggacgctgggagctcagaccccaaaactgaaacaccgtggcttcggcggggggtgtgcctcctgatgtcaggagccccatccacgtgtgtccacacagatctcgtcgcagcacggcaggaaggggtgctgcttagggctcattgttggggacatgaccgggttcagcggctagaacatctgccccacagcagcctcctcctccaccgaagagggtagttgtctccctgaagcagtcacagcaggcgtctctgccgctccgtcaccacagtggggttttgttcaggcagatcgcgctggggttctgcacctgcagaaggagaggggtctgttgtcgctggctttcccccaagcaggctcttgcacactctagaaaaaacaccttgtaagtctgtgcatttttattgtcttgataaattgtatttttttctaatggggattgggagatggacttcgtttttaaaaatatgtggattttggttaccaagtttagtgttaatatattccatatacatacaaaactacccggtatgtctggcttttcccttctgtcaggtaatagctaaagtcagcatgattgctccctgtaccaccccaaataagtgagtgcctcaccttgtggggcctgagcagctaccttgagaccatgtgaggtggcacctttccggggtggactcgtgcggccttgaggacaggcacagggcaccctatcccaagccgtccaggcaggaggaaggcagccaaggcaactgggttctgggagccctgggtggggcagctgtggggaggaactgggttcggggagccctgggcggggcggctgttggggggaactgggttcggggtgccctgggcagggggctactggggggcggctgtgaggaggagttgggttcagggagccctgggcggggtggctgtcagggggaactgggttccgggagccctgggccggggcagggggcggctgtaggaaggaactggtttcggggagccctgggcggggcggctgtggggaggaaggtgacgtgcaggggaccagaggctctgcactgctcctaggacagctcatctgtaatcagaaaaaaaataaacaaaatacagaacgctgactcctccgtgagacagatcggggaccttagcactttaatccctcccttctgagcgctcggtgtgcacttttagactatagctgtttcattgacgtgtcactctccatccagtgtccttgatgtggcttttagagacttagcagaaaattcgacacaagcaggaacttgattttttaagaaaaaatattacattttgaggacattttgacaagtaggggaagagagggcttctgttgttttgttttgttttgttttgttaactaaacctgaagtattaattccacaaagacactgtccctcaggaccactcaggtacagctctgccagggacagagtcctgctagtgggaggtctcaggtggggcggtgtgttctgtgccatgaggcagcgacaggtccagatggatgtcgtcaccaccttcctcagctctcatcacctggtcgtacgccaggcccacctcttcccagcaagggacgccaaagaactgcagtttttattctgagtcttaatttaacttttcatcatcttttcctattttggagaattttttgtaattaaaagcaattattttaaaatgtgcaagccagtatctcacaaggcatggatttctgtggaatttatttttattcaaataaccatatttatctccaggctgtggaatcgccactttctttgtgaagacagtgtctctccttgtaatctcacacaggtacactgaggaggggacggctccgtcttcacattgtgcacagatctgaggatgggattagcgaagctgtggagactgcacatccggacctgcccatgtctcaaaacaaacacatgtacagtggctctttttccttctcaaacactttaccccagaagcaggtggtctgccccaggcataaagaaggaaaattggccatctttcccacctctaaattctgtaaaattatagacttgctcaaaagattcctttttatcatccccacgctgtgtaagtggaaagggcattgtgttccgtgtgtgtccagtttacagcgtctctgccccctagcgtgttttgtgacaatctccctgggtgaggagtgggtgcacccagccccgaggccagtggttgctcggggccttccgtgtgagttctagtgttcacttgatgccggggaatagaattagagaaaactctgacctgccgggttccagggactggtggaggtggatggcaggtccgactcgaccatgacttagttgtaagggtgtgtcggctttttcagtctcatgtgaaaatcctcctgtctctggcagcactgtctgcactttcttgtttactgtttgaagggacgagtaccaagccacaagaacacttcttttggccacagcataagctgatggtatgtaaggaaccgatgggccattaaacatgaactgaacggttaaaagcacagtctatggaacgctaatggagtcagcccctaaagctgtttgctttttcaggctttggattacatgcttttaatttgattttagaatctggacactttctatgaatgtaattcggctgagaaacatgttgctgagatgcaatcctcagtgttctctgtatgtaaatctgtgtatacaccacacgttacaactgcatgagcttcctctcgcacaagaccagctggaactgagcatgagacgctgtcaaatacagacaaaggatttgagatgttctcaataaaaagaaaatgtttcactactc

SEQ ID NO: 295605 - DNA, 5056 bp, Artificial Sequence
  derived and/or modified sequence
ctgaggcgctgaggcggccgtggcggcggcggcggcggcggcggcagcggcggccaagcggccaggttggcggccggggctccgggccgcgcgaggccacggccacgccgcgccgctgcgcacaaccaacgaggcagagcgccgcccggcgcgagactgcggccgaagcgtggggcgcgcgtgcggaggaccaggcgcggcgcggctgcggctgagagtggagcctttcaggctggcatggagagcttaaggggcaactgaaggagacacactggccaagcgcggagttctgcttacttcagtcctgctgagatactctctcagtccgctcgcaccgaaggaagctgccttgggatcagagcagacataaagctagaaaaatttcaagacagaaacagtctccgccagtcaagaaaccctcaaaagtattttgccatggatatagaagatgaagaaaacatgagttccagcagcactgatgtgaaggaaaaccgcaatctggacaacgtgtcccccaaggatggcagcacacctgggcctggcgagggctctcagctctccaatgggggtggtggtggccccggcagaaagcggcccctggaggagggcagcaatggccactccaagtaccgcctgaagaaaaggaggaaaacaccagggcccgtcctccccaagaacgccctgatgcagctgaatgagatcaagcctggtttgcagtacacactcctgtcccagactgggcccgtgcacgcgcctttgtttgtcatgtctgtggaggtgaatggccaggtttttgagggctctggtcccacaaagaaaaaggcaaaactccatgctgctgagaaggccttgaggtctttcgttcagtttcctaatgcctctgaggcccacctggccatggggaggaccctgtctgtcaacacggacttcacatctgaccaggccgacttccctgacacgctcttcaatggttttgaaactcctgacaaggcggagcctcccttttacgtgggctccaatggggatgactccttcagttccagcggggacctcagcttgtctgcttccccggtgcctgccagcctagcccagcctcctctccctgtcttaccaccattcccacccccgagtgggaagaatcccgtgatgatcttgaacgaactgcgcccaggactcaagtatgacttcctctccgagagcggggagagccatgccaagagcttcgtcatgtctgtggtcgtggatggtcagttctttgaaggctcggggagaaacaagaagcttgccaaggcccgggctgcgcagtctgccctggccgccatttttaacttgcacttggatcagacgccatctcgccagcctattcccagtgagggtcttcagctgcatttaccgcaggttttagctgacgctgtctcacgcctggtcctgggtaagtttggtgacctgaccgacaacttctcctcccctcacgctcgcagaaaagtgctggctggagtcgtcatgacaacaggcacagatgttaaagatgccaaggtgataagtgtttctacaggaacaaaatgtattaatggtgaatacatgagtgatcgtggccttgcattaaatgactgccatgcagaaataatatctcggagatccttgctcagatttctttatacacaacttgagctttacttaaataacaaagatgatcaaaaaagatccatctttcagaaatcagagcgaggggggtttaggctgaaggagaatgtccagtttcatctgtacatcagcacctctccctgtggagatgccagaatcttctcaccacatgagccaatcctggaagggtctcgctcttacacccaggctggagtgcagtggtgcaatcatggctcactgcagcctcgacctcctgggctcttaagcgatccttccacctcaaccttccaaggagctgggactacagaaccagcagatagacacccaaatcgtaaagcaagaggacagctacggaccaaaatagagtctggtgaggggacgattccagtgcgctccaatgcgagcatccaaacgtgggacggggtgctgcaaggggagcggctgctcaccatgtcctgcagtgacaagattgcacgctggaacgtggtgggcatccagggatccctgctcagcattttcgtggagcccatttacttctcgagcatcatcctgggcagcctttaccacggggaccacctttccagggccatgtaccagcggatctccaacatagaggacctgccacctctctacaccctcaacaagcctttgctcagtggcatcagcaatgcagaagcacggcagccagggaaggcccccaacttcagtgtcaactggacggtaggcgactccgctattgaggtcatcaacgccacgactgggaaggatgagctgggccgcgcgtcccgcctgtgtaagcacgcgttgtactgtcgctgggcgtgtgcacggcaaggttccctcccacttactacgctccaagattaccaagcccaacgtgtaccatgagtccaagctggcggcaaaggagtaccaggccgccaaggcgcgtctgttcacagccttcatcaaggcggggctgggggcctgggtggagaagcccaccgagcaggaccagttctcactcacgccctgacccgggcagacatgatggggggtgcagggggctgtgggcatccagcgtcatcctccagaacctcacatctgaactgggggcaggtgcataccttggggagggagtagggggacacgggggaccaccaggtgtccacggttgtccccagcatctcacatcagacctggggcaggtgcgcagtgtggggaggggatggggtgcgtcagggcccagcatcgccgcctggcatctctctgccgcagcatttccccttctgaaccgtccagtgactgctttcaatctcggtttacgtttagaaattgagttctactgagtagggcttccttaagtttaggaaaatagaaattactttgtgtgaaattcttgaataaataatttattcagagctaggaatgtggtttataaaataggaagtaattgtgtcaggtcacttttatgccacattattttaattgcaaaaaagcatctatatatggaggagggtgggaaaatagaggtaggaaatagtagcctaaaggaaatcgccacacgtctgtctaaacttaggtctcttttctccgtaggtacctccctgggtagttccacacactaggttgtaacagtctctccctgaggagcagactcccagcatggtgtagcgtggccctgtcatgcacatggggtcccgcagcagtgactgtgtgtcctgcagaggcgtgacccaggcccctgtagccctcagcctcctctagaagcttctgtactccttgtaggatcagatcatggaaaacttttctcagtttacttctaagtaatcacagataatacatggccagtaatcccaggctggccattcattcaggttttttaaaggatatttaacttttatggactagaaggaatcacgagggctactgcacaatacatggcctaagttccctctgttccttcctctgaatcgaatggatgtgggtgaccgcccgaaggccttcacaggatggaagtagaatgatttcagtagatactcattcttggaaaatgccatagttttaaattattgtttccagctttatcaaagacatgtttgaaaaataaaaagcatccaagtgagagctggtgagaccacgtgctgctggcgtagtgtaggccagacattgacagtcctgacgggagctcagggctgcccagcgcccagcgtgcacgggacggccccacgacagagggagtcagcccgggaggtcaggagcgcggcgggcgagggccctgtgtggaccacctccaccaagctcagagatttgcaccaggtgccttgttgcctccgctcaggatgaaagaggagctgagagaagtgctctgcctgccagtgcagtgcccagctccaaggctctagagggtgttcaggtacactgaggaggggacggctccgtcttcacattgtgcacagatctgaggatgggattagcgaagctgtggagactgcacatccggacctgcccatgtctcaaaacaaacacatgtacagtggctctttttccttctcaaacactttaccccagaagcaggtggtctgccccaggcataaagaaggaaaattggccatctttcccacctctaaattctgtaaaattatagacttgctcaaaagattcctttttatcatccccacgctgtgtaagtggaaagggcattgtgttccgtgtgtgtccagtttacagcgtctctgccccctagcgtgttttgtgacaatctccctgggtgaggagtgggtgcacccagccccgaggccagtggttgctcggggccttccgtgtgagttctagtgttcacttgatgccggggaatagaattagagaaaactctgacctgccgggttccagggactggtggaggtggatggcaggtccgactcgaccatgacttagttgtaagggtgtgtcggctttttcagtctcatgtgaaaatcctcctgtctctggcagcactgtctgcactttcttgtttactgtttgaagggacgagtaccaagccacaagaacacttcttttggccacagcataagctgatggtatgtaaggaaccgatgggccattaaacatgaactgaacggttaaaagcacagtctatggaacgctaatggagtcagcccctaaagctgtttgctttttcaggctttggattacatgcttttaatttgattttagaatctggacactttctatgaatgtaattcggctgagaaacatgttgctgagatgcaatcctcagtgttctctgtatgtaaatctgtgtatacaccacacgttacaactgcatgagcttcctctcgcacaagaccagctggaactgagcatgagacgctgtcaaatacagacaaaggatttgagatgttctcaataaaaagaaaatgtttcactactc

SEQ ID NO: 295606 - protein, 741 aa, Artificial Sequence
  derived and/or modified sequence
MDIEDEENMSSSSTDVKENRNLDNVSPKDGSTPGPGEGSQLSNGGGGGPGRKRPLEEGSNGHSKYRLKKRRKTPGPVLPKNALMQLNEIKPGLQYTLLSQTGPVHAPLFVMSVEVNGQVFEGSGPTKKKAKLHAAEKALRSFVQFPNASEAHLAMGRTLSVNTDFTSDQADFPDTLFNGFETPDKAEPPFYVGSNGDDSFSSSGDLSLSASPVPASLAQPPLPVLPPFPPPSGKNPVMILNELRPGLKYDFLSESGESHAKSFVMSVVVDGQFFEGSGRNKKLAKARAAQSALAAIFNLHLDQTPSRQPIPSEGLQLHLPQVLADAVSRLVLGKFGDLTDNFSSPHARRKVLAGVVMTTGTDVKDAKVISVSTGTKCINGEYMSDRGLALNDCHAEIISRRSLLRFLYTQLELYLNNKDDQKRSIFQKSERGGFRLKENVQFHLYISTSPCGDARIFSPHEPILEGSRSYTQAGVQWCNHGSLQPRPPGLLSDPSTSTFQGAGTTEPADRHPNRKARGQLRTKIESGEGTIPVRSNASIQTWDGVLQGERLLTMSCSDKIARWNVVGIQGSLLSIFVEPIYFSSIILGSLYHGDHLSRAMYQRISNIEDLPPLYTLNKPLLSGISNAEARQPGKAPNFSVNWTVGDSAIEVINATTGKDELGRASRLCKHALYCRWMRVHGKVPSHLLRSKITKPNVYHESKLAAKEYQAAKARLFTAFIKAGLGAWVEKPTEQDQFSLTP

SEQ ID NO: 295607 - DNA, 2226 bp, Artificial Sequence
  derived and/or modified sequence
atggacattgaggatgaggaaaacatgtcatcaagcagtactgacgtgaaggagaatagaaacttagacaatgtctccccgaaggatggctcgacaccaggccccggagaggggtcacaactgtccaacggaggaggaggcgggccaggccgcaagcgccctcttgaggaaggaagcaacgggcatagtaaatatcgacttaagaaaaggcgcaagacccctggcccagtgctgccaaagaacgctctgatgcaactcaacgagatcaaacccgggctgcagtatacactcttatcccagactggacctgtccacgccccactcttcgtaatgagcgtcgaagtgaatggacaggtgtttgaaggatcaggacccacaaagaagaaagctaagctgcacgctgcggagaaggcgctccgatcatttgtgcagtttcctaacgctagtgaggcccacctggcaatgggccgcaccctgagtgtcaacaccgacttcacatctgaccaggctgatttccctgataccctgttcaatggattcgaaacacctgacaaggctgagccccccttttatgtgggatcgaatggcgacgactctttcagttcttcaggcgacttaagcctgagcgcaagtccagtgcccgcttcactcgcccaaccacctctacccgttctccctccgttcccccccccttctggaaagaatccagtcatgatcctgaatgagcttcgcccgggactgaagtatgactttttgtccgaatctggagagagccatgccaaatctttcgtaatgtccgtggtggtggacgggcaattcttcgagggttcaggtcgtaataaaaagctggcaaaggcccgggccgcccagagtgccctggctgctattttcaatctccatttagaccagacgccatctaggcaaccaataccctccgagggcctgcagctgcatctccctcaggtactcgcagacgcagtgagtcgcctcgttttgggcaagttcggagatctgacagataacttctcatccccccatgcacgtaggaaggtgctggctggcgtggtgatgacgacgggcactgacgttaaggacgcaaaggtcatatcagtgtccactggcacaaaatgcattaacggagaatacatgtctgaccggggattggccctgaacgattgtcacgccgaaattatttcccgaagatcgctgctgcgatttctctatacccagttggagctgtaccttaacaacaaggatgatcaaaagcgttcaatctttcagaaaagtgagagaggtgggttccgcctgaaagagaacgttcagtttcatctttacataagcacgtccccttgcggcgatgccaggatctttagtcctcacgagccaattcttgaaggaagccgctcttacacccaagccggcgtgcagtggtgcaaccatgggagtctgcagccgaggccaccaggactgttgtcggatcccagtacctctacctttcagggagctggcaccaccgagcctgccgaccgtcacccgaacagaaaagccagggggcagctcagaacaaagatagagtctggcgagggaaccattcctgtcaggagcaacgcctctatccaaacttgggatggggtgctgcagggcgagaggctactgaccatgagctgctctgacaagattgcccgatggaatgtggtcggaatccaaggttcccttctgagcatcttcgtggaaccgatctactttagttctattattctgggctcactttatcatggtgatcacctgtccagggcaatgtaccagcgcataagcaatatcgaagatctcccacctctctatacattaaataaaccactgttaagcggcatttctaacgcggaggcccgacaacctggtaaagctcccaacttcagcgtaaactggacagtgggcgactccgcaatagaagtcatcaatgccacaacagggaaggatgagttaggccgagcctccaggctttgcaaacacgccctatactgtcggtggatgcgcgtgcatggcaaggttccatcccacttgctgcgatctaaaatcactaagcctaacgtgtatcatgaatcaaagttggccgccaaagaataccaggcagcaaaggcccggctatttaccgcttttatcaaggcaggcctgggggcctgggtggaaaaaccaaccgagcaggatcaattttctttgacaccatag

SEQ ID NO: 295608 - DNA, 2226 bp, Artificial Sequence
  derived and/or modified sequence
atggatattgaagacgaagagaacatgagctcatcctccactgatgtgaaagagaatagaaatctggataatgtctcccctaaagacgggtcaacccctggacccggggaggggagtcagcttagtaacggcggaggagggggccccgggcggaagcggcctttagaggaagggagcaacggacacagcaagtacaggttgaaaaagcgcagaaaaactccaggtccagttttgcccaaaaacgctttaatgcagctgaatgaaatcaagccaggcttgcaatacacccttctgagccagacaggcccagtccacgcccctctgttcgtgatgagcgttgaggtgaacggccaggtctttgagggtagcggccccacgaagaaaaaggcaaagctgcacgcggccgagaaggctctgaggagtttcgtgcagtttcccaatgcgtccgaagctcatcttgcgatgggaaggaccctgtcagttaatactgattttacatcggaccaggccgactttccagacacactgttcaatgggttcgagacccccgataaggcagagcccccgttctacgtgggatccaatggtgatgactcgttcagtagttcaggcgacctctccttatcggcctcaccggtcccagctagtctggcgcaacccccccttcctgtgcttcctccattccctccaccatccggcaagaaccctgtgatgatcctaaacgagctgagaccaggcctcaaatacgactttttgtccgagtcaggcgaatcccacgccaagtccttcgtgatgtctgtcgttgtcgacggacagttctttgaaggctcagggcgtaacaagaaattagcgaaggccagagcagcccagtccgccttagctgccatcttcaacttacatcttgaccagactcctagccgacagccaattccgagcgagggtctgcagctgcatctgccccaggtgctggctgacgccgtgagccgactggtactcggtaaatttggtgaccttacggataattttagcagccctcacgcgagaaggaaggttttggccggcgtcgttatgaccaccggaaccgatgtgaaggacgctaaggtcatttccgtgagcactggcacaaagtgcataaatggagagtacatgtcggacaggggtctggctctcaacgactgccacgccgagatcatctcccgccgttccctgttaagattcttgtacactcagcttgaactctatctgaataataaagatgatcagaagaggtcaatattccagaaaagcgagcgcgggggatttagattgaaagaaaacgtgcaattccacctttacatctctaccagcccatgcggcgacgctaggatcttctcgcctcacgaaccaatcctggagggtagtcgttcttatacgcaggcaggtgttcagtggtgcaatcacgggagcctgcagccaaggcccccagggctcctcagcgacccctccacttcgacctttcagggcgccggcacaacggagccggcagacagacatcccaaccgaaaggctcggggccagttaagaaccaaaatcgagtcgggggagggcacgatcccagttagatctaacgcgtctatacagacctgggatggcgtgctgcagggggaacggctgctaacaatgtcctgttccgataaaatagccagatggaacgtcgtcggcatccagggaagtttgctgagtatttttgtggagcccatttacttttccagcatcattctagggagtctctatcatggcgaccacctgtccagagccatgtatcagcggatttccaatatcgaagatctcccgcccctttacaccttgaataagccactgctgtccgggatcagtaacgccgaggcacgccagcccggcaaagccccgaatttctcagtcaattggacggtcggcgacagcgccatcgaggtaatcaatgccacaacgggcaaagacgagctcggccgcgctagtagattatgcaaacacgcgctgtattgccgttggatgagggtgcacgggaaggttccttcccacctgctgaggtcaaagatcacgaagcccaacgtttatcacgagtcgaagctggcagccaaggagtaccaggccgctaaagcaagattattcacagcttttattaaggctggacttggtgcttgggtcgaaaaaccaactgaacaagatcagtttagcttaactccctag

SEQ ID NO: 295609 - DNA, 2226 bp, Artificial Sequence
  derived and/or modified sequence
atggacatcgaagacgaggagaacatgtcaagcagcagtactgatgtaaaggagaaccggaatctggacaacgtgtcaccaaaagacgggtctacgcccggccccggagagggcagtcagctcagcaatggcggtggcggaggccctggtcggaaaaggcctctggaagaaggctccaatgggcacagtaagtatcgccttaagaagcgtagaaaaacccctggccctgtgctgccaaagaatgcactgatgcaactcaacgaaattaagcccgggcttcagtacacactgctctcccagaccggccccgtccatgcccccttgttcgtcatgtcagttgaggtcaatggacaggtatttgagggctcaggccccactaaaaaaaaagcgaagctgcacgcagccgaaaaggcattacgatcttttgtgcagtttcctaatgcgtcagaagcacacttggccatgggacgaaccctttctgtcaacactgacttcacatctgatcaggcggacttcccagacacactttttaatggtttcgagacccccgacaaggcagagccccctttttacgtcggtagcaatggcgatgattctttctcctccagtggggatctctccctgtccgccagtcctgtacccgcctctctcgcccagccccccctgcccgtccttccgccttttccgccgccctccgggaaaaatcccgtgatgatcttgaatgaactaaggccgggtctaaaatacgatttcctcagcgagagcggagaaagccacgccaagtccttcgtgatgtctgtcgtcgttgatggccagttttttgagggatccggacggaataagaaacttgccaaggcaagagcggctcaatcggccctggccgcaatctttaatctacacctggaccagactccaagtagacagcctattccatctgaaggcctgcaattacatttaccacaggtcctcgccgatgcagtgtccaggttggtgctgggaaagttcggcgatctgacagacaacttctcaagtccccatgctaggcggaaggtccttgctggggtggttatgacgacagggactgacgtcaaggatgccaaggtgatttccgtttccaccggcactaagtgcatcaatggagaatatatgtccgatcgcggtctagccctcaatgattgccacgctgagatcatcagccggaggtccctccttcgatttctttacacccaattggaactatatttgaataataaagatgatcagaaacgatcaatattccagaagtccgagagaggcgggtttcggctgaaggaaaatgtccagtttcacctctatatcagcacctccccttgcggtgatgcccgcatctttagcccccacgagccaattcttgaaggctctcgctcctatacccaagctggtgtgcagtggtgcaaccacggtagcttgcagccacggccgcccgggctactgtcagatccttccacctcaacattccagggcgccgggaccaccgaacccgcagaccgccaccccaacaggaaagcccgtgggcagctgaggaccaagattgagagtggcgaaggaacgatcccggtgagaagcaatgcctctattcagacatgggatggtgtgcttcaaggggaaagattgttgacaatgagttgctccgataaaatcgccagatggaacgttgtgggaatccagggtagtcttctgtcaatcttcgtggaacctatttatttctccagtatcattttggggagcctgtaccatggcgaccatttgtccagagctatgtatcagagaattagcaatatcgaagacctgcccccactgtacactctgaacaaacccctgttaagtggtatatccaatgccgaggccagacaacctggcaaagctcccaacttcagcgtaaattggaccgtaggtgatagtgccattgaggtaattaatgctacaactggaaaggatgagctagggcgggcctctaggctctgcaagcatgccctatactgtaggtggatgcgcgtccatggtaaggtgcctagccacttgctgaggtccaaaattacaaagcccaacgtttatcatgaatctaaattggctgccaaggaataccaagcagcaaaggctcggttatttactgccttcatcaaagccggactgggcgcctgggttgagaagccaactgaacaggaccagttcagcttgaccccttag

SEQ ID NO: 295610 - DNA, 2097 bp, Artificial Sequence
  derived and/or modified sequence
atggacatcgaggatgaggaaaacatgtcaagctcgtcaaccgatgtcaaagagaatcgaaacctggacaatgtaagcccaaaggacggatccaccccgggccccggcgagggaagtcaactctccaatggaggagggggtggcccaggcagaaagagaccgttagaagaaggatcaaatggacactctaagtatagattgaagaagcgacggaagactcctgggcccgtgctgccaaagaacgccctcatgcagctgaatgaaataaagcccggtctccagtacacacttttaagtcagaccggacctgtccacgcccctctgtttgtcatgtcagtggaagttaatgggcaggttttcgaggggtctggccccacaaaaaaaaaagccaagctgcatgcggcggagaaggcactacggtcctttgttcagttccctaacgcaagcgaggctcacctagcaatgggaaggaccctctcagtgaataccgactttacgagcgaccaggccgactttccggacactctctttaatggtttcgagactcccgacaaagcggagccacccttctacgtgggatccaatggagatgactcattcagttcctcaggggacttgtctttatctgcctcaccagtacctgcttctttggcccaaccaccgctcccagtgctgcccccattcccccccccttccggcaaaaatccagtgatgatcctcaacgagctgagacccggccttaagtacgatttcctttctgaatcaggagagtctcatgcaaaaagtttcgtgatgtccgtggtcgtggacggccaatttttcgagggatcagggagaaacaagaaactcgcgaaggcacgggctgcccagtccgccttagcagccatctttaatctccaccttgaccagacacccagcaggcagccaattccatctgaaggacttcagctacacctgccccaagtgctcgctgacgctgtgagcagactcgtgctcggcaaatttggtgacttgaccgacaatttctccagtccacatgcacgccgaaaggtattagcaggcgtggtgatgactacaggaaccgatgtgaaggacgctaaggtaatcagtgtatccacagggacgaaatgcataaacggtgaatatatgtcggatagggggttagctctgaatgattgtcacgcagagatcatcagccgccgaagcctcttaagattcctgtatacgcagctggagttgtatctgaacaataaagacgatcaaaaaaggtcaattttccagaagagcgaacgcggcggcttcaggttgaaagagaacgtgcagtttcacttatatatttctacaagtccatgtggcgacgcaagaatcttcagtccgcacgaacctatcctagaaggcagccgatcgtacacacaggccggcgtgcagtggtgtaaccacgggagtctgcaaccaagaccgcctgggctacttagcgatcccagcacaagcacctttcagggtgccgggactaccgagcccgccgacagacaccccaatagaaaagctagaggccagcttaggaccaagatcgagtcaggcgaaggtacaatcccagtacggtcaaatgccagcattcagacatgggatggggtgttgcaaggtgagcgtctgctgacgatgtcttgcagtgacaagatcgcacgctggaatgttgtcggcatacagggaagcctgttatcaattttcgtggagccaatatatttttcctccataatcttggggtctctttaccatggagaccaccttagccgggcgatgtaccagaggattagcaatatagaagatctacctcctctgtatacgctaaacaaacctctgttgagcggaatcagtaacgcagaagcacgccagcctggtaaagcacccaactttagcgtgaattggaccgtgggagactccgcgattgaagttatcaacgccactactggcaaggatgagctgggccgcgcaagccgtttgtgtaaacatgctttgtactgccgatgggcatgcgcgagacaggggtcactccctctgaccactctccaggattatcaggcgcaacgggttccatag

SEQ ID NO: 295611 - DNA, 2226 bp, Artificial Sequence
  derived and/or modified sequence
atggacattgaagatgaggagaacatgagcagcagcagcacagatgtgaaggagaacagaaacctggacaacgtgagccccaaggatggcagcaccccaggccctggagagggcagccagctgagcaatggaggcggcggcggccctggcaggaagaggcccctggaggagggcagcaatggccacagcaagtaccgcctgaagaagaggaggaagaccccaggccctgtgctgcccaagaatgccctgatgcagctgaatgagatcaagccaggcctgcagtacaccctgctgagccagacaggccctgtgcacgcccccctgtttgtgatgtctgtggaggtgaatggccaggtgtttgagggcagcggccccaccaagaagaaggccaagctgcacgccgctgagaaggccctgcggagctttgtgcagttccccaatgccagcgaggcccacctggccatgggccgcaccctgtctgtgaacacagacttcaccagtgaccaggccgacttcccagacaccctcttcaacggctttgagaccccagacaaggccgagccccccttctacgtgggcagcaatggagatgacagcttcagcagcagcggggacctgagcctgagcgccagccctgtgcctgccagcctggcccagccccccctgcctgtgctgccccccttccccccacccagcggcaagaaccctgtgatgatcctgaatgagctgcggcccggcctgaagtatgacttcctgtctgagagcggggagagccacgccaagagctttgtgatgtctgtggtggtggatggccagttctttgagggcagcggcaggaacaagaagctggccaaggcccgggccgcccagagcgccctggccgccatcttcaacctgcacctggaccagacccccagccggcagcccatccccagcgagggcctgcagctgcacctgccccaggtgctggctgatgctgtgtcccggctggtgctgggcaagtttggagacctgacagacaacttcagcagcccccacgcccggaggaaggtgctggccggcgtggtgatgaccactggaacagatgtgaaggatgccaaggtgatctctgtgtccacaggcaccaagtgcatcaatggagagtacatgtctgaccggggcctggccctgaatgactgccacgccgagatcatcagccgccgcagcctgctgcgcttcctgtacacccagctggagctgtacctgaacaacaaggatgaccagaagaggagcatcttccagaagtctgagcggggcggcttccggctgaaggaaaatgtgcagttccacctgtacatcagcaccagcccctgtggagatgcccgcatcttcagcccccatgagcccatcctggagggcagccgcagctacacccaggccggcgtgcagtggtgcaaccacggcagcctgcagcccaggcctcctggcctgctgagtgaccccagcaccagcaccttccagggcgccggcaccacagagcctgctgacagacaccccaacaggaaggcccggggccagctgcggaccaagattgagagcggggagggcaccatccctgtgcgcagcaatgccagcatccagacctgggatggagtgctgcagggcgagcggctgctgaccatgagctgcagcgacaagatcgcccgctggaatgtggtgggcatccagggcagcctgctgagcatctttgtggagcccatctacttcagcagcatcatcctgggcagcctgtaccacggggaccacctgagccgggccatgtaccagaggatcagcaacatcgaggacctgccccccctgtacaccctgaacaagcccctgctgagcggcatcagcaatgctgaggcccggcagcccgggaaggcccccaacttctctgtgaactggacagtgggggacagcgccattgaagtcatcaatgccaccaccgggaaggatgagctgggccgggccagccggctgtgcaagcacgccctgtactgccgctggatgagggtgcacggcaaggtgcccagccacctgctgcggagcaagatcaccaagcccaacgtgtaccacgagagcaagctggccgccaaggagtaccaggccgccaaggcccggctcttcaccgccttcatcaaggccggcctgggcgcctgggtggagaagcccacagagcaggaccagttcagcctgaccccctag

SEQ ID NO: 295612 - DNA, 2097 bp, Artificial Sequence
  derived and/or modified sequence
atggacattgaagatgaggagaacatgagcagcagcagcacagatgtgaaggagaacagaaacctggacaacgtgagccccaaggatggcagcaccccaggccctggagagggcagccagctgagcaatggaggcggcggcggccctggcaggaagaggcccctggaggagggcagcaatggccacagcaagtaccgcctgaagaagaggaggaagaccccaggccctgtgctgcccaagaatgccctgatgcagctgaatgagatcaagccaggcctgcagtacaccctgctgagccagacaggccctgtgcacgcccccctgtttgtgatgtctgtggaggtgaatggccaggtgtttgagggcagcggccccaccaagaagaaggccaagctgcacgccgctgagaaggccctgcggagctttgtgcagttccccaatgccagcgaggcccacctggccatgggccgcaccctgtctgtgaacacagacttcaccagtgaccaggccgacttcccagacaccctcttcaacggctttgagaccccagacaaggccgagccccccttctacgtgggcagcaatggagatgacagcttcagcagcagcggggacctgagcctgagcgccagccctgtgcctgccagcctggcccagccccccctgcctgtgctgccccccttccccccacccagcggcaagaaccctgtgatgatcctgaatgagctgcggcccggcctgaagtatgacttcctgtctgagagcggggagagccacgccaagagctttgtgatgtctgtggtggtggatggccagttctttgagggcagcggcaggaacaagaagctggccaaggcccgggccgcccagagcgccctggccgccatcttcaacctgcacctggaccagacccccagccggcagcccatccccagcgagggcctgcagctgcacctgccccaggtgctggctgatgctgtgtcccggctggtgctgggcaagtttggagacctgacagacaacttcagcagcccccacgcccggaggaaggtgctggccggcgtggtgatgaccactggaacagatgtgaaggatgccaaggtgatctctgtgtccacaggcaccaagtgcatcaatggagagtacatgtctgaccggggcctggccctgaatgactgccacgccgagatcatcagccgccgcagcctgctgcgcttcctgtacacccagctggagctgtacctgaacaacaaggatgaccagaagaggagcatcttccagaagtctgagcggggcggcttccggctgaaggaaaatgtgcagttccacctgtacatcagcaccagcccctgtggagatgcccgcatcttcagcccccatgagcccatcctggagggcagccgcagctacacccaggccggcgtgcagtggtgcaaccacggcagcctgcagcccaggcctcctggcctgctgagtgaccccagcaccagcaccttccagggcgccggcaccacagagcctgctgacagacaccccaacaggaaggcccggggccagctgcggaccaagattgagagcggggagggcaccatccctgtgcgcagcaatgccagcatccagacctgggatggagtgctgcagggcgagcggctgctgaccatgagctgcagcgacaagatcgcccgctggaatgtggtgggcatccagggcagcctgctgagcatctttgtggagcccatctacttcagcagcatcatcctgggcagcctgtaccacggggaccacctgagccgggccatgtaccagaggatcagcaacatcgaggacctgccccccctgtacaccctgaacaagcccctgctgagcggcatcagcaatgctgaggcccggcagcccgggaaggcccccaacttctctgtgaactggacagtgggggacagcgccattgaagtcatcaatgccaccaccgggaaggatgagctgggccgggccagccggctgtgcaagcacgccctgtactgccgctgggcctgtgcccggcagggcagcctgcccctgaccaccctgcaggactaccaggcccagagggtgccctag

SEQ ID NO: 295613 - DNA, 2226 bp, Artificial Sequence
  derived and/or modified sequence
atggacatcgaggacgaggagaacatgagcagcagcagcaccgacgtaaaagagaacaggaacctggataacgtctcacccaaggatggatctactcccggtcccggcgagggatcacagctgagtaacggggggggagggggacctggtaggaagcgccccctcgaagaaggttcgaacgggcatagtaagtaccggctgaagaagcggcgaaagactcctggccctgtgctgcctaagaatgctctcatgcagctgaacgaaataaagcctggtcttcaatacactcttctgagccagaccgggcccgtgcacgctcctctctttgtgatgtcggtggaagtgaacggccaggtgtttgaaggctcgggccccacgaaaaaaaaggccaaacttcatgccgccgagaaagcactgagaagcttcgtccaattcccaaatgcatctgaagctcacctagctatgggaaggactcttagcgttaacaccgatttcacgtcagatcaggctgacttccctgacactctcttcaatgggttcgaaactcctgacaaagccgagcctcccttttacgttggttcaaatggagatgacagtttttctagcagtggagatctctcactgtcagcgtctcccgtgcccgcctcactcgctcaaccaccattaccagtacttcccccatttccccccccctctggtaaaaaccccgtaatgatcctgaatgagttgcgccccggcctgaaatatgactttctcagcgagtccggggagagtcacgcgaaatcattcgtgatgtctgtggtcgttgacggccagttcttcgagggcagcggtagaaataagaagctagccaaggcccgggctgcccagtctgcacttgccgctatcttcaacttgcatctcgatcagactccatcccggcaacccatcccctcagagggtctccagctccacctcccccaggtcctggcggatgcagtgtcacgcttagtcttgggcaaatttggggatcttacagataacttcagctctcctcacgcccggcggaaggtgctggccggtgtggtgatgacaacaggtacagatgtgaaggatgccaaagtaatatctgtatcaacagggaccaaatgtattaatggcgagtatatgtccgacaggggcctggccctaaacgactgtcatgctgagataatatctcgccggtctctgcttagatttctttatacccagctcgaactctatctgaacaataaagatgatcagaagcgcagcattttccaaaagagtgaacgaggaggtttccgcctaaaggaaaatgtgcaattccacttgtatatctcaacaagcccctgtggggatgctcgcattttcagcccacacgaacccattttagagggttctcgatcttatacgcaggcaggcgtgcagtggtgtaaccatggatccctccagccaagaccgcccggcctcctatccgatccaagtacttcaaccttccaaggcgctgggacgacggagcccgcagacagacaccctaatcgtaaggcccgtgggcagctgcggactaagatcgagtctggggagggtaccattcctgtgaggtctaatgcgtccattcaaacatgggatggcgtcttacagggagagcggctgctgaccatgagttgttccgacaaaatagcccggtggaatgtcgttgggattcagggtagcctactgtcaatctttgtggagccaatttattttagttccataatcctggggagcttatatcatggggaccatctgagccgagctatgtaccagagaatctcgaatattgaggacctccctccattgtatacactgaacaagcccttgctctcagggatttctaatgccgaggccagacaaccggggaaggcaccaaacttctcagtgaattggacagttggagatagtgcaattgaggtgattaacgccactacggggaaggatgagctgggtagagccagtaggctctgcaaacatgcgttatactgcagatggatgcgtgtacacggtaaggtgccatcccatctgcttagatccaaaattacaaaaccaaacgtgtatcatgagtcaaagttagccgccaaagaataccaggcagctaaagcaaggctgtttacagcatttattaaggcaggcctgggagcttgggtggagaaaccaacagagcaggatcagttctctctgacaccttag

SEQ ID NO: 295614 - DNA, 2226 bp, Artificial Sequence
  derived and/or modified sequence
atggacatcgaggacgaggagaacatgagcagcagcagcaccgacgtgaaagaaaacagaaatttagacaacgtgagtcctaaggatggctctactccaggtccgggcgaaggctcacaactgagcaatggtggcggaggcggtcctggcaggaagcgccctctcgaggagggatccaacggccattctaagtacaggctgaaaaagagacgaaaaacgccaggcccagtgctcccaaaaaacgcgctgatgcagctgaacgaaattaagcccggacttcagtatacgcttctgtcccaaactggcccggtacatgcacccctgtttgtgatgtcagtcgaagtcaacggtcaagtatttgaaggatccgggccaaccaagaaaaaggccaaactccacgctgcagagaaggctctcagatcatttgtgcagtttccaaacgcttctgaagctcacctggcaatgggacgaaccctgtcagtaaatacagacttcaccagtgaccaggcagactttccggataccttgttcaacggattcgagaccccagacaaggccgaaccgccattttacgtcggaagcaacggcgacgatagtttttcgtcctcgggagatctctctctgagcgcgtcccctgtgccagcatctctggcacagccaccgctgcctgtacttcccccatttcctcccccaagtgggaaaaatcctgtgatgattctgaacgagctgagacccgggctgaaatatgatttcttgtctgaaagcggagaatcccatgccaagtcttttgtgatgtctgtagtcgtagatggccaattttttgagggctctggcagaaacaagaagcttgctaaagcacgcgctgcccagagtgctcttgccgcaatttttaaccttcacctggaccagaccccaagcaggcagcccataccttcggagggtctccagctgcatttgccccaagttttagctgacgctgtgagtcggttagtgctgggaaagttcggcgacttgaccgacaacttctcctctccacacgccagaaggaaagtcctcgcaggtgtcgtgatgaccaccggtaccgatgttaaggatgcaaaggtgatttcagtcagcacgggaactaagtgcatcaatggggaatatatgtctgataggggcctggctctgaatgattgtcacgctgagattatcagccgcagatcactgctcaggttcctgtacacacagctcgaactgtatctgaacaacaaggatgatcagaaacgtagtatctttcagaaatcagagaggggcggatttcggctgaaggaaaatgtacagtttcacctttacatctccacgagcccatgcggcgatgcacgcatttttagcccccatgagcccatcttagaaggtagtcgctcctatactcaagcaggcgtgcagtggtgcaatcacggtagtctccagccacggcctcctggtctgctctctgatccttcaacttcaactttccagggcgccggaactactgaacccgctgatcggcaccctaaccggaaggcgcgcggtcagctgagaacaaaaatagagagcggggaaggcaccatccccgtcaggtcaaacgcctctattcagacctgggacggggtgcttcagggggaaaggctgctgacaatgtcctgctccgataagatagctaggtggaacgtggtcggaattcagggatctttgctgtccatctttgtggaacccatctatttcagcagcattatcctgggctctctttatcatggggatcacctaagtcgggctatgtaccagcggatctcaaacatcgaagatttgccacccttgtataccttaaataaacctctcctgagcgggatatctaacgccgaggcgagacagcctggcaaggctccgaattttagtgtgaactggaccgtgggggactcggctatcgaagtgatcaatgctactaccgggaaggatgaacttggccgagcatcaagattgtgcaaacacgcactgtactgccggtggatgagagtgcacggcaaagtaccaagccacttgcttcgatccaaaatcacaaaacccaacgtctaccacgagagtaaattggctgctaaagagtaccaagccgcaaaggcccggctgttcaccgccttcattaaagcaggcttaggagcctgggtggagaaacctactgagcaggaccagttcagcctcactccttag

SEQ ID NO: 295615 - DNA, 2226 bp, Artificial Sequence
  derived and/or modified sequence
atggacatcgaggacgaggagaacatgagcagcagcagcaccgacgttaaagaaaatagaaatctggataatgtatcacccaaggacggctccactcccggccctggggaagggtcacagctgagcaacggcggaggagggggccctgggaggaagcggccccttgaagagggaagtaatggacactccaagtaccgcctgaagaaaagacgaaagactccaggaccggttttgccaaaaaatgcactcatgcagttaaatgaaatcaagcctgggctgcaatataccttgctcagtcagacagggcccgtgcatgccccgctatttgtgatgtcggtggaagtcaacgggcaggtgtttgaaggctctgggccaaccaaaaagaaagccaagctgcacgccgccgagaaggcactgagatcttttgtgcagtttccaaatgcaagcgaggctcatctggctatgggtaggaccctgagcgtgaacaccgacttcacgtcggaccaggccgattttccagacaccctctttaacggcttcgagactccagacaaagctgagcctccattctacgtggggagcaacggggatgatagcttctccagttcaggagatctgtccttgagcgcctctccagtgcccgccagtctggctcagccccccctgcctgtgctcccaccttttccgccaccatccggcaagaaccccgttatgatccttaatgaacttagaccaggcttaaagtatgatttcctgagtgagtcgggtgaaagccacgccaagtccttcgtgatgtccgttgttgtagacggacagttttttgaaggctccggacgcaacaagaagcttgccaaggcaagggcagcacagagtgcactcgccgccatcttcaatctacatctcgaccaaaccccctcaagacaacctatcccaagcgaaggactacaattgcacctgcctcaggtgctggctgatgccgtgagccgcctggtgctgggaaagttcggcgacctgaccgacaacttctcgtcccctcatgctcgacgcaaggtattggcaggagtcgttatgaccactggaaccgatgtgaaagacgccaaagtaatctctgtgtctactgggacaaagtgcattaacggcgaatatatgtcagaccggggtctggccctgaatgattgccacgcagaaattatcagccgccgatctctgcttcgttttctgtatactcagctcgagctgtacctgaacaacaaggatgatcagaagcgttcaattttccaaaagagcgaacgaggcggattcaggctgaaagaaaacgttcagtttcacctgtacatctcaacctcgccttgcggggacgcgcggatcttttctccccatgagcccatcctggagggatctagatcatacactcaagccggtgtacagtggtgcaatcacggctcccttcaacccagacctcccggacttctatcagacccttcaacctctacttttcagggcgcagggacgacagagcctgcagaccgacatcctaaccggaaagctagaggtcagcttaggacgaagatcgagtctggagagggaacgattcccgtgcgcagtaacgcctccatacagacctgggatggagtgctgcagggggaacgactgctgacaatgtcttgttctgacaagatcgcaaggtggaatgttgtgggcatacaaggttctctcctgtctatcttcgtggagcccatttacttttcctctattattctgggatcactctatcacggcgatcatctgtcccgagcgatgtaccaaaggatctctaacatagaggacctgccacccctctacacacttaacaagcctctactttccggcatttccaacgccgaagctcggcaacccggcaaagctcctaactttagcgtcaattggaccgtcggggactccgcaatcgaggtcattaatgcaactactgggaaggatgaactcggtcgcgccagcaggttgtgtaaacacgcactgtactgccggtggatgcgagtgcacgggaaggtgcctagtcacctcctgagaagcaagataactaaacccaacgtttaccatgaatctaagctggcagccaaggaataccaggccgccaaggctcggctgttcaccgccttcataaaggccggtcttggcgcatgggtcgagaaacccactgaacaggaccagttctctttgacaccctag

SEQ ID NO: 295616 - DNA, 2097 bp, Artificial Sequence
  derived and/or modified sequence
atggacatcgaggacgaggagaacatgagcagcagcagcaccgacgtcaaagaaaacagaaacctcgacaacgtctcccccaaggacgggtccactccaggcccaggcgagggcagccagttgagcaacggaggtggcgggggacctggtcggaagaggcctctggaagaagggagtaatggccattctaagtatcgcctgaaaaaacgcaggaagacaccaggaccagtattgcctaaaaacgcactgatgcagctgaacgaaattaaacccggcttgcaatataccttgctcagccagacaggcccagttcacgcacccctgttcgtgatgtcggtggaagtcaatggtcaggtgttcgaggggagtggacccacaaagaagaaggcaaagctgcatgccgcggagaaagccctcaggagtttcgttcagttcccaaacgcgagtgaggcgcacctggcaatggggaggaccttatctgtgaacacggacttcacatccgaccaagccgacttccctgacaccctctttaatgggtttgaaacaccggacaaggccgagccccctttctacgtcggctccaatggggacgactcattctcttcaagtggtgatctgagcctcagcgcatcccccgtgcctgccagccttgcccagccgccattgcctgtcctgcccccatttccccccccatctgggaagaatccggtaatgattctcaatgagttgcggcctggcttaaaatatgatttcctgtcagaaagcggggagtcccacgccaaaagcttcgtgatgtcagtggttgtcgacggccagtttttcgagggcagcgggcgcaataaaaagcttgcaaaggcccgcgcagcccagtctgcactggcggcgatttttaacctccatctcgaccagacaccatcacgacaaccaatcccctccgagggtctgcagctgcatttgcctcaggtgcttgccgatgccgtctcaaggctcgtgctaggcaagtttggcgatcttacagacaatttttcatccccccacgcccggcgcaaagtcctggcgggggtggttatgacaaccggtacagacgtcaaagacgctaaggtgatttccgtttctaccggtacaaagtgtattaacggggaatacatgtccgacaggggcctagccctgaatgactgtcacgctgagattatttccaggcgttcactgctgcggtttctctatacccaactcgaactctacctgaataacaaagatgatcaaaagcgctccatattccaaaaaagtgagcggggtggcttccgactgaaagaaaatgtacaattccacctgtacatatccacttctccatgcggagacgccaggatcttctcacctcatgaacccatcttagaggggagccgcagctatacacaggcaggggtgcaatggtgtaatcacggcagtctgcaaccaagaccaccaggcctgctgtctgaccctagcacttcaacatttcagggagctggtactacagagccagctgataggcaccccaaccggaaagcaaggggacagctgagaaccaagattgaatctggggagggtacgatacctgtcaggagcaatgcatccatacagacttgggatggagtgttgcagggtgaacgtctccttaccatgagctgtagtgacaagattgctcgatggaatgtagttgggatacagggctccttgctgagcatctttgtggaaccaatctatttttcatctataattcttggctccctctaccacggagatcatctgtccagggcaatgtatcagcggataagtaatatcgaagacctgcctcctctctacactctgaacaaacccctcctcagtggcatctccaatgcagaagctagacagcccggaaaggcccctaatttttctgtcaactggactgtcggcgactcagcgattgaggtgataaatgcaacaactggcaaggacgagctggggagagcatctagactctgtaagcacgcattgtactgccgctgggcctgtgcgagacaaggctccctccccctgaccaccttacaggactaccaggctcagcgcgtgccttag

SEQ ID NO: 295617 - DNA, 2226 bp, Artificial Sequence
  derived and/or modified sequence
atggatatcgaagacgaggagaacatgtcctcaagttccactgatgtaaaggagaaccgaaatctcgataacgtctctcctaaagatggctctacaccaggccctggggagggttcgcagctaagtaatggcggtggcggaggcccaggcaggaaaaggcctctggaggagggaagcaacggccattctaaatatagactaaagaagcggcgtaaaactccaggtcccgttctacccaagaatgccctgatgcagctcaatgaaattaagcccggactgcagtacactttgctgagccagacaggcccagtccacgctcccttgtttgtcatgtccgtagaggtgaatggccaagtctttgagggaagtgggccaacaaaaaagaaggctaaactgcacgcagccgagaaggccctgcgctcctttgtccagttccctaatgcctcagaagcacacctggcgatgggtagaactctcagcgtcaatacggactttacttccgaccaggctgattttcctgacaccttgtttaacggcttcgagactcctgataaagccgaaccccctttttatgtgggatcaaacggagacgatagtttcagctcttccggcgatctgtcactgtctgcatctccagtcccagcatcgctggctcagcctcctttgccagtccttcccccttttccccctcccagtgggaagaatcctgtcatgatcttgaatgagctcagacctggactcaaatatgactttttgagcgagagcggcgagtctcacgccaagtcctttgttatgtctgtggtggtcgacgggcagttcttcgaggggtctgggaggaacaagaaactggcgaaggctagggccgcacagtccgccctggccgctatcttcaatctgcacctggatcagacgccctcccgccaacctattccctctgagggactgcagctgcacctgcctcaggtgctggctgacgcggtaagccggcttgtgctggggaagtttggtgatctgacagacaatttctcatctccccatgccagaagaaaggtactggccggagtggtgatgacaacaggcaccgatgtgaaggacgctaaggtcatctctgtgtccaccgggaccaagtgtataaatggagagtatatgtcggatagagggctggccctgaacgactgtcacgccgaaatcattagtagacggtccttgctgcgcttcctctacacacaacttgagctgtacttaaataacaaggatgaccagaaaagatccatatttcagaagagcgagcgcggaggattccgactcaaagaaaacgttcagttccatctttatatcagcacatcaccatgtggtgacgctaggattttcagccctcacgagccaatccttgagggatcccgctcgtatacacaggcaggcgtccagtggtgcaatcacggcagcctgcagccgaggccccctggtttgctgtccgacccctccacctctacatttcaaggagccggtaccacagaacccgctgatcggcaccccaatagaaaagcccgtggacagctgaggaccaaaatagagtctggcgaggggacaatccccgtgcgcagcaacgctagtatccagacctgggatggagtgcttcagggcgagcgactgctgactatgtcttgttccgataaaattgccaggtggaatgtcgtgggaatccaaggctccctcttgtccattttcgtggagcccatttattttagcagcatcatcttggggtccctttaccacggcgaccacctctcccgtgcaatgtaccagcgcatttcaaatatcgaagatctgccacctttatataccctgaacaaacccctgttgtcaggtatttcaaacgccgaagcacgccagcccggaaaagcacccaatttctcggtgaattggacagtgggagattctgccatcgaggtcataaatgccaccacgggcaaggacgaactgggacgggcatctaggctgtgtaaacacgcactgtactgtcgctggatgcgcgtgcatggaaaggtgccttcccacctgttgagaagcaaaatcacaaagccaaacgtgtaccacgaatcaaaattggcagccaaagagtaccaggctgccaaggcacggctctttaccgcctttattaaggcagggctgggggcttgggtggaaaagccgactgagcaggaccagtttagcctcactccttag

SEQ ID NO: 295618 - DNA, 2226 bp, Artificial Sequence
  derived and/or modified sequence
atggatatcgaagacgaagaaaatatgagttcctctagtaccgatgttaaagagaacagaaatctggataacgtttctccaaaggacgggtccactcccggacctggggagggttcccagctgagcaatgggggtggcggagggcctggcaggaagcgtccactggaagaaggctcgaatggccactccaagtataggctcaaaaaaagacgaaagacgcctggcccagtgctgcccaagaacgcactgatgcaacttaacgagatcaagcctgggctccagtatacgctgttaagtcagactgggccagtgcacgcgccactgttcgtgatgtccgtagaggtaaacggacaggtctttgaaggtagtggtcccaccaagaaaaaggcaaagctgcacgctgccgaaaaagctttacgaagttttgtccagtttcccaacgcgtcagaagcgcatctcgccatgggacggacactgagcgtcaacacagattttacgagcgatcaggcagacttccccgacactctgtttaatggctttgagacacctgataaagctgagcctccattctacgttgggagcaacggagacgacagctttagttccagtggagacctgtccttgtctgctagtccagtcccagctagcctggctcagcctcccctgcctgttctgccaccctttccacccccatcaggcaagaaccccgtgatgatattaaacgagcttcgtcccggtctcaagtatgacttcctctcggaatcaggggaatctcatgctaagtcttttgtgatgagcgtcgttgtcgatggccagttttttgagggatcagggaggaacaaaaaactcgccaaagctcgggcagcccagagcgctctggccgctatcttcaatctgcacctggaccagaccccatctcggcagcccatccccagtgaggggcttcagctgcacctcccacaggtcctggctgatgcagtgtcccgccttgtacttggcaaatttggagatctcaccgacaacttctcttccccccatgccaggcggaaggttctggctggggtggtaatgactactggaacggatgttaaggacgctaaggttatcagcgttagtaccgggactaaatgcattaacggagaatacatgtcagaccggggtttagctttgaacgactgtcacgctgaaattatctctaggcgctcactgctaagattcctatacacacaactcgaattatacctcaataacaaggatgaccaaaaaagatctatattccaaaagagcgagagagggggtttccgcttaaaggaaaacgtgcagttccatctgtacatctccacatccccatgtggtgatgctcgcatcttcagcccccacgaaccgatcctggaaggatctcgatcctacacacaggcgggtgtgcaatggtgcaaccacggcagtctccagcctcggcctcctggcttgctgtccgacccgtcgactagtactttccagggtgccggaacaacagagccagcggaccgtcatccaaatcggaaagctcgtggccagctgaggactaaaatcgaatctggggaaggaactatccctgtgcgttccaatgcctctatccagacctgggacggagtgcttcagggcgaaagactcctcaccatgagttgcagtgacaagatcgctaggtggaatgtagtcggtattcaaggctctcttttgagcattttcgtcgaacctatctatttttcgagcatcatccttgggtcactgtatcacggggaccatttatctcgcgctatgtaccaacgcatttccaatatcgaggacttgcctccgctctacacattgaacaaacctctgctgtctgggatctcaaatgcagaagccagacagccaggcaaggctcccaactttagcgtcaactggacagttggggactctgctatagaggttataaatgcaaccactgggaaggatgagctgggcagggctagtcgtttatgtaagcatgccttgtattgccggtggatgcgcgttcatgggaaggtgccatcacatctcttgagaagcaaaataaccaagccgaacgtgtatcacgagagcaaacttgctgctaaggaatatcaggcagccaaggcccgactgttcacagcgttcatcaaagcaggactgggggcttgggtggaaaagccaactgagcaggaccagttcagtctgactccatag

SEQ ID NO: 295619 - DNA, 2226 bp, Artificial Sequence
  derived and/or modified sequence
atggacattgaagacgaagaaaacatgtcctcgtcctccacggatgtgaaggaaaacagaaatctcgataacgtgagtcctaaggacggctcgactccgggacccggtgagggcagccaactgtccaatgggggagggggaggcccagggaggaaaagacccctggaggagggctctaacggccattccaaatacagactgaagaaacgacggaaaaccccaggacctgtcctgcccaagaatgctctaatgcagttgaacgaaattaagcccggtttgcagtatactctgttgagccagacgggaccagtgcatgctccgctgtttgtcatgtccgtcgaagtgaatggccaggtctttgagggaagcggtccaaccaaaaaaaaggctaagttgcacgcagcggagaaggcactgaggagtttcgtgcagttccctaacgcttctgaggcccaccttgccatggggagaacgcttagtgtgaacactgactttactagcgatcaagcggactttcctgatactctgtttaatggttttgagacccccgataaggctgaaccgcctttctacgtaggttcgaatggggatgactccttttcttccagcggggatctcagtctttcggccagccctgttcctgccagcttggcgcagcctcccctacctgttttgccgccttttcccccaccgtcaggaaagaatcctgtgatgatcttgaacgagctccgccctggactgaagtacgatttcctctcagagtccggggaaagccacgcgaagagcttcgtgatgtccgtcgttgttgatgggcagtttttcgaggggtcagggaggaacaagaagctcgcaaaagctcgagccgcacagtccgccctggctgccattttcaacctgcatctggaccagacgccctctaggcagcccataccctcagagggcttacagctccaccttccccaggtcttggcagacgcagtttctcgcttagttcttgggaagtttggagatctaaccgacaatttctccagtccccacgctagacgcaaggttctggccggtgtcgtaatgactacagggaccgacgtgaaggatgcaaaggtcattagcgtctctacaggcacaaaatgtatcaacggagagtacatgagcgatcgtggcctagcccttaatgattgccacgctgaaattattagcaggcgctccttgctgcggtttctgtatacccaactggaactttatctcaacaataaagacgaccagaagcggagcattttccagaagtcagagcgcggaggctttcgcctgaaagaaaacgtgcagtttcatttgtacatctcaacgtcgccctgtggagacgctaggattttctctccccatgaacccattctggaagggtctcgctcttatacacaggcgggtgtccaatggtgcaatcacggatcactgcagccacgaccacctggtctgcttagcgaccctagtacaagcacctttcagggggcaggaacgactgagccggcagaccgtcatccaaacagaaaggccagggggcaactccggactaagatagagtccggggaaggaaccattccagttcgctctaatgcctcaattcaaacatgggacggggtgctgcaaggcgagagattgctcaccatgtcatgcagcgataagatcgcgaggtggaatgtcgttggaatacagggcagcctcctgagtatctttgtggaaccaatatatttctcttcaatcattctcggctccctgtaccatggcgatcatctgtcccgagctatgtaccagcgcattagtaatatcgaagacctgccacctctctacactctgaacaagcctctcctgagtggcatttctaacgccgaagctaggcagccaggaaaggcaccgaatttttcggtgaactggaccgtgggagattctgctatcgaggtgatcaatgctaccaccgggaaggacgagctcgggcgagccagtagactctgcaaacacgctctttactgtagatggatgagagtgcatggcaaagtaccttctcacctcctgcgctccaaaatcaccaaaccaaacgtgtatcacgagtcaaaattagctgcaaaggaatatcaggctgccaaagcaaggcttttcactgctttcattaaggccggattgggggcttgggtcgaaaaacctaccgagcaggatcagtttagtctgactccatag

SEQ ID NO: 295620 - DNA, 2097 bp, Artificial Sequence
  derived and/or modified sequence
atggacattgaggacgaggagaacatgtccagttctagcacagatgtgaaagagaaccggaatctcgacaacgtgtctcctaaggacggatccactccgggacccggagagggatcacaactaagcaacggcggaggcggaggccctggaaggaagcgaccactcgaagaggggtccaacggccattctaaataccgtttgaagaagagacggaaaactcccggtcccgtcctgcccaagaacgccttaatgcaacttaacgaaatcaagccaggtcttcagtacacgctgctttctcagaccggtcccgtgcacgcacccttgtttgtgatgtctgttgaggtcaacggacaggtgtttgagggcagtgggccaacaaagaaaaaagcaaagctgcacgccgctgagaaggctctgcggtctttcgtgcagttcccaaatgcgtcagaagcacatttagctatgggaagaacactgtccgtcaacaccgatttcaccagtgatcaggccgacttcccggataccttatttaatggtttcgaaactccggacaaggcggagccgcctttctacgtcggatccaatggagacgactcctttagcagcagtggagatctgtccctgtccgcctcccctgttcccgctagcctcgcccagccacccctgcctgttcttccaccattcccccctcctagcggcaaaaacccagttatgattttaaacgaactccgacccggtcttaagtacgactttttgagcgagtctggcgagagccacgccaaaagtttcgtgatgtcagtggtcgtggatgggcagttcttcgaaggctctggcagaaacaaaaaactcgccaaggcccgagccgcacaatctgcattagctgctatctttaatctccaccttgatcaaactccctcacgacagccaattccctctgagggcctgcagttgcatctgccccaggttctggccgacgcagtgtcaagattagtgctgggcaaattcggcgacctgaccgataacttctcttccccacatgctagacggaaggtattggccggagtcgtaatgaccacaggtaccgatgttaaggacgctaaggtgatctccgtctctacgggtaccaaatgtattaacggcgaatatatgagcgaccgaggcctggcccttaacgattgtcatgctgagataatctctcgtagatccttattgaggttcctgtacactcaactcgagctttacctgaataataaggatgaccaaaagaggagcatatttcagaaaagtgaacgtggcggattccgtctaaaggaaaatgtgcagtttcacctttatattagtacatcgccctgcggagatgcccgtatcttttccccacacgagcctatcttggaaggatctcggagttatacacaggccggagtccagtggtgtaatcacggatctctgcagcccagaccccctggcttactgagtgacccgtcaacctcgaccttccaaggcgcagggaccaccgaaccagcggaccggcaccctaaccgcaaggctcggggacagctgagaactaaaatagaatccggagagggcactatcccagtacggagcaatgcttcaatccagacttgggacggcgtgctgcaaggcgagaggctcctgaccatgtcctgttccgacaagatcgctcgctggaacgtggtgggtatccagggttctctgctcagcattttcgtagagcctatctatttttcctccattattctgggcagcctttaccacggagaccacctctctagagcaatgtatcagcgaatctctaacatcgaagaccttcccccactctacaccttgaacaagcccttattgtccggaatcagtaatgcagaagctcgccagccgggaaaagcccctaatttttccgttaattggacagtgggagacagtgcaatcgaggtgatcaacgcaacaactggaaaagacgagctgggcagggcatcccggctgtgcaaacacgcactctattgtcggtgggcctgcgcgaggcaggggagtttgcccctaactaccctgcaagactatcaggcccagcgggtgccttag

SEQ ID NO: 295621 - DNA, 2226 bp, Artificial Sequence
  derived and/or modified sequence
atggacatcgaggacgaggagaacatgagcagcagcagcaccgacgtgaaggagaacagaaacctggacaacgtgagccccaaggacggcagcacccccggccccggcgagggcagccagctgagcaacggcggcggcggcggccccggcagaaagagacccctggaggagggcagcaacggccacagcaagtacagactgaagaagagaagaaagacccccggccccgtgctgcccaagaacgccctgatgcagctgaacgagatcaagcccggcctgcagtacaccctgctgagccagaccggccccgtgcacgcccccctgttcgtgatgagcgtggaggtgaacggccaggtgttcgagggcagcggccccaccaagaagaaggccaagctgcacgccgccgagaaggccctgagaagcttcgtgcagttccccaacgccagcgaggcccacctggccatgggcagaaccctgagcgtgaacaccgacttcaccagcgaccaggccgacttccccgacaccctgttcaacggcttcgagacccccgacaaggccgagccccccttctacgtgggcagcaacggcgacgacagcttcagcagcagcggcgacctgagcctgagcgccagccccgtgcccgccagcctggcccagccccccctgcccgtgctgccccccttccccccccccagcggcaagaaccccgtgatgatcctgaacgagctgagacccggcctgaagtacgacttcctgagcgagagcggcgagagccacgccaagagcttcgtgatgagcgtggtggtggacggccagttcttcgagggcagcggcagaaacaagaagctggccaaggccagagccgcccagagcgccctggccgccatcttcaacctgcacctggaccagacccccagcagacagcccatccccagcgagggcctgcagctgcacctgccccaggtgctggccgacgccgtgagcagactggtgctgggcaagttcggcgacctgaccgacaacttcagcagcccccacgccagaagaaaggtgctggccggcgtggtgatgaccaccggcaccgacgtgaaggacgccaaggtgatcagcgtgagcaccggcaccaagtgcatcaacggcgagtacatgagcgacagaggcctggccctgaacgactgccacgccgagatcatcagcagaagaagcctgctgagattcctgtacacccagctggagctgtacctgaacaacaaggacgaccagaagagaagcatcttccagaagagcgagagaggcggcttcagactgaaggagaacgtgcagttccacctgtacatcagcaccagcccctgcggcgacgccagaatcttcagcccccacgagcccatcctggagggcagcagaagctacacccaggccggcgtgcagtggtgcaaccacggcagcctgcagcccagaccccccggcctgctgagcgaccccagcaccagcaccttccagggcgccggcaccaccgagcccgccgacagacaccccaacagaaaggccagaggccagctgagaaccaagatcgagagcggcgagggcaccatccccgtgagaagcaacgccagcatccagacctgggacggcgtgctgcagggcgagagactgctgaccatgagctgcagcgacaagatcgccagatggaacgtggtgggcatccagggcagcctgctgagcatcttcgtggagcccatctacttcagcagcatcatcctgggcagcctgtaccacggcgaccacctgagcagagccatgtaccagagaatcagcaacatcgaggacctgccccccctgtacaccctgaacaagcccctgctgagcggcatcagcaacgccgaggccagacagcccggcaaggcccccaacttcagcgtgaactggaccgtgggcgacagcgccatcgaggtgatcaacgccaccaccggcaaggacgagctgggcagagccagcagactgtgcaagcacgccctgtactgcagatggatgagagtgcacggcaaggtgcccagccacctgctgagaagcaagatcaccaagcccaacgtgtaccacgagagcaagctggccgccaaggagtaccaggccgccaaggccagactgttcaccgccttcatcaaggccggcctgggcgcctgggtggagaagcccaccgagcaggaccagttcagcctgaccccctag

SEQ ID NO: 295622 - DNA, 2097 bp, Artificial Sequence
  derived and/or modified sequence
atggacatcgaggacgaggagaacatgagcagcagcagcaccgacgtgaaggagaacagaaacctggacaacgtgagccccaaggacggcagcacccccggccccggcgagggcagccagctgagcaacggcggcggcggcggccccggcagaaagagacccctggaggagggcagcaacggccacagcaagtacagactgaagaagagaagaaagacccccggccccgtgctgcccaagaacgccctgatgcagctgaacgagatcaagcccggcctgcagtacaccctgctgagccagaccggccccgtgcacgcccccctgttcgtgatgagcgtggaggtgaacggccaggtgttcgagggcagcggccccaccaagaagaaggccaagctgcacgccgccgagaaggccctgagaagcttcgtgcagttccccaacgccagcgaggcccacctggccatgggcagaaccctgagcgtgaacaccgacttcaccagcgaccaggccgacttccccgacaccctgttcaacggcttcgagacccccgacaaggccgagccccccttctacgtgggcagcaacggcgacgacagcttcagcagcagcggcgacctgagcctgagcgccagccccgtgcccgccagcctggcccagccccccctgcccgtgctgccccccttccccccccccagcggcaagaaccccgtgatgatcctgaacgagctgagacccggcctgaagtacgacttcctgagcgagagcggcgagagccacgccaagagcttcgtgatgagcgtggtggtggacggccagttcttcgagggcagcggcagaaacaagaagctggccaaggccagagccgcccagagcgccctggccgccatcttcaacctgcacctggaccagacccccagcagacagcccatccccagcgagggcctgcagctgcacctgccccaggtgctggccgacgccgtgagcagactggtgctgggcaagttcggcgacctgaccgacaacttcagcagcccccacgccagaagaaaggtgctggccggcgtggtgatgaccaccggcaccgacgtgaaggacgccaaggtgatcagcgtgagcaccggcaccaagtgcatcaacggcgagtacatgagcgacagaggcctggccctgaacgactgccacgccgagatcatcagcagaagaagcctgctgagattcctgtacacccagctggagctgtacctgaacaacaaggacgaccagaagagaagcatcttccagaagagcgagagaggcggcttcagactgaaggagaacgtgcagttccacctgtacatcagcaccagcccctgcggcgacgccagaatcttcagcccccacgagcccatcctggagggcagcagaagctacacccaggccggcgtgcagtggtgcaaccacggcagcctgcagcccagaccccccggcctgctgagcgaccccagcaccagcaccttccagggcgccggcaccaccgagcccgccgacagacaccccaacagaaaggccagaggccagctgagaaccaagatcgagagcggcgagggcaccatccccgtgagaagcaacgccagcatccagacctgggacggcgtgctgcagggcgagagactgctgaccatgagctgcagcgacaagatcgccagatggaacgtggtgggcatccagggcagcctgctgagcatcttcgtggagcccatctacttcagcagcatcatcctgggcagcctgtaccacggcgaccacctgagcagagccatgtaccagagaatcagcaacatcgaggacctgccccccctgtacaccctgaacaagcccctgctgagcggcatcagcaacgccgaggccagacagcccggcaaggcccccaacttcagcgtgaactggaccgtgggcgacagcgccatcgaggtgatcaacgccaccaccggcaaggacgagctgggcagagccagcagactgtgcaagcacgccctgtactgcagatgggcctgcgccagacagggcagcctgcccctgaccaccctgcaggactaccaggcccagagagtgccctag

SEQ ID NO: 295623 - DNA, 156 bp, Artificial Sequence
  derived and/or modified sequence
atgacccacgacaagagctggagaagatgcagcatcagcggcagcaccaagtgcagatgcggcagcagaatcgccggccccaacgccctgggcagcggcggcagcagaagcagcagcagcagcagcagaagcatcctgagcagcagcatcctgtag

SEQ ID NO: 295624 - DNA, 132 bp, Artificial Sequence
  derived and/or modified sequence
atgacccacgacaagagctggagaagatgcagcatcagcggcagcaccaagtgcagatgcggcagcagaatcgccggccccaacgccctgggcagcggcggcagcagaagcagcagcagcagcagcagatag

SEQ ID NO: 295625 - DNA, 117 bp, Artificial Sequence
  derived and/or modified sequence
atgacccacgacaagagctggagaagatgcagcatcagcggcagcaccaagtgcagatgcggcagcagaatcgccggccccaacgccctgggcagcggcggcagcagaagcagctag

SEQ ID NO: 295626 - DNA, 117 bp, Artificial Sequence
  derived and/or modified sequence
atgacccatgacaaatcatggcggcggtgctcaatctctggatcaacgaaatgtcgatgcggcagccgtattgcagggccaaatgcactgggctctggaggcagcaggagttcgtag

SEQ ID NO: 295627 - DNA, 156 bp, Artificial Sequence
  derived and/or modified sequence
atgacccatgacaagtcctggaggcgctgcagcatcagcggcagcaccaagtgccgctgtggcagcagaattgctggccccaatgccctgggcagcggcggcagccgcagcagcagcagcagcagccgcagcatcctgagcagcagcatcctgtag

SEQ ID NO: 295628 - DNA, 132 bp, Artificial Sequence
  derived and/or modified sequence
atgacccatgacaagtcctggaggcgctgcagcatcagcggcagcaccaagtgccgctgtggcagcagaattgctggccccaatgccctgggcagcggcggcagccgcagcagcagcagcagcagcaggtag

SEQ ID NO: 295629 - DNA, 117 bp, Artificial Sequence
  derived and/or modified sequence
atgacccatgacaagtcctggaggcgctgcagcatcagcggcagcaccaagtgccgctgtggcagcagaattgctggccccaatgccctgggcagcggcggcagccgcagcagctag

SEQ ID NO: 295630 - DNA, 132 bp, Artificial Sequence
  derived and/or modified sequence
atgacccacgacaagagctggcggcggtgcagcatcagcggcagcactaaatgcaggtgcggctcacgcatcgctggtccaaatgctctgggaagcggcgggagcaggtctagcagctccagctcccgttag

SEQ ID NO: 295631 - DNA, 117 bp, Artificial Sequence
  derived and/or modified sequence
atgacccacgacaagagctggcggcggtgcagcatcagcggcagcaccaaatgcaggtgtgggagcagaattgctggtcctaatgcccttggctcgggtgggtcaaggagtagttag

SEQ ID NO: 295632 - DNA, 117 bp, Artificial Sequence
  derived and/or modified sequence
atgacccatgacaaaagctggaggagatgctctatctctggatccacgaagtgtcgttgtggatcccgtatcgctgggccaaatgccctgggttctggtggctcccggtctagctag

SEQ ID NO: 295633 - protein, 1010 aa, Artificial Sequence
  derived and/or modified sequence
MAARVLIIGSGGREHTLAWKLAQSHHVKQVLVAPGNAGTACSEKISNTAISISDHTALAQFCKEKKIEFVVVGPEAPLAAGIVGNLRSAGVQCFGPTAEAAQLESSKRFAKEFMDRHGIPTAQWKAFTKPEEACSFILSADFPALVVKASGLAAGKGVIVAKSKEEACKAVQEIMQEKAFGAAGETIVIEELLDGEEVSCLCFTDGKTVAPMPPAQDHKRLLEGDGGPNTGGMGAYCPAPQVSNDLLLKIKDTVLQRTVDGMQQEGTPYTGILYAGIMLTKNGPKVLEFNCRFGDPECQVILPLLKSDLYEVIQSTLDGLLCTSLPVWLENHTALTVVMASKGYPGDYTKGVEITGFPEAQALGLEVFHAGTALKNGKVVTHGGRVLAVTAIRENLISALEEAKKGLAAIKFEGAIYRKDVGFRAIAFLQQPRSLTYKESGVDIAAGNMLVKKIQPLAKATSRSGCKVDLGGFAGLFDLKAAGFKDPLLASGTDGVGTKLKIAQLCNKHDTIGQDLVAMCVNDILAQGAEPLFFLDYFSCGKLDLSVTEAVVAGIAKACGKAGCALLGGETAEMPDMYPPGEYDLAGFAVGAMERDQKLPHLERITEGDVVVGIASSGLHSNGFSLVRKIVAKSSLQYSSPAPDGCGDQTLGDLLLTPTRIYSHSLLPVLRSGHVKAFAHITGGGLLENIPRVLPEKLGVDLDAQTWRIPRVFSWLQQEGHLSEEEMARTFNCGVGAVLVVSKEQTEQILRDIQQHKEEAWVIGSVVARAEGSPRVKVKNLIESMQINGSVLKNGSLTNHFSFEKKKARVAVLISGTGSNLQALIDSTREPNSSAQIDIVISNKAAVAGLDKAERAGIPTRVINHKLYKNRVEFDSAIDLVLEEFSIDIVCLAGFMRILSGPFVQKWNGKMLNIHPSLLPSFKGSNAHEQALETGVTVTGCTVHFVAEDVDAGQIILQEAVPVKRGDTVATLSERVKLAEHKIFPAALQLVASGTVQLGENGKICWVKEE

SEQ ID NO: 295634 - protein, 433 aa, Artificial Sequence
  derived and/or modified sequence
MAARVLIIGSGGREHTLAWKLAQSHHVKQVLVAPGNAGTACSEKISNTAISISDHTALAQFCKEKKIEFVVVGPEAPLAAGIVGNLRSAGVQCFGPTAEAAQLESSKRFAKEFMDRHGIPTAQWKAFTKPEEACSFILSADFPALVVKASGLAAGKGVIVAKSKEEACKAVQEIMQEKAFGAAGETIVIEELLDGEEVSCLCFTDGKTVAPMPPAQDHKRLLEGDGGPNTGGMGAYCPAPQVSNDLLLKIKDTVLQRTVDGMQQEGTPYTGILYAGIMLTKNGPKVLEFNCRFGDPECQVILPLLKSDLYEVIQSTLDGLLCTSLPVWLENHTALTVVMASKGYPGDYTKGVEITGFPEAQALGLEVFHAGTALKNGKVVTHGGRVLAVTAIRENLISALEEAKKGLAAIKFEGAIYRKDVGFRAIAFLQQPR

SEQ ID NO: 295635 - protein, 232 aa, Artificial Sequence
  derived and/or modified sequence
MAARVLIIGSGGREHTLAWKLAQSHHVKQVLVAPGNAGTACSEKISNTAISISDHTALAQFCKEKKIEFVVVGPEAPLAAGIVGNLRSAGVQCFGPTAEAAQLESSKRFAKEFMDRHGIPTAQWKAFTKPEEACSFILSADFPALVVKASGLAAGKGVIVAKSKEEACKAVQEIMQEKAFGAAGETIVIEELLDGEEVSCLCFTDGKTVAPMPPAQDHKRLLEGDGGPNTGG

SEQ ID NO: 295636 - protein, 241 aa, Artificial Sequence
  derived and/or modified sequence
MAARVLIIGSGGREHTLAWKLAQSHHVKQVLVAPGNAGTACSEKISNTAISISDHTALAQFCKEKKIEFVVVGPEAPLAAGIVGNLRSAGVQCFGPTAEAAQLESSKRFAKEFMDRHGIPTAQWKAFTKPEEACSFILSADFPALVVKASGLAAGKGVIVAKSKEEACKAVQEIMQEKAFGAAGETIVIEELLDGEEVSCLCFTDGKTVAPMPPAQDHKRLLEGDGGPNTGGMGAYCPAPQ

SEQ ID NO: 295637 - protein, 138 aa, Artificial Sequence
  derived and/or modified sequence
MAARVLIIGSGGREHTLAWKLAQSHHVKQVLVAPGNAGTACSEKISNTAISISDHTALAQFCKEKKIEFVVVGPEAPLAAGIVGNLRSAGVQCFGPTAEAAQLESSKRFAKEFMDRHGIPTAQWKAFTKPEEACSFIL

SEQ ID NO: 295638 - protein, 136 aa, Artificial Sequence
  derived and/or modified sequence
MAARVLIIGSGGREHTLAWKLAQSHHVKQVLVAPGNAGTACSEKISNTAISISDHTALAQFCKEKKIEFVVVGPEAPLAAGIVGNLRSAGVQCFGPTAEAAQLESSKRFAKEFMDRHGIPTAQWKAFTKPEEACSF

SEQ ID NO: 295639 - protein, 562 aa, Artificial Sequence
  derived and/or modified sequence
MLVKKIQPLAKATSRSGCKVDLGGFAGLFDLKAAGFKDPLLASGTDGVGTKLKIAQLCNKHDTIGQDLVAMCVNDILAQGAEPLFFLDYFSCGKLDLSVTEAVVAGIAKACGKAGCALLGGETAEMPDMYPPGEYDLAGFAVGAMERDQKLPHLERITEGDVVVGIASSGLHSNGFSLVRKIVAKSSLQYSSPAPDGCGDQTLGDLLLTPTRIYSHSLLPVLRSGHVKAFAHITGGGLLENIPRVLPEKLGVDLDAQTWRIPRVFSWLQQEGHLSEEEMARTFNCGVGAVLVVSKEQTEQILRDIQQHKEEAWVIGSVVARAEGSPRVKVKNLIESMQINGSVLKNGSLTNHFSFEKKKARVAVLISGTGSNLQALIDSTREPNSSAQIDIVISNKAAVAGLDKAERAGIPTRVINHKLYKNRVEFDSAIDLVLEEFSIDIVCLAGFMRILSGPFVQKWNGKMLNIHPSLLPSFKGSNAHEQALETGVTVTGCTVHFVAEDVDAGQIILQEAVPVKRGDTVATLSERVKLAEHKIFPAALQLVASGTVQLGENGKICWVKEE

SEQ ID NO: 295640 - DNA, 3033 bp, Artificial Sequence
  derived and/or modified sequence
atggccgccagagtgctgatcatcggcagcggcggcagagagcacaccctggcctggaagctggcccagagccaccacgtgaagcaggtgctggtggcccccggcaacgccggcaccgcctgcagcgagaagatcagcaacaccgccatcagcatcagcgaccacaccgccctggcccagttctgcaaggagaagaagatcgagttcgtggtggtgggccccgaggcccccctggccgccggcatcgtgggcaacctgagaagcgccggcgtgcagtgcttcggccccaccgccgaggccgcccagctggagagcagcaagagattcgccaaggagttcatggacagacacggcatccccaccgcccagtggaaggccttcaccaagcccgaggaggcctgcagcttcatcctgagcgccgacttccccgccctggtggtgaaggccagcggcctggccgccggcaagggcgtgatcgtggccaagagcaaggaggaggcctgcaaggccgtgcaggagatcatgcaggagaaggccttcggcgccgccggcgagaccatcgtgatcgaggagctgctggacggcgaggaggtgagctgcctgtgcttcaccgacggcaagaccgtggcccccatgccccccgcccaggaccacaagagactgctggagggcgacggcggccccaacaccggcggcatgggcgcctactgccccgccccccaggtgagcaacgacctgctgctgaagatcaaggacaccgtgctgcagagaaccgtggacggcatgcagcaggagggcaccccctacaccggcatcctgtacgccggcatcatgctgaccaagaacggccccaaggtgctggagttcaactgcagattcggcgaccccgagtgccaggtgatcctgcccctgctgaagagcgacctgtacgaggtgatccagagcaccctggacggcctgctgtgcaccagcctgcccgtgtggctggagaaccacaccgccctgaccgtggtgatggccagcaagggctaccccggcgactacaccaagggcgtggagatcaccggcttccccgaggcccaggccctgggcctggaggtgttccacgccggcaccgccctgaagaacggcaaggtggtgacccacggcggcagagtgctggccgtgaccgccatcagagagaacctgatcagcgccctggaggaggccaagaagggcctggccgccatcaagttcgagggcgccatctacagaaaggacgtgggcttcagagccatcgccttcctgcagcagcccagaagcctgacctacaaggagagcggcgtggacatcgccgccggcaacatgctggtgaagaagatccagcccctggccaaggccaccagcagaagcggctgcaaggtggacctgggcggcttcgccggcctgttcgacctgaaggccgccggcttcaaggaccccctgctggccagcggcaccgacggcgtgggcaccaagctgaagatcgcccagctgtgcaacaagcacgacaccatcggccaggacctggtggccatgtgcgtgaacgacatcctggcccagggcgccgagcccctgttcttcctggactacttcagctgcggcaagctggacctgagcgtgaccgaggccgtggtggccggcatcgccaaggcctgcggcaaggccggctgcgccctgctgggcggcgagaccgccgagatgcccgacatgtacccccccggcgagtacgacctggccggcttcgccgtgggcgccatggagagagaccagaagctgccccacctggagagaatcaccgagggcgacgtggtggtgggcatcgccagcagcggcctgcacagcaacggcttcagcctggtgagaaagatcgtggccaagagcagcctgcagtacagcagccccgcccccgacggctgcggcgaccagaccctgggcgacctgctgctgacccccaccagaatctacagccacagcctgctgcccgtgctgagaagcggccacgtgaaggccttcgcccacatcaccggcggcggcctgctggagaacatccccagagtgctgcccgagaagctgggcgtggacctggacgcccagacctggagaatccccagagtgttcagctggctgcagcaggagggccacctgagcgaggaggagatggccagaaccttcaactgcggcgtgggcgccgtgctggtggtgagcaaggagcagaccgagcagatcctgagagacatccagcagcacaaggaggaggcctgggtgatcggcagcgtggtggccagagccgagggcagccccagagtgaaggtgaagaacctgatcgagagcatgcagatcaacggcagcgtgctgaagaacggcagcctgaccaaccacttcagcttcgagaagaagaaggccagagtggccgtgctgatcagcggcaccggcagcaacctgcaggccctgatcgacagcaccagagagcccaacagcagcgcccagatcgacatcgtgatcagcaacaaggccgccgtggccggcctggacaaggccgagagagccggcatccccaccagagtgatcaaccacaagctgtacaagaacagagtggagttcgacagcgccatcgacctggtgctggaggagttcagcatcgacatcgtgtgcctggccggcttcatgagaatcctgagcggccccttcgtgcagaagtggaacggcaagatgctgaacatccaccccagcctgctgcccagcttcaagggcagcaacgcccacgagcaggccctggagaccggcgtgaccgtgaccggctgcaccgtgcacttcgtggccgaggacgtggacgccggccagatcatcctgcaggaggccgtgcccgtgaagagaggcgacaccgtggccaccctgagcgagagagtgaagctggccgagcacaagatcttccccgccgccctgcagctggtggccagcggcaccgtgcagctgggcgagaacggcaagatctgctgggtgaaggaggagtag

SEQ ID NO: 295641 - DNA, 3033 bp, Artificial Sequence
  derived and/or modified sequence
atggcagctagagtgcttatcattggctccgggggcagagagcacacgctggcctggaagctggcacagagccaccacgttaaacaggtactggtcgcaccaggaaacgccggaacagcctgcagcgaaaagatcagtaatacagctatctccatcagtgaccatactgcccttgcccaattttgcaaagaaaagaaaattgagttcgtggttgtcgggcccgaggcaccccttgccgctggtattgtagggaacctccgctctgccggcgtgcaatgtttcgggcccacagcggaggctgctcagctggaaagttctaaacgcttcgcaaaggagtttatggacagacatggaatccctacagctcagtggaaggcatttaccaaaccagaggaggcatgcagctttattctgtcggccgatttccctgcgctggtggtcaaggccagtggcctggctgccggaaagggcgttattgtcgccaagtctaaagaagaggcttgtaaggcagtccaggagataatgcaggagaaggctttcggcgccgcaggcgaaaccattgtgattgaggagctcctcgacggggaagaggtctcatgcttatgcttcacagacgggaagaccgtagccccaatgccgccggctcaggatcataagaggctgctggaaggtgatggcggacccaacacaggcggcatgggcgcctattgccctgctcctcaagtttctaacgatctgctgcttaaaataaaggacaccgttcttcagagaacagttgatggcatgcaacaggagggcacaccatatacaggaatcctttatgccggtattatgctgaccaaaaatggcccaaaggtgctggagttcaactgccgatttggcgaccccgagtgtcaggtgattctcccgctgctcaagagcgacctgtatgaggtgattcagtctacactggatgggctgctgtgtacctctctgcccgtgtggctggagaaccatacagcgctaactgtcgtcatggctagcaaagggtaccctggtgactatacgaagggcgtggagataacgggctttcctgaagcccaggcccttgggctagaggtctttcacgcgggcaccgcactaaagaatggcaaagtggtcacccacgggggacgcgtattggccgtgacagccattcgcgagaaccttatcagtgccctggaggaggcaaaaaagggcctcgcagcgatcaagttcgagggcgcaatctaccggaaagatgtaggatttagggcaatcgcctttctgcagcaacctcggagtctgacctataaagaatctggagtcgacattgcagcggggaacatgctagtcaagaagatacaacccttggctaaagctacttcacggtctggatgtaaagtggatttgggtgggtttgccggtctctttgacctgaaggcagctggctttaaggacccactactggcctcaggaacagacggcgtcggcacaaaactgaaaatcgcccaactgtgtaacaaacatgacacaatcgggcaggacctggttgctatgtgcgtcaatgacattctggctcaaggggccgaaccgcttttttttcttgactatttttcatgtggtaagctggacctttccgtgaccgaggctgttgtggccggcatcgctaaagcctgtggtaaagccggctgtgccctgctgggaggggaaactgcggagatgcccgacatgtaccctccaggagagtatgatttggccggattcgctgtgggcgccatggagcgcgaccagaagcttccccatctggaacggatcacagaaggagatgtggttgtagggatcgcaagcagtggccttcacagcaacggttttagcctggtccgcaaaattgtggccaaatctagcctgcagtatagtagcccagccccagacgggtgcggagaccagacactgggtgaccttcttctgactccaaccagaatctatagccattcactgttgcccgttcttcggtccggacatgtgaaagcattcgcgcatattacaggaggcggcctgctcgagaatatcccgagggtgctacccgagaaactgggtgtggacctggacgctcagacatggaggatcccccgcgtgttcagctggctgcagcaagaaggccacttgagtgaggaggaaatggcccgaacctttaactgcggggtgggcgctgtgctggtggtatcaaaagagcagactgaacaaatcttacgagacattcaacagcacaaggaggaagcttgggtaattgggagcgttgtggccagagctgaaggttcgcccagggtcaaggtcaaaaacttgatcgagtccatgcagatcaatggctctgtgctgaagaacgggtcccttaccaatcatttctccttcgagaaaaaaaaggccagagtggctgtcctaatctcaggcacaggttctaacttacaggccttaatcgactcaactagagagccaaatagttcagcccagattgatatcgtcatatcgaacaaagcagctgttgcaggcctggataaggcagagcgggcaggcatcccaacgcgggtcataaatcacaaactctacaaaaatagggtcgaatttgacagcgccatcgatttggttctcgaggaattctccatagacattgtctgcctcgcaggatttatgcgcattcttagcggcccttttgtgcaaaagtggaatggtaagatgcttaatatccacccatccctgctgccaagtttcaaaggcagcaacgcccatgaacaggcccttgaaaccggggtcacagttaccggctgcaccgtgcactttgtagcagaggacgtggacgctggtcagatcatactgcaggaagccgtcccggtgaagcgaggcgataccgtcgccacccttagtgaacgagtgaagcttgcagaacataaaatctttcctgctgccttacagctcgtggcttctgggacagtgcaattgggtgagaatggaaagatttgttgggtgaaagaagagtag

SEQ ID NO: 295642 - DNA, 3033 bp, Artificial Sequence
  derived and/or modified sequence
atggcggcccgcgtgttgattatcggtagtggtgggcgcgaacacacactggcatggaaactggcacagtctcatcatgttaagcaagtcctggttgcccccggcaatgccgggactgcttgctcagagaagatatccaacacagcgattagcatctccgaccataccgccctggcacaattctgtaaagagaaaaaaatcgagtttgtagtcgtgggacccgaagctcccctggccgccggcatagtggggaatttgcgctccgccggcgtacagtgttttggacctactgcagaggcagcccagcttgagagttctaaacggtttgcgaaagaatttatggaccgacacggaatccccactgctcagtggaaagcatttaccaaacctgaagaggcatgtagcttcatcctgtcggccgacttccctgccctcgtggtgaaagccagcggactggctgcaggcaagggggtgatcgttgcaaagtctaaagaggaagcgtgtaaggcagttcaggaaatcatgcaggagaaggcatttggggccgccggggaaactatcgtgatcgaagagctgctcgacggcgaagaagtctcttgcctgtgctttaccgatgggaagactgtcgcacctatgccacccgcccaggaccacaaacgcctccttgaaggtgatgggggcccaaacaccggtgggatgggagcttactgtcctgcccctcaggtttcaaatgatctgctcctgaagataaaggataccgttctgcagagaacagttgatggaatgcagcaggagggaactccttataccggaattctttacgccggcatcatgctgacaaaaaacgggcctaaagtgctcgaatttaattgccgttttggggaccccgagtgtcaagtgatcctcccacttctaaagtcagacttatatgaagtgatacaatctacactcgacggcctgttatgtacctcactgcccgtgtggctggagaaccataccgcactgaccgtggtcatggcatccaaaggttatccaggagattatacgaaaggcgtggagatcacaggctttcctgaagctcaggccctcggtctcgaggtatttcatgctggtacggctttgaaaaacgggaaggtggtgacccatggaggacgggtactcgcagtgaccgccatacgcgaaaacctcatctcagccctcgaagaggccaagaaaggcctggctgctattaaatttgagggtgccatctatagaaaggatgtgggcttcagggcaatagccttcctacagcagccaagatctctcacctataaggaatccggcgtggatatcgctgccggaaacatgcttgtaaagaagatacaaccattagctaaggccacctcccggtccgggtgtaaagttgacctgggaggattcgcagggctgtttgacctgaaagccgccgggttcaaagatcctctgcttgccagtgggacagacggcgtcggaaccaagctcaaaatcgctcagctctgcaacaagcatgatacgatcggacaggatctggtcgcaatgtgcgttaatgacattctggcacagggcgccgagccgcttttctttctcgactatttcagttgcgggaaactggatctgtccgtcaccgaagccgtcgtggcaggaatagctaaagcttgcggcaaggccgggtgcgccctgctgggtggtgagactgcagaaatgccagatatgtaccctcctggagaatacgatctcgctggattcgcagtcggggccatggaaagagaccagaaactacctcacttagagcggatcaccgagggcgatgttgtggtgggaatcgcttctagcggcctgcactctaacggcttctctctggtgcgtaaaatcgtggcgaagagctccctgcagtactccagtccagcgcctgacggctgcggcgaccagaccctgggcgacctactgcttacccccaccaggatttatagccatagcttgttgcccgtcctgcgctcagggcacgttaaagccttcgcacacattacaggagggggccttctcgaaaatattcccagagtgctgcctgaaaaactgggcgtggatctcgatgcgcaaacttggaggataccaagggtgttctcctggctccagcaagaaggtcacctcagtgaggaagaaatggctaggactttcaattgtggcgtgggagctgtcttagtggtgtcaaaagagcagactgaacagattctgagagatatacaacagcataaggaagaagcatgggttattgggagtgtggtcgctagggctgagggaagcccccgtgtcaaagtcaaaaacctgattgagagcatgcaaatcaacggatcggtgctgaagaacgggtctttgacaaatcatttctcatttgaaaaaaagaaggcacgggttgccgtgcttatttctggtaccggctcaaacctgcaggcactgatcgactccacaagggagcccaattcttctgcacagattgacatagttatttcaaacaaggccgcggttgccgggttggacaaggcagaacgggccgggattcctactagggtcatcaaccataagctgtacaaaaatagagtggagtttgactccgccattgacctcgtccttgaggagttcagtatagatatcgtgtgcctcgcgggttttatgagaatcctgtccggcccattcgtccagaagtggaacggtaagatgttgaacatacaccctagcctgctccccagtttcaaagggtcgaacgctcacgaacaggccctggaaacaggagtaaccgtgaccggttgcaccgttcacttcgtcgccgaggacgtcgatgccggtcaaatcatcctacaagaggccgtgcctgtgaaaagaggcgacactgtcgccacattgtccgagagagtaaagttggcggaacacaaaattttccctgcagctttacagctggtggcctccggcacggtgcagctgggagagaacggtaagatatgctgggttaaagaagaatag

SEQ ID NO: 295643 - DNA, 3033 bp, Artificial Sequence
  derived and/or modified sequence
atggccgctagggtgctgataattggcagtggcggaagggagcacactctggcttggaaattggcacagagccaccacgtaaaacaggtcttggtggccccaggcaatgccgggacagcttgttccgaaaagatttccaatacagcaatcagtataagcgatcataccgccctggctcagttctgtaaggagaaaaagattgagttcgttgtggtggggcctgaggcaccccttgccgcaggcatcgtcggcaatttacgcagcgctggggtccagtgcttcggccccaccgccgaggcggctcagctggaatctagcaaacgctttgctaaggaattcatggaccgccatgggatcccaacagcccagtggaaagcgttcaccaagccagaggaagcctgcagtttcattctttccgcggacttccctgcgctggtggtaaaagccagcggacttgccgccggcaagggcgtaatcgtcgctaaatccaaggaggaggcttgtaaggctgtgcaggagatcatgcaggaaaaggcctttggcgccgccggggaaacaatcgtgattgaagaactgctggacggagaagaggtgtcttgcctctgttttactgacggaaaaaccgtagcacctatgcccccggcacaggatcacaaacggctactagagggtgatggaggccccaatacaggggggatgggggcctattgcccagccccccaggtttccaatgatctgctgctgaagataaaagataccgttctgcaaaggaccgtcgatggaatgcagcaggaagggacaccctacactgggatactgtacgcaggtatcatgcttactaaaaacgggccgaaagtccttgaattcaattgcaggttcggagaccccgaatgtcaggtgattttacccttattgaagagcgacctgtacgaggtcatccagtctactctcgacgggctgctgtgtacatcgctgccggtttggctggaaaatcatacagccctgaccgtcgtgatggcaagcaagggttacccaggcgactatacaaagggtgttgaaattactggctttccagaggcacaggcactgggtttagaggtgttccacgctgggactgcactcaagaatggcaaagtggtcacacatggaggccgggttctggcggttactgctatacgggaaaatctgattagcgccctggaggaagctaaaaagggcttggccgcaattaagtttgagggcgctatttacagaaaggatgtgggcttcagagccatcgccttcttgcagcagccgcgctcattgacctacaaagaaagcggggtggacatcgccgcgggcaatatgctggtgaaaaagattcagcctttagcaaaagcgactagcagaagtgggtgcaaggttgatctggggggctttgcaggcctgttcgacctcaaggccgccggattcaaggatcccctcctcgcctcggggacagatggcgtgggtactaagttaaagattgcccagctgtgcaacaaacacgacaccataggtcaggatctggtggctatgtgcgttaatgacattttggcgcagggcgctgagccactgttttttctggattatttctcatgtgggaaattggatctgagtgttaccgaagccgtggtggctggaatcgcaaaggcttgcggtaaagctggatgcgcactgctcggcggggagacggcggagatgccagatatgtatcctccaggagaatatgacttggctgggttcgccgtgggggcaatggagcgcgaccaaaagctgccccacctggagaggattaccgagggcgatgtggtagtcggaatcgcctcctccggtctccacagcaatggcttcagcctagtgcgcaaaattgtggccaaaagctcacttcagtatagtagcccagccccagacggctgtggagaccagactctgggcgatctcttgctcactcccacccggatctactcgcactcactcctcccagtcctgcggagcggtcacgtgaaggcttttgcacacattacgggaggagggctgctggagaacattccgagggtgctccctgagaaattgggagtcgatctggatgcacagacttggaggatccccagggtctttagttggctacagcaggaaggacacttgagcgaggaggagatggcccggacgtttaactgcggggtcggcgccgttctcgttgtgagcaaggagcaaacagaacagattctacgggacattcagcagcataaggaggaggcctgggtgatcggaagtgtcgtggctagagcagagggcagccctagagttaaagtcaagaatttgatcgaatccatgcagattaacgggtctgtccttaaaaacggatccttgacaaaccatttcagctttgagaaaaagaaagctagggtggcagtgctgatctccgggactggaagcaatttgcaggccctgatcgatagtactcgagaaccaaattcttctgctcagatcgacatcgtgatttcaaacaaggccgctgtggcaggccttgataaggccgagagagcagggattcctacgcgggtgattaaccataaactgtataaaaacagagtggaatttgattccgctatcgatttggtcttagaagaattcagcattgatatcgtgtgccttgccggattcatgcgtattttgagcggccccttcgtgcaaaagtggaacggcaaaatgctgaacatccatccatcgctattgccaagcttcaaggggtccaatgcccacgaacaagcactagaaactggggtgaccgttactggctgtacggtgcatttcgtggctgaggacgtggacgccgggcagattattctgcaagaggctgtccctgtcaaacggggggatactgtggctacactttcagaacgcgtcaaactggccgagcataaaattttcccggccgccctgcagttagtggcctctgggacggtgcaactgggagaaaatggaaagatctgctgggtaaaagaggagtag

SEQ ID NO: 295644 - DNA, 3033 bp, Artificial Sequence
  derived and/or modified sequence
atggccgcccgggtgctgatcatcggcagcggcggccgggagcacaccctggcctggaagctggcccagagccaccacgtgaagcaggtgctggtggcccctggaaatgccggcacagcctgcagcgagaagatcagcaacacagccatcagcatcagtgaccacacagccctggcccagttctgcaaggagaagaagattgaatttgtggtggtgggccctgaggcccccctggccgccggcatcgtgggcaacctgcggtctgctggggtgcagtgcttcggccccacagctgaggccgcccagctggagagcagcaagagatttgccaaggagttcatggacagacatggcatccccacagcccagtggaaggccttcaccaagccagaggaggcctgcagcttcatcctgtctgctgacttccctgccctggtggtgaaggccagcggcctggccgccggcaagggcgtgattgtggccaagagcaaggaggaggcctgcaaggctgtgcaggagatcatgcaggagaaggccttcggggctgctggggagaccatcgtgattgaggagctgctggatggagaggaggtgtcctgcctgtgcttcacagatggcaagacagtggcccccatgcccccagcccaggaccacaagaggctgctggagggagatggcggccccaacacaggaggcatgggcgcctactgcccagccccccaggtgtccaatgacctgctgctgaagatcaaggacacagtgctgcagaggacagtggatggcatgcagcaggagggcaccccctacacaggcatcctgtatgccggcatcatgctgaccaagaatggccccaaggtgctggagttcaactgccgctttggagaccctgagtgccaggtgatcctgcccctgctgaagagtgacctgtatgaggtgatccagagcaccctggatggcctgctgtgcaccagcctgcctgtgtggctggagaaccacacagccctgactgtggtgatggccagcaagggctacccaggggactacaccaagggcgtggagatcaccggcttccctgaggcccaggccctgggcctggaggtgttccacgccggcacagccctgaagaatggcaaggtggtgacccacggcggccgggtgctggccgtgacagccatccgggagaacctgatcagcgccctggaggaggccaagaagggcctggccgccatcaagtttgagggcgccatctacaggaaggatgtgggcttccgggccatcgccttcctgcagcagcccaggagcctgacctacaaggagagcggcgtggacattgctgctggcaacatgctggtgaagaagatccagcccctggccaaggccaccagccgcagcggctgcaaggtggacctgggcggctttgctggcctgtttgacctgaaggccgccggcttcaaggaccccctgctggccagcggcacagatggagtgggcaccaagctgaagatcgcccagctgtgcaacaagcatgacaccatcggccaggacctggtggccatgtgtgtgaatgacatcctggcccagggcgctgagcccctcttcttcctggactacttcagctgtgggaagctggacctgtctgtgacagaggccgtggtggccggcatcgccaaggcctgtgggaaggccggctgtgccctgctgggcggggagacagctgagatgccagacatgtacccacctggagaatatgacctggccggctttgctgtgggcgccatggagcgggaccagaagctgccccacctggagcgcatcacagaaggagatgtggtggtgggcatcgccagcagcggcctgcacagcaatggcttcagcctggtgaggaagatcgtggccaagagcagcctgcagtacagcagccctgccccagatggctgtggggaccagaccctgggggacctgctgctgacccccacccgcatctacagccacagcctgctgcctgtgctgcggagcggccacgtgaaggcctttgcccacatcaccggcggcggcctgctggagaacatcccccgggtgctgcctgagaagctgggcgtggacctggatgcccagacctggaggatccccagggtcttctcctggctgcagcaggagggccacctgtctgaggaggagatggcccggaccttcaactgtggggtgggcgctgtgctggtggtgtccaaggagcagacagagcagatcctgcgggacatccagcagcacaaggaggaggcctgggtgattggctctgtggtggcccgggcagagggcagcccccgggtgaaggtgaagaacctgattgagagcatgcagatcaatggatctgtgctgaagaatggcagcctgaccaaccacttctcctttgagaagaagaaggcccgggtggccgtgctgatctctggaacaggcagcaacctgcaggccctgattgacagcacccgggagcccaacagcagcgcccagattgatattgtcatcagcaacaaggctgctgtggccggcctggacaaggccgagcgggccggcatccccaccagggtcatcaaccacaagctgtacaagaacagagtggagtttgacagcgccatcgacctggtgctggaggagttcagcattgatattgtgtgcctggccggcttcatgaggatcctgagcggcccctttgtgcagaagtggaatggcaagatgctgaacatccaccccagcctgctgcccagcttcaagggcagcaatgcccacgagcaggccctggagaccggggtgacagtgacaggctgcaccgtgcactttgtggccgaggatgtggatgctggccagatcatcctgcaggaggccgtgcctgtgaagagaggagacacagtggccaccctgtctgagcgggtgaagctggccgagcacaagatcttccctgctgccctgcagctggtggccagcggcaccgtgcagctgggggagaatggcaagatctgctgggtgaaggaggagtag

SEQ ID NO: 295645 - DNA, 3033 bp, Artificial Sequence
  derived and/or modified sequence
atggccgcccgggtgctgatcatcggcagcggcggccgggagcacacactggcatggaagttggcgcagtcccatcacgtgaagcaagtcttggtagcgcccggcaatgctggaactgcgtgttcagaaaaaatctcgaatacagcaatctccatttcagaccacacggccctggcccaattctgtaaagagaaaaagatcgaatttgtcgtcgtcggacccgaggctcctttagctgcaggcattgtgggaaatctgcggtctgctggagttcagtgtttcggaccaactgccgaggcagcccagttagagagcagcaaacggtttgctaaagaattcatggacagacatggaatccctaccgcccagtggaaagcattcactaaacccgaagaggcttgcagtttcatcctctccgccgacttcccagcactagtggtcaaggcctcaggcctggccgctggaaaaggcgtgatcgtggccaagtctaaggaagaagcatgcaaggcagttcaggagattatgcaggaaaaagccttcggcgcagctggggaaactatcgtaatcgaggagctactcgacggcgaggaagtatcttgtctttgttttaccgacggaaagaccgttgctccaatgccgcccgctcaagaccacaagcgcctgcttgagggcgacgggggccctaatacaggaggaatgggagcctattgtccagcacctcaggttagcaacgacctgctgctcaaaatcaaagacacagtactccaacgcactgtggacggaatgcagcaggaggggactccctacacagggatcctgtacgccgggatcatgttgacaaagaatggtcccaaagtattggagttcaattgtcgatttggggacccggagtgtcaggtgattctgcccttactcaaatcagacctgtacgaagtgattcaaagcactctggatgggctcctgtgcactagcctgcccgtgtggctagaaaaccacaccgccctcacggtcgtgatggcttcgaagggatatcctggggactatactaagggcgtggagatcaccgggttccctgaagcccaggcactgggtctagaggtattccatgcaggaacagccctgaagaacggaaaggtggttacacatggaggacgcgtcctggccgtcaccgcaatccgggagaacctcataagtgctctggaagaggctaaaaagggcctggccgcgattaagttcgaaggggcaatttaccgcaaagatgtgggcttccgggcaattgcctttctgcaacagcctcggtccctgacttacaaggagtctggagtggatattgccgcagggaatatgttggttaagaagattcaacctttagctaaggccacttcacgctctggctgtaaggttgatctcgggggctttgctggcctctttgacctgaaggctgcgggtttcaaggacccgctgctggctagcggtacagacggtgtcggaacaaaattgaagatcgctcagctgtgtaacaagcacgacacaattggtcaggacctggtggcaatgtgcgtgaacgatatcctcgcacagggtgcagaacccctgttctttctcgattacttctcatgtggtaaattggacctgagcgtgacagaagctgtcgttgcaggaatagcaaaggcctgtgggaaagcaggatgtgcgctcctgggcggtgagaccgccgagatgcctgatatgtacccacccggcgaatatgatttggcgggattcgcagtgggtgcaatggagcgcgaccagaagttgcctcacttagaaaggatcacagagggtgacgtcgtcgttgggattgccagttccggtctgcattccaacggtttctcgttagtgagaaagatcgtggccaagagcagtctccagtattcatcaccggcacctgatggctgcggcgaccagacactgggcgatctcctcttaaccccaacccgtatctattcacatagtctgttgcctgtactaagatccggccatgtgaaggcgttcgctcatataacggggggagggcttttagagaacattccgcgagttctgccggaaaagctcggagtggacctggacgctcagacatggcgcattccaagggtattctcttggcttcagcaggagggccacttgtcggaagaggaaatggccaggacatttaattgcggagtcggagccgtcctcgtggtgagcaaggagcaaaccgagcaaatcctgcgggacatccagcagcacaaggaagaagcatgggtcataggctcggtggttgctagagctgagggttcccctcgtgtcaaagtcaagaacctaatcgaatctatgcagataaacggatcagtgctgaagaacggctcgcttacaaaccacttcagcttcgagaaaaaaaaggcccgggtcgctgtcctgatctcagggaccggatccaacctgcaagcactcattgattcaacacgagagcccaattcttccgcccagatcgatattgtaattagtaataaagcagctgttgccggcctggacaaggcagagcgcgcaggaatcccaacccgcgttattaatcacaaactgtataagaatagagtggaatttgacagcgccatcgacctggtgctggaggagttcagcatagatattgtctgtctcgcggggttcatgaggatcctgagcggtccattcgtgcagaaatggaacggcaaaatgttgaacatccaccctagcttactcccatcttttaaaggctcgaatgcccatgagcaggctctcgaaacgggagtgacagtgaccggctgtaccgtacacttcgttgctgaagatgtggatgccggacagattatcctccaggaggccgtgcccgttaagagaggggataccgtggcaactctgtctgagagagtgaaactggccgaacacaagatatttccagccgctctgcagctggtcgcctcaggaacagtgcagctgggggaaaacggcaagatatgttgggtgaaggaagaatag

SEQ ID NO: 295646 - DNA, 3033 bp, Artificial Sequence
  derived and/or modified sequence
atggccgcccgggtgctgatcatcggcagcggcggccgggagcacaccctcgcttggaagcttgcccaatctcaccacgtgaaacaggtacttgtggctcctgggaacgctggtaccgcctgcagtgagaagatctccaacaccgcgatcagcataagtgaccatacagcactggctcagttctgcaaggaaaaaaaaatagaatttgtggtggtcgggcccgaagccccactagctgctggaatcgtgggaaatctccggagtgccggggtacagtgtttcggtccaaccgccgaagcagcccagctggagtctagcaagaggttcgcaaaagagttcatggacagacacggcatccctacggcacaatggaaggcttttacgaaaccagaggaagcatgcagcttcatcctttctgccgattttcccgctctcgttgtcaaggcgagcggcctggccgcaggaaagggggtgatcgtggcaaaatccaaagaagaagcgtgcaaggccgtgcaggagattatgcaggaaaaggccttcggagctgcgggggagacgattgtcatagaggagctcctggatggtgaagaggtgtcttgtctgtgtttcacagatggtaaaacagtggcaccaatgccgcccgcccaggaccataaaaggctgcttgaaggcgatggaggtcccaacactggcggcatgggagcatattgtcctgctccacaggtctctaatgatcttctgctcaaaataaaagacactgtattgcaaaggactgtggatggaatgcagcaagaagggacaccttacaccggaatcttgtatgctggcataatgctgaccaagaatggccctaaggtgctggagttcaactgcagattcggcgatcccgagtgccaagtgatccttcctctgctgaagagcgacctctatgaggttatacagtctaccttggacggcctgctctgcacaagcctacccgtgtggctcgagaaccataccgcccttaccgtggttatggctagtaaaggctatcccggcgactacactaagggtgtagagattacaggcttccccgaagcccaagccctggggcttgaagtgtttcatgctggcactgccttgaaaaacgggaaagtggtcacacacgggggccgtgtgttggccgtcacagccattcgtgagaacttgatttctgccctggaggaggccaagaagggcctggctgcgataaagtttgagggtgctatctacaggaaagatgtcggctttcgcgccatcgccttcctgcagcagccacgttctctcacatataaagagagcggagttgatatagcagccggcaacatgcttgtcaagaaaatacagccccttgctaaagccacctctcgatccgggtgtaaagtggacctcggcggtttcgctggactctttgacctgaaggccgccggttttaaggaccctctgctggcttccggtacagatggtgttggcaccaagttaaaaatagcacagttgtgtaacaaacatgacactattggccaggatctggtggcaatgtgtgtgaacgacattcttgcacagggggcagaaccactattcttcctggattacttcagctgcggcaaactggacttgagcgtgactgaggccgtggttgcaggcatagcaaaggcatgcgggaaggccggatgtgcgctcctcggcggagagacagcagagatgcctgatatgtaccctccgggggaatacgatctggcaggcttcgccgtaggggccatggagcgggaccagaagctgcctcatctggaaaggattactgaaggggatgtagttgtgggtatcgcttctagcgggctgcactctaacggattttcattggtgaggaagatagtcgcgaaaagttctctccaatacagtagccccgcccccgatggctgtggtgaccagacattaggcgatttgttgctgacccctacgcgtatctacagtcactcactgcttccagtgctgcgatccgggcacgttaaagcgtttgcacacattacgggcgggggccttctggagaacatcccacgggtcctgccggagaagttgggtgtcgacctagatgctcagacctggaggattccaagggtcttttcttggttgcagcaagaagggcatctcagcgaggaagagatggccaggaccttcaattgcggtgtgggggcagtcctcgtggtgtctaaagagcagactgagcagatcctaagagacattcaacagcataaagaggaagcttgggtgatcggaagcgtcgtagctcgagctgaggggtcacctagggttaaggtgaaaaaccttatcgagtccatgcagattaatggcagcgtgcttaaaaatggatccctcaccaatcatttttcttttgaaaaaaagaaggccagagtcgccgtccttatcagtggaacgggcagcaacctacaagccctgattgattctacaagggagcccaactcttcagctcagattgatatagtgataagtaacaaagcggctgttgctggtttggacaaagcagagcgcgctggtatccctacccgcgtgattaatcacaaactttacaagaatagagtcgaatttgactcagcaatcgatctcgttctcgaggaattttccattgacatcgtgtgcctcgccggatttatgcgtatcctttcaggtccgttcgttcagaagtggaacggcaaaatgctcaatattcatccctctctcctcccctccttcaagggcagcaacgctcacgaacaagcacttgagaccggcgtgaccgtcacggggtgcacggttcacttcgtcgcagaggatgtggatgctggtcagataattctccaggaagccgtacccgtcaagcggggcgataccgttgcgactctttccgagcgagtgaagttggcagagcacaaaatttttcctgccgccctacagttggtcgctagcggtactgttcagctgggggaaaatggtaagatctgctgggtgaaagaagagtag

SEQ ID NO: 295647 - DNA, 3033 bp, Artificial Sequence
  derived and/or modified sequence
atggccgcccgggtgctgatcatcggcagcggcggccgggagcacaccctggcgtggaaactcgctcagtcccatcacgtcaagcaggtcttagtggcccctggcaatgccgggaccgcttgttctgaaaaaatcagtaatactgccataagcatttctgatcacactgctctggcccaattttgcaaagagaaaaaaatcgagtttgtggtcgtgggaccggaagccccattggctgccggtattgttggcaacctccgctctgccggcgtgcagtgtttcggacctaccgccgaggccgcgcaactggagtcctcaaagagattcgccaaggagttcatggacagacacggaatcccaaccgctcagtggaaggccttcactaagcctgaggaagcctgttctttcattctcagtgccgacttccccgccctcgtagttaaagcctccggactcgcggctggcaaaggagtgattgttgccaaatccaaggaagaggcctgtaaggctgtgcaggagataatgcaagagaaggcctttggtgccgctggggagaccattgtgatcgaagaattgctggacggggaggaggttagttgcctctgctttacagacgggaaaaccgtggcacccatgccccccgctcaggaccataaacggttgctggagggcgatgggggacctaatactggcggaatgggggcttactgcccagctccccaagtctccaacgatcttctccttaaaattaaggacactgtcctccagcggactgtagacggcatgcagcaggagggtaccccttacactggcattctgtacgccggaattatgctgacgaaaaacggacccaaggtcctcgagttcaactgtaggttcggtgatccagagtgccaggtcatcttaccgctgctgaaatctgatttgtacgaagttattcaatcaaccctggacggcctgctgtgtactagtcttccagtgtggctcgaaaatcacaccgcgttaacagtcgtcatggcctctaagggttatcctggagactacactaaaggagtcgagataactggattccccgaggctcaggctctcggacttgaggtgttccacgcaggaacagctctgaaaaacggaaaagtcgtgacccacggcggacgagtcctggctgtgactgcgattcgggaaaatctcatcagcgcactggaggaggccaaaaaaggcctcgctgcgattaaattcgagggggcaatttacagaaaagacgtgggattccgcgccatcgcctttttgcagcagcctagatcactgacatacaaggagtccggcgtagacatcgccgcaggcaacatgctggttaaaaaaattcaacccctggccaaggccacatctaggagcgggtgcaaggttgaccttggtgggttcgccggcctcttcgacctgaaagcagctgggttcaaagaccctctcttggctagcggcactgacggggtcgggactaagcttaagatcgcccagctgtgtaataaacacgatacgatcggacaggacctagtagccatgtgtgtaaatgatattcttgctcagggcgcagagccattgttcttcctggattacttttcttgtggaaagctggacttatccgtcaccgaagccgtagtcgctggtatagccaaagcgtgcggcaaggctggttgcgcattgctgggtggcgaaaccgctgaaatgccagatatgtaccctccaggggagtacgatcttgcaggtttcgcggtcggagctatggaacgagaccagaaactgccacacctggaaagaatcactgagggagatgtagttgttggaatagcgagctccggactccattccaatggattttcgctcgtgagaaagatagtcgcaaagtccagcctccagtactcttcccctgcccccgatggatgtggggatcagaccctgggcgatttgctgctgaccccaacgaggatctatagtcacagcctgttacctgttctgaggtccgggcacgttaaggcttttgctcacattaccggtggcggcctcctggagaacatcccccgggtcttgccagagaagcttggggtcgacctggacgcacagacatggcgcatacctagagtcttctcttggctacaacaggagggacacctcagcgaggaggaaatggcacgcacatttaattgcggcgttggagcggtcctggtcgtgtccaaggagcagacagaacaaattctccgggatatccagcaacataaggaagaagcgtgggttatcggaagcgtggtggcccgggccgaaggaagccctcgggttaaggttaagaatctgatcgagagcatgcagatcaacggatcagtgctgaagaacggaagcctcacaaaccacttctccttcgaaaaaaagaaggctcgtgtggcagtgctgataagcggcaccggttctaacttgcaggccctaattgattctacgcgtgaacccaattcgagtgcccagatagatattgtaatcagcaataaggccgccgtcgctggcctggacaaggccgagcgggccggcatccccacacgcgtcatcaaccataagttatacaagaatcgggttgagttcgatagcgcgatcgacctggttctggaggagttctctatcgacattgtctgtttggccgggttcatgcgcatcctgagcgggccattcgtacagaagtggaacggtaagatgttgaatatacaccccagccttttgcctagcttcaaaggctccaatgcccacgagcaggcacttgaaaccggagtgacagtcaccgggtgcaccgttcactttgttgctgaagacgtggacgccgggcagatcattctgcaggaggctgtgccagtcaagagaggcgacactgtggctacactgtccgaacgtgtcaagctcgcggagcataagatctttcccgcagcattacagctcgtggcctccggtacggtgcagcttggcgagaatgggaaaatctgttgggtgaaagaagagtag

SEQ ID NO: 295648 - DNA, 3490 bp, Artificial Sequence
  derived and/or modified sequence
ctgacgcaggcgccattacaggagccgtctctcttgaggcgaccgtgtccgcataagttgtcagtccccagcagtgtttgggagccttaacaggcttgctaagtgcctgagattaaaggcgaagaggaagaagagcaagaagggcaacccggtgtttaacacacggctttcaggcgctctcaggtggcgccaagttcagtttcgacagggatatgcatccgggagagaatttttcagcccccgcccccactggcatacagaacaatggcagcccgagtacttataattggcagtggaggaagggaacatacgctggcctggaaacttgcacagtctcatcatgtcaaacaagtgttggttgccccaggaaacgcaggcactgcctgctctgaaaagatttcaaataccgccatctcaatcagtgaccacactgcccttgctcaattctgcaaagagaagaaaattgaatttgtagttgttggaccagaagcacctctggctgctgggattgttgggaacctgaggtctgcaggagtgcaatgctttggcccaacagcagaagcggctcagttagagtccagcaaaaggtttgccaaagagtttatggacagacatggaatcccaaccgcacaatggaaggctttcaccaaacctgaagaagcctgcagcttcattttgagtgcagacttccctgctttggttgtgaaggccagtggtcttgcagctggaaaaggggtgattgttgcaaagagcaaagaagaggcctgcaaagctgtacaagagatcatgcaggagaaagcctttggggcagctggagaaacaattgtcattgaagaacttcttgacggagaagaggtgtcgtgtctgtgtttcactgatggcaagactgtggcccccatgcccccagcacaggaccataagcgattactggagggagatggtggccctaacacagggggaatgggagcctattgtccagcccctcaggtttctaatgatctattactaaaaattaaagatactgttcttcagaggacagtggatggcatgcagcaagagggtactccatatacaggtattctctatgctggaataatgctgaccaagaatggcccaaaagttctagagtttaattgccgttttggtgatccagagtgccaagtaatcctcccacttcttaaaagtgatctttatgaagtgattcagtccaccttagatggactgctctgcacatctctgcctgtttggctagaaaaccacaccgccctaactgttgtcatggcaagtaaaggttatcctggagactacaccaagggtgtagagataacagggtttcctgaggctcaagctctaggactggaggtgttccatgcaggcactgccctcaaaaatggcaaagtagtaactcatgggggtagagttcttgcagtcacagccatccgggaaaatctcatatcagcccttgaggaagccaagaaaggactagctgctataaagtttgagggagcaatttataggaaagacgtcggctttcgtgccatagctttcctccagcagcccaggagtttgacttacaaggaatctggagtagatatcgcagctggaaatatgctggtcaagaaaattcagcctttagcaaaagccacttccagatcaggctgtaaagttgatcttggaggttttgctggtctttttgatttaaaagcagctggtttcaaagatccccttctggcctctggaacagatggcgttggaactaaactaaagattgcccagctatgcaataaacatgataccattggtcaagatttggtagcaatgtgtgttaatgatattctggcacaaggagcagagcccctcttcttccttgattacttttcctgtggaaaacttgacctcagtgtaactgaagctgttgttgctggaattgctaaagcttgtggaaaagctggatgtgctctccttggaggtgaaacagcagaaatgcctgacatgtatccccctggagagtatgacctagctgggtttgccgttggtgccatggagcgagatcagaaactccctcacctggaaagaatcactgagggtgatgttgttgttggaatagcttcatctggtcttcatagcaatggatttagccttgtgaggaaaatcgtggcaaaatcttccctccagtactcctctccagcacctgatggttgtggtgaccagactttaggggacttacttctcacgcctaccagaatctacagccattcactgttacctgtcctacgttcaggacatgtcaaagcctttgcccatattactggtggaggattactagagaacatccccagagtcctccctgagaaacttggggtagatttagatgcccagacctggaggatccccagggtcttctcatggttgcagcaggaaggacacctctctgaggaagagatggccagaacatttaactgtggggttggcgctgtccttgtggtatcaaaggagcagacagagcagattctgagggatatccagcagcacaaggaagaagcctgggtgattggcagtgtggttgcacgagctgaaggttccccacgtgtgaaagtcaagaatctgattgaaagcatgcaaataaatgggtcagtgttgaagaatggctccctgacaaatcatttctcttttgaaaaaaaaaaggccagagtggctgtcttaatatctggaacaggatcgaacctgcaagcacttatagacagtactcgggaaccaaatagctctgcacaaattgatattgttatctccaacaaagccgcagtagctgggttagataaagcggaaagagctggtattcccactagagtaattaatcataaactgtataaaaatcgtgtagaatttgacagtgcaattgacctagtccttgaagagttctccatagacatagtctgtcttgcaggattcatgagaattctttctggcccctttgtccaaaagtggaatggaaaaatgctcaatatccacccatccttgctcccttcttttaagggttcaaatgcccatgagcaagccctggaaaccggagtcacagttactgggtgcactgtacactttgtagctgaagatgtggatgctggacagattattttgcaagaagctgttcccgtgaagaggggtgatactgtcgcaactctttctgaaagagtaaaattagcagaacataaaatatttcctgcagcccttcagctggtggccagtggaactgtacagcttggagaaaatggcaagatctgttgggttaaagaggaatgaagccttttaattcagaaatggggccagtttagaaagaattatttgctgtttgcatggtggttttttatcatggacttggcccaaaagaaaaactgctaaaagacaaaaaagacctcacccttacttcatctatttttttaataaatagagactcactaaaaacaagactagttagtgcagcatatctgagaca

SEQ ID NO: 295649 - DNA, 3341 bp, Artificial Sequence
  derived and/or modified sequence
tggtcccgcgccggtcccggtgggccgacttccggcgagcgggcaagcgggaaccaggtggccacccggtgtcggtttcattttcctttggaatttctgctttacagacagaacaatggcagcccgagtacttataattggcagtggaggaagggaacatacgctggcctggaaacttgcacagtctcatcatgtcaaacaagtgttggttgccccaggaaacgcaggcactgcctgctctgaaaagatttcaaataccgccatctcaatcagtgaccacactgcccttgctcaattctgcaaagagaagaaaattgaatttgtagttgttggaccagaagcacctctggctgctgggattgttgggaacctgaggtctgcaggagtgcaatgctttggcccaacagcagaagcggctcagttagagtccagcaaaaggtttgccaaagagtttatggacagacatggaatcccaaccgcacaatggaaggctttcaccaaacctgaagaagcctgcagcttcattttgagtgcagacttccctgctttggttgtgaaggccagtggtcttgcagctggaaaaggggtgattgttgcaaagagcaaagaagaggcctgcaaagctgtacaagagatcatgcaggagaaagcctttggggcagctggagaaacaattgtcattgaagaacttcttgacggagaagaggtgtcgtgtctgtgtttcactgatggcaagactgtggcccccatgcccccagcacaggaccataagcgattactggagggagatggtggccctaacacagggggaatgggagcctattgtccagcccctcaggtttctaatgatctattactaaaaattaaagatactgttcttcagaggacagtggatggcatgcagcaagagggtactccatatacaggtattctctatgctggaataatgctgaccaagaatggcccaaaagttctagagtttaattgccgttttggtgatccagagtgccaagtaatcctcccacttcttaaaagtgatctttatgaagtgattcagtccaccttagatggactgctctgcacatctctgcctgtttggctagaaaaccacaccgccctaactgttgtcatggcaagtaaaggttatcctggagactacaccaagggtgtagagataacagggtttcctgaggctcaagctctaggactggaggtgttccatgcaggcactgccctcaaaaatggcaaagtagtaactcatgggggtagagttcttgcagtcacagccatccgggaaaatctcatatcagcccttgaggaagccaagaaaggactagctgctataaagtttgagggagcaatttataggaaagacgtcggctttcgtgccatagctttcctccagcagcccaggagtttgacttacaaggaatctggagtagatatcgcagctggaaatatgctggtcaagaaaattcagcctttagcaaaagccacttccagatcaggctgtaaagttgatcttggaggttttgctggtctttttgatttaaaagcagctggtttcaaagatccccttctggcctctggaacagatggcgttggaactaaactaaagattgcccagctatgcaataaacatgataccattggtcaagatttggtagcaatgtgtgttaatgatattctggcacaaggagcagagcccctcttcttccttgattacttttcctgtggaaaacttgacctcagtgtaactgaagctgttgttgctggaattgctaaagcttgtggaaaagctggatgtgctctccttggaggtgaaacagcagaaatgcctgacatgtatccccctggagagtatgacctagctgggtttgccgttggtgccatggagcgagatcagaaactccctcacctggaaagaatcactgagggtgatgttgttgttggaatagcttcatctggtcttcatagcaatggatttagccttgtgaggaaaatcgtggcaaaatcttccctccagtactcctctccagcacctgatggttgtggtgaccagactttaggggacttacttctcacgcctaccagaatctacagccattcactgttacctgtcctacgttcaggacatgtcaaagcctttgcccatattactggtggaggattactagagaacatccccagagtcctccctgagaaacttggggtagatttagatgcccagacctggaggatccccagggtcttctcatggttgcagcaggaaggacacctctctgaggaagagatggccagaacatttaactgtggggttggcgctgtccttgtggtatcaaaggagcagacagagcagattctgagggatatccagcagcacaaggaagaagcctgggtgattggcagtgtggttgcacgagctgaaggttccccacgtgtgaaagtcaagaatctgattgaaagcatgcaaataaatgggtcagtgttgaagaatggctccctgacaaatcatttctcttttgaaaaaaaaaaggccagagtggctgtcttaatatctggaacaggatcgaacctgcaagcacttatagacagtactcgggaaccaaatagctctgcacaaattgatattgttatctccaacaaagccgcagtagctgggttagataaagcggaaagagctggtattcccactagagtaattaatcataaactgtataaaaatcgtgtagaatttgacagtgcaattgacctagtccttgaagagttctccatagacatagtctgtcttgcaggattcatgagaattctttctggcccctttgtccaaaagtggaatggaaaaatgctcaatatccacccatccttgctcccttcttttaagggttcaaatgcccatgagcaagccctggaaaccggagtcacagttactgggtgcactgtacactttgtagctgaagatgtggatgctggacagattattttgcaagaagctgttcccgtgaagaggggtgatactgtcgcaactctttctgaaagagtaaaattagcagaacataaaatatttcctgcagcccttcagctggtggccagtggaactgtacagcttggagaaaatggcaagatctgttgggttaaagaggaatgaagccttttaattcagaaatggggccagtttagaaagaattatttgctgtttgcatggtggttttttatcatggacttggcccaaaagaaaaactgctaaaagacaaaaaagacctcacccttacttcatctatttttttaataaatagagactcactaaaaacaagactagttagtgcagcatatctgagaca

SEQ ID NO: 295650 - DNA, 3469 bp, Artificial Sequence
  derived and/or modified sequence
atgtccgccatgttagtgtctgacgcaggcgccattacaggagccgtctctcttgaggcgaccgtgtccgcataagttgtcagtccccagcagtgtttgggagccttaacaggcttgctaagtgcctgagattaaaggcgaagaggaagaagagcaagaagggcaacccggtgtttaacacacggctttcaggcgctctcaggtttcattttcctttggaatttctgctttacagacagaacaatggcagcccgagtacttataattggcagtggaggaagggaacatacgctggcctggaaacttgcacagtctcatcatgtcaaacaagtgttggttgccccaggaaacgcaggcactgcctgctctgaaaagatttcaaataccgccatctcaatcagtgaccacactgcccttgctcaattctgcaaagagaagaaaattgaatttgtagttgttggaccagaagcacctctggctgctgggattgttgggaacctgaggtctgcaggagtgcaatgctttggcccaacagcagaagcggctcagttagagtccagcaaaaggtttgccaaagagtttatggacagacatggaatcccaaccgcacaatggaaggctttcaccaaacctgaagaagcctgcagcttcattttgagtgcagacttccctgctttggttgtgaaggccagtggtcttgcagctggaaaaggggtgattgttgcaaagagcaaagaagaggcctgcaaagctgtacaagagatcatgcaggagaaagcctttggggcagctggagaaacaattgtcattgaagaacttcttgacggagaagaggtgtcgtgtctgtgtttcactgatggcaagactgtggcccccatgcccccagcacaggaccataagcgattactggagggagatggtggccctaacacagggggaatgggagcctattgtccagcccctcaggtttctaatgatctattactaaaaattaaagatactgttcttcagaggacagtggatggcatgcagcaagagggtactccatatacaggtattctctatgctggaataatgctgaccaagaatggcccaaaagttctagagtttaattgccgttttggtgatccagagtgccaagtaatcctcccacttcttaaaagtgatctttatgaagtgattcagtccaccttagatggactgctctgcacatctctgcctgtttggctagaaaaccacaccgccctaactgttgtcatggcaagtaaaggttatcctggagactacaccaagggtgtagagataacagggtttcctgaggctcaagctctaggactggaggtgttccatgcaggcactgccctcaaaaatggcaaagtagtaactcatgggggtagagttcttgcagtcacagccatccgggaaaatctcatatcagcccttgaggaagccaagaaaggactagctgctataaagtttgagggagcaatttataggaaagacgtcggctttcgtgccatagctttcctccagcagcccaggagtttgacttacaaggaatctggagtagatatcgcagctggaaatatgctggtcaagaaaattcagcctttagcaaaagccacttccagatcaggctgtaaagttgatcttggaggttttgctggtctttttgatttaaaagcagctggtttcaaagatccccttctggcctctggaacagatggcgttggaactaaactaaagattgcccagctatgcaataaacatgataccattggtcaagatttggtagcaatgtgtgttaatgatattctggcacaaggagcagagcccctcttcttccttgattacttttcctgtggaaaacttgacctcagtgtaactgaagctgttgttgctggaattgctaaagcttgtggaaaagctggatgtgctctccttggaggtgaaacagcagaaatgcctgacatgtatccccctggagagtatgacctagctgggtttgccgttggtgccatggagcgagatcagaaactccctcacctggaaagaatcactgagggtgatgttgttgttggaatagcttcatctggtcttcatagcaatggatttagccttgtgaggaaaatcgtggcaaaatcttccctccagtactcctctccagcacctgatggttgtggtgaccagactttaggggacttacttctcacgcctaccagaatctacagccattcactgttacctgtcctacgttcaggacatgtcaaagcctttgcccatattactggtggaggattactagagaacatccccagagtcctccctgagaaacttggggtagatttagatgcccagacctggaggatccccagggtcttctcatggttgcagcaggaaggacacctctctgaggaagagatggccagaacatttaactgtggggttggcgctgtccttgtggtatcaaaggagcagacagagcagattctgagggatatccagcagcacaaggaagaagcctgggtgattggcagtgtggttgcacgagctgaaggttccccacgtgtgaaagtcaagaatctgattgaaagcatgcaaataaatgggtcagtgttgaagaatggctccctgacaaatcatttctcttttgaaaaaaaaaaggccagagtggctgtcttaatatctggaacaggatcgaacctgcaagcacttatagacagtactcgggaaccaaatagctctgcacaaattgatattgttatctccaacaaagccgcagtagctgggttagataaagcggaaagagctggtattcccactagagtaattaatcataaactgtataaaaatcgtgtagaatttgacagtgcaattgacctagtccttgaagagttctccatagacatagtctgtcttgcaggattcatgagaattctttctggcccctttgtccaaaagtggaatggaaaaatgctcaatatccacccatccttgctcccttcttttaagggttcaaatgcccatgagcaagccctggaaaccggagtcacagttactgggtgcactgtacactttgtagctgaagatgtggatgctggacagattattttgcaagaagctgttcccgtgaagaggggtgatactgtcgcaactctttctgaaagagtaaaattagcagaacataaaatatttcctgcagcccttcagctggtggccagtggaactgtacagcttggagaaaatggcaagatctgttgggttaaagaggaatgaagccttttaattcagaaatggggccagtttagaaagaattatttgctgtttgcatggtggttttttatcatggacttggcccaaaagaaaaactgctaaaagacaaaaaagacctcacccttacttcatctatttttttaataaatagagactcactaaaaacaagactagttagtgcagcatatctgagaca

SEQ ID NO: 295651 - DNA, 3033 bp, Artificial Sequence
  derived and/or modified sequence
atggccgcaagggtgctaatcattgggtccggaggaagggaacatactctcgcttggaagctggctcagtctcaccatgtcaagcaggtcctggtcgccccaggcaatgctgggaccgcttgttctgagaagatttcaaatacagcaataagcatctccgatcacactgcactggctcagttctgcaaagagaagaaaatcgagtttgtggtcgtcggcccagaagccccactcgctgctgggatcgtaggtaatttacgctcagcaggtgtccaatgtttcggcccaaccgctgaggcagcacagctggagtcctccaagaggtttgcgaaggagtttatggatcgtcatggaattccaaccgctcagtggaaagcattcacaaaaccggaagaagcctgctccttcattctgagcgctgacttcccagccctggtcgtgaaggcaagtggactcgccgcaggtaaaggggtgatcgtagcaaagtcaaaagaagaggcctgcaaagctgtccaagagataatgcaggagaaggcttttggagcagccggagagaccatagtgatagaggagctgttggatggggaggaagtcagttgcctgtgtttcactgatggcaaaaccgtcgccccaatgcctcccgctcaggaccacaagagactgctggagggcgacggaggtcccaatacagggggaatgggcgcatactgcccagctccccaggtatcaaacgacctacttctgaagattaaggataccgtactccagagaactgtggacggcatgcagcaggagggtaccccctataccgggatcctgtacgctggcatcatgttgactaaaaacggacccaaggtactggagtttaattgcagatttggcgatcccgagtgccaagttattctgccgctgttgaaatcagatctgtatgaggttattcagagcaccctggacggcttgctatgtacttcactcccagtgtggttggagaaccataccgctctcactgtggtgatggcttcaaaaggataccccggagattatacaaagggcgtggaaattactggctttcccgaggcacaggcacttggcctcgaggtgttccatgcaggtactgccttgaagaacggaaaggtggtgacgcacgggggacgggttttagccgtgactgccatccgcgagaacttgatttctgcccttgaagaagctaaaaaaggactcgccgcaatcaagttcgaaggtgccatatataggaaagatgtcgggttcagggcaatcgcctttctgcagcagcccagatcattaacttacaaagagagtggggtcgacattgcagcaggtaacatgctcgttaagaaaattcagccactggcgaaagccacaagccggtctggctgtaaggtggatctgggtggcttcgccggactcttcgatctcaaagccgctggcttcaaggacccgttgctggcttccggaactgatggggtgggcacgaagctcaagatcgcccaactttgtaacaaacacgatacaattgggcaggacctcgtggctatgtgtgtgaatgatattcttgcgcagggcgctgagcctctctttttcttggactatttttcctgtggaaaactcgatcttagcgtgacagaagcagtcgtggccggtatagccaaggcctgtgggaaagcagggtgcgctctcctgggcggtgagacggctgaaatgcctgatatgtatcctcccggagagtacgacctggccggttttgctgtgggcgcaatggaaagggatcagaaactcccgcatctggaacggatcaccgagggcgacgtggtggtgggcatcgcctctagcgggctccatagtaacggattctctctggtgaggaagatagtggccaagtcaagtctgcagtactcctctccggctcctgatgggtgtggtgaccagacactgggtgacttgttactgacgcccacgcgtatctattctcatagcctcctgcctgtgttgcgaagcggtcatgtgaaggcattcgcacacatcacgggagggggtcttcttgaaaacatccccagagttttacccgagaagctcggtgtcgacctggacgctcagacctggcgcattcccagggtgtttagctggctgcagcaagagggacatctgtctgaggaagagatggctcggacattcaactgcggggtcggggcagtcctcgttgtgtctaaggagcagacagaacagatactgcgagatattcaacagcataaggaagaggcttgggtcatcggttctgtggtggcccgtgctgagggcagccctcgagtcaaggtaaagaatctcattgaaagtatgcagatcaatggatcggtattaaaaaacgggtctttgacaaatcatttctctttcgagaagaagaaagctcgcgtcgcagtacttatctccggaaccggctcaaatctgcaggccctgatcgattcaacgagggagcctaattcttccgcacagattgacatagtcatcagcaacaaggccgcagtggccggactggacaaagcggagagagctggcattcccacaagagtaataaaccacaagttatataagaacagagttgagttcgactctgctattgatctggtcctcgaggaattttccatcgacattgtatgtctggccggttttatgagaatcctctctgggccttttgtgcagaagtggaatggcaaaatgttgaatattcaccccagtctgttgccatcctttaaaggttccaacgcccacgaacaggctctcgagaccggggtaaccgttactggatgcaccgtacatttcgttgctgaggacgtagatgcaggacaaattatcctccaggaagctgtgccagtgaagaggggagatacggtcgccaccctttctgaacgggtgaagttggccgagcacaagatttttcctgcagccctgcagctagttgcctctgggactgttcagctgggagaaaacggcaagatctgttgggtgaaggaagagtag

SEQ ID NO: 295652 - DNA, 3033 bp, Artificial Sequence
  derived and/or modified sequence
atggcagctcgcgttctgattatcggctccggtggacgcgagcatacactcgcatggaagctagcccagagccaccacgtgaagcaggtgctggtcgctcctggcaacgccggtacagcctgttctgagaagatcagcaatacagccatcagtattagcgaccacacagcgcttgctcagttctgcaaagagaagaagatcgaatttgtggtcgtgggacctgaagcgccacttgcggctggaatcgttggcaatctccggagcgcaggagtgcagtgctttggtcctacagctgaggctgctcagctggaatcctcaaagagatttgccaaggagttcatggataggcatggcatcccaacggcccagtggaaggcctttactaagcctgaagaggcttgttctttcattcttagtgctgacttcccagctctggtggtgaaagcgagcgggctggccgcagggaaaggggtgatcgtagcaaaatcaaaggaggaagcatgtaaggcagtacaggagattatgcaagaaaaagcctttggcgctgctggggagacaatcgttattgaggagctcctggacggggaagaagtgagctgcctgtgcttcaccgatggaaagaccgttgcacccatgcctcctgcacaagatcacaagagattgctcgaaggggatggcggtcccaataccgggggaatgggtgcttattgccccgctccacaggtatccaatgatcttttacttaaaattaaggataccgtcctgcagcgtaccgtggacgggatgcagcaggaaggcacaccatacaccggtatcctgtatgccggtattatgctcactaagaatgggccaaaggtcctggagttcaattgtcggttcggtgatccagagtgccaagttattttgccactactcaagtccgacctgtacgaggtaattcagtccaccctggacgggctactttgcacatccttgccagtgtggttagagaatcatactgcactgactgtggtgatggcttccaaaggctatcccggagattataccaaaggcgtggaaattactggcttcccggaagcccaggccctgggcttggaggttttccatgcaggtacagccctcaagaacggcaaagtggtgacacacggaggcagggtgctggcggtcaccgcgatcagggagaacctgatttctgcactcgaagaagccaagaaggggctggctgctatcaaatttgagggtgctatctatcggaaggacgtaggatttcgcgcaatcgcattccttcagcagcctaggagtttgacatacaaggaatctggagtagatattgccgcagggaatatgctggtgaaaaaaattcagccactcgcaaaagccacatcccggtcaggatgcaaggtggatcttggcggattcgctgggctctttgatctcaaagccgcaggcttcaaagatcctctgctagcctctgggacagacggtgtggggacaaaattgaagatcgcacagctgtgcaataaacatgataccataggccaagacttggttgccatgtgcgttaacgatattctggcccagggcgcagaaccgctctttttccttgactacttttcctgcgggaagctggacctgagcgtgaccgaggccgtagtggcgggtatcgcaaaggcgtgtggaaaggccggatgtgcgctattgggtggagagactgcagaaatgccagatatgtatccaccgggagagtacgaccttgcaggctttgcagtgggcgctatggaacgggatcagaaactgccccacctggaacgcattacagaaggggacgtggtggtgggaatcgcttccagtggtcttcattcaaatggtttcagcctcgtgagaaaaattgtggctaaaagctccctccaatactctagtcccgcacctgatgggtgcggcgaccagaccctcggggatctccttcttactcctactcgaatctactctcattctctcctgcccgtgctgagaagcggacacgtcaaagcctttgcccacattactgggggaggactgctcgagaacattccgagggtgcttccggaaaagctaggcgtagacctagatgcacagacttggagaataccaagagtgttctcctggttgcagcaggagggccacctgtccgaagaagagatggcgcgaactttcaactgtggcgttggtgctgtcctcgttgtttctaaggagcagactgagcagatactgagagacatccagcagcataaggaggaagcttgggtgattggaagcgttgtcgcaagagctgagggcagcccccgtgtaaaagttaaaaatttgatagagagtatgcagattaacggttcggtccttaaaaacggcagtttaactaaccatttctctttcgagaaaaaaaaagctcgggtggccgtgttgataagcggcaccgggagcaatctccaggccttgatcgactctacgagagaacccaatagctccgcccaaatcgatattgtgatttccaacaaagctgctgtggccggactggacaaggctgagcgggctgggatccccacacgcgttattaaccacaaactgtacaagaaccgcgtcgaattcgactccgcgatagatctagtccttgaggagttctctatcgatattgtttgtctggccggattcatgcgtattctgtcaggaccttttgttcagaagtggaacggaaagatgctcaacattcaccctagtttgctaccctcatttaaggggtcgaacgctcacgaacaggctctagagaccggagtgactgtcacaggttgtaccgtgcatttcgtggccgaggatgttgatgccggacagatcatcttgcaggaggctgtacccgtgaagcgcggtgatacagtcgcaacactgtccgaacgggtgaagttggctgaacataagatcttcccagcggcactacaattggtggcctccggcactgtccagctgggcgaaaacgggaagatctgctgggtgaaggaggaatag

SEQ ID NO: 295653 - DNA, 3033 bp, Artificial Sequence
  derived and/or modified sequence
atggccgctagagtcctgattattggctccggagggagagaacatacactcgcttggaaactagctcagtcgcaccacgtgaaacaagttctggtggctcccggaaacgcaggaaccgcatgctcagagaaaatctctaataccgcgatttccatctcagatcacacagccctggcacagttttgtaaagaaaaaaagatcgagtttgtcgtggttgggcctgaggccccactcgcggcaggtatcgtcggtaacctgcggtccgccggtgtgcagtgctttgggcctactgcagaggctgcacagttggagtctagtaagcggtttgccaaggagtttatggataggcacgggatccctactgcacagtggaaagccttcacaaaacctgaggaggcctgctctttcatcctctccgccgacttcccggcactagttgttaaggcctccggcctggccgcaggaaagggcgtcatcgttgcaaaatcgaaggaagaagcctgcaaagccgtgcaggagataatgcaggaaaaagcttttggcgctgctggggagactattgttatcgaagagcttttagacggggaggaggtatcctgcctctgctttaccgatggcaaaactgtcgcacccatgccacccgcacaggatcacaaacgcttgctggagggcgacggcggtcctaatacagggggaatgggagcttactgtcctgcaccccaggtgtccaatgatttactcttgaaaattaaagacacagtactgcaacggaccgtggacggcatgcaacaggagggtaccccttatactggaattttgtatgcgggaatcatgttgaccaaaaacggcccaaaagtgctcgagtttaattgtcgatttggggatccagagtgccaggtgatccttcccctgctgaaatcagacttatacgaagtaattcagtccacacttgacggcctgctgtgcacttccctgcccgtctggctcgagaatcatactgccctcaccgtcgtaatggccagcaagggctacccaggagattatactaaaggggtagaaattaccggattccctgaagctcaagcactcggcctcgaagtgtttcacgcaggaactgctctgaaaaatgggaaggtggtgacacatgggggtcgggtcctggcagtgaccgcaatccgcgaaaatcttattagcgcattggaagaggctaagaagggacttgccgcaattaagttcgaaggcgctatctatagaaaagatgtcggcttcagagcaattgcattcctgcagcaacctcgttccctgacatataaggagtcaggtgtggatatagccgcaggcaatatgcttgtgaagaaaattcagccgctagcaaaagcaacctcaagatccggctgtaaggtggacctcggtgggttcgctgggttatttgacttgaaggctgctggatttaaggatccccttctagcaagcggcaccgacggtgtcggcaccaagctgaaaattgcacaattatgtaacaaacatgatacaatcggacaggaccttgtggccatgtgtgttaatgatattctggctcagggtgccgagcctctattttttctcgactatttttcatgcggcaagcttgatctgtctgtaacagaggccgtggttgccggaattgcaaaggcttgcggaaaagcgggatgcgcattactggggggagaaactgctgagatgccagatatgtaccccccaggcgagtacgaccttgctggcttcgcagtgggtgctatggagagggaccagaagctcccccatcttgagcgcattacagagggcgacgttgtggtgggcattgcctctagtggcttgcattccaatggcttctccctggttaggaagatcgttgcaaagagctccctacaatatagctctccagcacccgacggttgcggagatcagaccctcggagaccttcttctaacgcctacacggatttactcccatagcctccttcctgtgctgagaagtggccatgtgaaggcatttgcacacatcactggaggcggactgctcgagaacatcccgagagtgttaccggaaaagctgggggtggatctggacgcacaaacttggcggatcccacgtgtgttttcctggcttcagcaggaaggccacctgagcgaggaagagatggccagaacctttaactgtggcgttggcgctgtgctagttgttagcaaggaacaaactgaacagatattgagagacatccagcagcataaagaggaagcctgggtgatcggtagcgtggtagcaagagcagaaggttctcctagggtgaaggtaaaaaatttaattgagagcatgcagataaacgggagtgtcttgaagaatggctcccttacaaatcacttttctttcgaaaagaaaaaggcccgtgtggcagtgctgatttcagggaccgggagtaacctgcaggcactgatagactctaccagagagcccaacagttcagcgcagattgacatcgtgatctccaataaagccgcagtagctggtctggacaaagcagagcgggcaggaattcccacccgcgtcatcaaccataagctgtacaagaaccgggttgaatttgactcagccattgacctggtactagaagaattctctattgatatagtctgtctcgccggattcatgcgcattctgagcgggccattcgtgcagaagtggaatggcaagatgttaaatattcatccaagcttactaccaagttttaagggctctaacgcccatgaacaagccctcgaaacgggtgtaacagtcaccggttgcacggtgcactttgtcgctgaggatgttgacgcaggccagataatactgcaggaagccgtacccgtcaaacggggagatacagttgcaacgctctcagaaagggtaaaactggctgaacataaaatctttcctgccgctttacagcttgttgcctcgggcaccgttcagctgggggaaaacggtaagatctgctgggtaaaggaagaatag

SEQ ID NO: 295654 - DNA, 3033 bp, Artificial Sequence
  derived and/or modified sequence
atggccgctagggtgttaatcatcgggagtggtggcagagagcacacattagcatggaaactggctcagagtcaccacgtaaagcaggtgctggtcgctcccgggaatgcggggacagcttgcagcgagaagattagtaacactgcaatcagtatctctgatcacactgctcttgcccaattctgcaaagaaaaaaagatcgagtttgtggtcgtggggccagaagcccctttagcagccggcattgtgggaaatctgcgatctgccggcgtgcaatgtttcggccctacagctgaggccgcacaacttgagtcctccaaacggttcgctaaagaatttatggaccggcatggcattcccaccgctcagtggaaagcatttacaaaaccagaggaggcatgcagtttcatcctaagtgctgatttcccggcccttgtcgtgaaagcctcggggctcgccgccgggaaaggcgttattgtggccaagtccaaggaggaagcctgtaaggcggtgcaggagattatgcaggagaaagctttcggcgctgccggcgagaccatcgtaatcgaggagctgctagacggcgaagaggtgtcttgcctgtgttttacagacggaaaaaccgtcgcccccatgcccccagctcaagatcacaagaggctgctggaaggggatggcggccctaatacgggtgggatgggtgcttattgcccagctccgcaggtgtccaatgatctgctgctcaaaatcaaggacactgtcctgcagcggacggtggacgggatgcagcaggagggcaccccatacacaggcattctgtacgcagggatcatgctgacaaaaaatggaccaaaagtcctcgagtttaattgtaggtttggagacccagagtgccaggtgattctgcccctgctcaagagcgacttgtatgaagtgattcagagcacccttgatggcctgctttgcactagcctgccagtgtggctcgaaaatcacactgcattgactgtagtgatggccagtaaaggctaccccggcgattacaccaagggcgtcgagatcaccgggttccccgaggcccaggccttggggttagaggtttttcacgctggcactgcactcaagaatggtaaggtggtgacccacggggggagagtgctcgcagtaactgctattagagagaatctaatttctgccctggaggaggcgaaaaaagggctggccgcaatcaagtttgagggggcaatctacagaaaagatgtggggtttcgcgccatcgcctttttacagcagcccaggagcctgacctacaaagaaagcggcgtcgatatcgccgctggcaatatgttggtgaaaaaaattcagcccctggccaaggctacttcacgatctggttgcaaagtggatctcggcggattcgccgggctgtttgatctgaaggccgccggctttaaggacccgctcctggcatccgggaccgatggcgttggtactaaattaaagatcgcacaactgtgcaataagcatgatacaatcgggcaagacctggtggccatgtgtgtgaacgacattctcgctcagggcgcggagcctttattttttctggactatttctcatgtggcaaactcgacctgagcgtcaccgaggcggtcgtggccggcatcgcgaaggcttgtggaaaggccggctgtgccctgttaggcggcgagacagcagagatgcccgacatgtaccctcccggtgagtacgacctggctgggtttgcagtcggggcgatggaaagggatcagaaacttccccatctggagaggatcactgagggagacgtagttgtgggcatcgcgagctctggcttacattcaaacgggttcagcctggtacggaaaatcgtagctaaatcctccttgcagtactcatcgccagcacccgacggctgtggggatcagacacttggggatctcctcctgacacccacccgcatctatagccacagtctgctcccagtgctgcggagcggccacgttaaggccttcgctcatatcacgggcggaggcttactggagaatatccctcgtgtgctgccagaaaaactcggagttgatctagacgcgcaaacatggagaatcccacgggtgttctcttggctgcaacaagagggccacttaagcgaagaggagatggctagaacatttaattgtggagtgggggctgtgcttgtcgtgtcaaaggagcagaccgagcagatccttagagacatccagcaacacaaagaagaggcttgggtcatcggctccgttgtagcacgcgccgaaggatccccacgtgtgaaagtgaagaatctaattgagtcaatgcagatcaatggatctgtgctcaaaaatggttccttgaccaaccacttttccttcgagaagaagaaggcccgcgtcgctgtgctgatctccgggactggttctaacttgcaggccctgatcgactctactcgggagcccaatagtagcgcccaaattgacatagtcatcagtaacaaggccgctgtggcgggattagacaaggccgaaagagccgggatacccaccagagtcataaatcacaagctctacaaaaaccgggtggagttcgactccgccatcgacctggtgctggaggaatttagtatcgatatcgtgtgccttgcaggtttcatgcggatcctgagcggccctttcgtgcagaaatggaacggcaagatgttgaatatacatcctagcctgctacccagttttaaaggctctaacgcacatgagcaagccctagaaaccggcgtcaccgttaccggttgtaccgtgcactttgttgccgaggacgtagatgctggacagattatcctacaggaggcagtgccagtgaaaaggggcgatacggtggctacattgagcgaaagggttaagcttgccgagcacaagatttttcctgcagcacttcagttggttgccagtgggacagtacagttgggggagaatggcaagatatgttgggttaaggaggagtag

SEQ ID NO: 295655 - DNA, 3033 bp, Artificial Sequence
  derived and/or modified sequence
atggctgctcgtgtgctgatcatcggtagtggcgggagggaacatacgctcgcgtggaagctggctcagtcacatcatgtgaaacaggtgttggtcgccccgggcaatgcaggcactgcgtgctctgagaagatctccaacactgcaatttcgattagtgaccataccgctctcgcccaattttgtaaggaaaaaaagatcgaattcgtggtggtgggacctgaggcccctctggccgccgggatcgtgggaaatttacgttcagcgggggtccagtgctttggccctacagccgaagctgcacagctggaaagttccaagcgattcgcgaaggagtttatggatagacacggcatacccaccgcacaatggaaggcttttacgaagccagaggaggcctgttcttttatcctgagtgctgattttccagcacttgtggtcaaggcttcaggcctggccgcggggaagggcgtaattgtagcaaagagcaaagaggaggcctgtaaagccgtacaggagattatgcaggagaaggcctttggggctgcaggcgaaaccatcgtcatcgaggagctcttggatggtgaggaggtcagctgcctgtgtttcactgacggtaagactgtggcccccatgccgcccgcccaggatcacaagcgcctactggagggtgatggcggccccaataccggcggtatgggcgcctactgcccggccccacaggtcagcaacgacctgcttctgaaaatcaaagacaccgtgttgcagcgtactgttgacggcatgcagcaggagggtaccccctacaccggtatcttatacgcaggaataatgctcacgaagaacgggccgaaggtacttgaatttaactgtagatttggggatcccgaatgtcaggtgattctccctttgcttaaatcagacctatacgaggtaattcaatcaactcttgatgggctcctatgtacaagtctgcccgtctggctcgaaaatcataccgctttgaccgtagtgatggccagtaagggttaccctggagattatactaagggcgtggagatcaccggcttccctgaagcccaggcactcggtctggaggtgtttcatgccggcacagctctcaagaatgggaaagtcgttacgcatggcgggcgggtgctcgcagttactgcgataagggaaaacctgatcagtgccttggaggaagccaagaaagggcttgccgcgataaagtttgagggtgcgatctataggaaggacgtggggttccgggccatcgcatttcttcaacagcctaggagcctgacatataaggaatcaggggttgatattgcggctggaaatatgcttgtcaagaaaattcagccactggccaaggctacaagtcgctcaggctgcaaagtggatcttggcggcttcgccggactttttgacttaaaagcagctggattcaaagaccccctgctcgcttctggaaccgacggggtaggaacaaagctgaaaattgcccaactgtgtaacaagcatgatactatcggacaggatcttgtggccatgtgcgtcaacgacatactggctcagggcgcggaacccctgttttttctagactattttagctgcgggaagctggatctgtccgtgaccgaggcggttgtcgccggtatagcgaaggcctgtgggaaggccggctgtgccctcttgggaggcgagaccgccgagatgccggacatgtatcctcctggcgaatacgacttggccgggtttgccgtgggggcaatggagagggatcagaagctgccacatctggagcggattaccgaaggcgacgttgtcgtcggaatcgcaagcagtggcttacattccaatgggttttcccttgtgcgcaagatcgtggccaagagttcgctgcagtatagcagtcctgctccggatgggtgcggcgaccagacactgggggatctgttactcacccccacacgcatttattcacattccctgctccctgttcttcgatcaggtcacgtgaaagcctttgctcatatcacgggaggaggtttattggaaaacatcccacgagtgttgccagaaaagctgggggtggacctggatgcgcagacctggcgtatcccgcgagtgttcagttggttacagcaggagggacatttgtcagaagaggaaatggccaggacctttaattgcggggtgggagccgtgctggtagtgagtaaggaacagaccgagcagatcctacgggatatccagcagcacaaggaagaggcctgggtgattggatcagtagtggcccgcgccgaaggttcaccccgtgtgaaagtgaaaaacctcatcgagtcaatgcaaattaatgggagtgtcctaaaaaacggttcactgacgaaccacttctccttcgaaaagaaaaaggctagggttgctgtgctgatcagtgggacaggttcgaacctgcaggctcttatcgatagtacccgagagcccaattcctctgctcaaatcgacatagtcataagcaacaaagcggctgtggccggactcgacaaggctgagcgggccgggatacctactcgggtcatcaaccataagctttataagaatagggtggagttcgactctgccatagatcttgtcctagaagaattcagcattgatatcgtgtgcctcgccggctttatgcggatcctctctggaccttttgtgcagaaatggaacgggaaaatgctgaatatacacccaagcctcctaccttcctttaaaggtagtaacgcccacgaacaggcgctcgagaccggcgtgacagtgactggttgtaccgtccattttgtcgccgaggacgttgacgcagggcagattatcctgcaggaagcggtaccagtaaagcggggcgatacagtggccacgctttcagagagggtgaagcttgctgaacataagattttcccagcggcacttcagctcgtggcctctggtacagttcaactcggagagaacggtaaaatttgctgggtcaaagaggagtag

SEQ ID NO: 295656 - DNA, 3033 bp, Artificial Sequence
  derived and/or modified sequence
atggctgcgagggtgctgattattgggtcaggaggccgggagcacaccctagcctggaagctggcccagagccatcacgtcaaacaggtactggtcgctcctgggaacgctggtaccgcgtgcagcgagaagattagcaacactgctatcagcattagtgatcatacagctcttgcacaattttgtaaggagaagaagatcgaattcgtggtcgtggggccagaggcaccgctggccgctggcatcgtggggaatttgcgctcagccggcgtccaatgctttggaccaacagcagaggcagcacagttagagagcagcaagcggttcgcgaaggagtttatggaccgccacggaatcccgaccgcgcagtggaaggcattcaccaaaccagaggaagcctgcagttttatactctccgccgacttcccggccctggtagttaaggcctcaggcctagcagccggtaaaggcgttattgtggccaaatcgaaagaagaggcctgcaaagccgtccaggagattatgcaagagaaagccttcggagctgctggcgagactattgtgatcgaagaactgctggacggcgaggaagtctcttgtctgtgcttcacagatggaaaaactgttgccccgatgccgcctgcacaggatcacaaacggctgctggagggagacggaggaccgaataccggcggcatgggcgcctactgcccagcccctcaggtgtcgaacgatctgcttctaaaaattaaggacactgtcctgcagagaactgtagacgggatgcagcaggaaggcaccccgtatacgggaatcctctacgccggcatcatgcttaccaagaacgggcccaaggttcttgagttcaactgccggttcggggatcctgaatgtcaagtgatattgcctttactgaaatccgacctatacgaggtgatccaatcaactcttgatgggctgctatgtactagcctaccggtctggctcgagaaccacactgctttgactgtggtgatggcatccaagggctatccaggagattacaccaagggcgtcgaaattaccggtttcccagaagcccaggctctggggctggaggtgttccacgccgggaccgctctcaaaaacgggaaagtcgtgacacacggaggacgggtactcgccgttacagcaatacgagaaaatctgatctccgcactggaggaagccaagaaaggcttggccgctatcaagtttgagggcgccatttaccggaaggatgtggggttccgggccatcgccttcctgcaacaacctagaagtttgacatacaaagagtctggggtagatatcgcggccggcaatatgttggttaaaaaaattcagccactggccaaggcaactagtagaagcgggtgcaaggtagacctgggaggctttgccgggttgttcgatcttaaggccgctggctttaaggatcccttgctggccagcggcactgacggcgtgggcacgaaactgaaaatagcccaattatgcaacaagcacgacaccattggtcaggacctggtcgcgatgtgtgtcaatgacatcctggcccagggggcggaacccctcttcttcctggattattttagttgcggcaagctggacttgagtgtaactgaagcagtcgttgctgggattgccaaggcatgtggcaaggccggctgcgccctactgggaggagaaaccgcagaaatgcccgacatgtatccaccaggcgagtacgacctggcaggatttgccgtcggggcaatggaaagagaccagaagttgccacatctcgagcggatcaccgagggagatgtggtggtggggatagcctcttcaggcttgcactcaaatgggttctcactggtgcgcaaaattgtggcgaaaagttctcttcagtactccagccccgcacccgatgggtgcggagatcagacactgggcgacctacttctgactccaaccaggatctacagccactctctcttgcccgtgttaagaagcggacacgtgaaggcgtttgcgcacattaccggagggggactgctcgagaatattcccagggtgctgcctgaaaagctgggcgtcgatctagatgcccagacgtggcgcatacccagggtcttctcctggcttcagcaggaaggccatctgtccgaggaggagatggccagaacattcaactgtggagtgggggccgtccttgtggtgagcaaggagcaaacagaacagattctaagggatatccaacagcataaagaggaggcttgggtcatcggtagtgttgtcgccagagcagagggttccccacgggtgaaggttaagaatctgattgaatccatgcagatcaatggctcagtcctgaaaaatggtagcttaacaaaccatttcagcttcgagaagaaaaaggctcgggtagccgtgttaatctctggaacaggttctaacttgcaggcactaatcgactcgacccgagagcccaacagctcagcacagattgacatcgtgatcagtaacaaggccgctgttgcaggccttgataaagctgagcgggccgggatccctacgcgcgtgatcaaccataagctgtataaaaaccgtgtggagttcgatagcgcgatcgatctggtgctcgaagaattctctattgatatcgtctgtttggccgggttcatgagaatactgagcggccccttcgtgcaaaaatggaatgggaaaatgctgaatattcatccatccttgctgccatcctttaaggggtccaatgcccacgagcaagcgcttgagacaggcgtcaccgttacaggctgcacggtacatttcgttgcagaagatgtcgatgcaggccagattatcctgcaagaagcagtccctgtaaagcggggcgatacagtagccactctgtcagaaagggtgaagcttgctgaacataaaatctttcccgccgccctacagcttgttgcctccggcacagtgcagctgggggagaacggaaagatctgttgggtgaaagaagaatag

SEQ ID NO: 295657 - DNA, 1689 bp, Artificial Sequence
  derived and/or modified sequence
atgctggtgaagaagatccaaccacttgccaaagcaacgtcaaggtcaggctgtaaagtcgacctgggtggcttcgctggtcttttcgaccttaaagcggcaggtttcaaggaccctctcctagcctctggtactgatggtgtggggactaaattgaagatagctcagctctgtaataaacatgatactattgggcaggatcttgtggcaatgtgtgtgaacgacatcctggcgcagggagccgagcccctttttttcctcgattacttttcatgcggcaaactcgatctgagcgtcaccgaggcagtcgtggccggcatcgccaaagcctgcggaaaggcaggatgtgcactcctgggcggcgagaccgcagaaatgcccgacatgtaccccccaggtgagtatgatctggcgggcttcgcagttggtgccatggagagagaccagaagttacctcatctggaacgcattactgaaggggacgtcgtggtaggaatcgcctcttcggggctgcactccaatggcttcagcctcgtgagaaaaatcgtggctaaaagtagtcttcagtactcttcccctgccccggacgggtgcggagaccagactttaggggacctgctgctaacacctactagaatctacagccattccctgctgcccgtgcttaggtccggccacgttaaggcttttgcgcacattactgggggaggcctactcgaaaatattcctagggttttgcctgagaaactgggggtggatctcgatgcccagacttggcgcattccaagagtgttcagttggctgcagcaggaggggcatctgagcgaggaggagatggcgcgaacctttaactgtggagtcggtgcagtcttggtggtgtcgaaagagcagacggagcagatcctgcgcgacatccagcaacataaagaggaggcctgggtcattggctctgtggttgccagagcggagggatcccctagggtgaaagtaaagaatctgatcgaaagcatgcagattaacggcagcgtgctcaagaatggaagcctcacaaaccattttagctttgagaagaaaaaggcccgggtggctgtgctcatctctggtacaggctcaaatctgcaggccctcattgactctactcgggagcccaattcctcagctcagattgacattgtgatatctaataaagcggccgtggctgggttggacaaagcagagagagccggcattcctacccgtgtgattaatcataaactgtacaagaaccgggtggaattcgattcggctatagatttggtcctagaagagtttagtattgatatagtgtgtttggcaggctttatgcggattctgtcagggcctttcgttcagaagtggaacggaaaaatgttgaacatccatccatcacttctgcctagttttaaaggaagcaatgcacacgaacaggccctggaaacgggcgtgactgttaccgggtgtactgtgcattttgttgcggaagacgtggacgcaggacaaataatcctgcaggaggccgttcctgttaagcgcggcgataccgtcgccaccttaagcgaacgagtgaaacttgctgagcacaagatatttcccgctgcactccagctggtggcctcaggaaccgtccagctgggtgagaacggcaaaatctgttgggtcaaagaggaatag

SEQ ID NO: 295658 - DNA, 1689 bp, Artificial Sequence
  derived and/or modified sequence
atgctggtgaagaagatccagcccctggccaaggccaccagccgcagcggctgcaaggtggacctgggcggctttgctggcctgtttgacctgaaggccgccggcttcaaggaccccctgctggccagcggcacagatggagtgggcaccaagctgaagatcgcccagctgtgcaacaagcatgacaccatcggccaggacctggtggccatgtgtgtgaatgacatcctggcccagggcgctgagcccctcttcttcctggactacttcagctgtgggaagctggacctgtctgtgacagaggccgtggtggccggcatcgccaaggcctgtgggaaggccggctgtgccctgctgggcggggagacagctgagatgccagacatgtacccacctggagaatatgacctggccggctttgctgtgggcgccatggagcgggaccagaagctgccccacctggagcgcatcacagaaggagatgtggtggtgggcatcgccagcagcggcctgcacagcaatggcttcagcctggtgaggaagatcgtggccaagagcagcctgcagtacagcagccctgccccagatggctgtggggaccagaccctgggggacctgctgctgacccccacccgcatctacagccacagcctgctgcctgtgctgcggagcggccacgtgaaggcctttgcccacatcaccggcggcggcctgctggagaacatcccccgggtgctgcctgagaagctgggcgtggacctggatgcccagacctggaggatccccagggtcttctcctggctgcagcaggagggccacctgtctgaggaggagatggcccggaccttcaactgtggggtgggcgctgtgctggtggtgtccaaggagcagacagagcagatcctgcgggacatccagcagcacaaggaggaggcctgggtgattggctctgtggtggcccgggcagagggcagcccccgggtgaaggtgaagaacctgattgagagcatgcagatcaatggatctgtgctgaagaatggcagcctgaccaaccacttctcctttgagaagaagaaggcccgggtggccgtgctgatctctggaacaggcagcaacctgcaggccctgattgacagcacccgggagcccaacagcagcgcccagattgatattgtcatcagcaacaaggctgctgtggccggcctggacaaggccgagcgggccggcatccccaccagggtcatcaaccacaagctgtacaagaacagagtggagtttgacagcgccatcgacctggtgctggaggagttcagcattgatattgtgtgcctggccggcttcatgaggatcctgagcggcccctttgtgcagaagtggaatggcaagatgctgaacatccaccccagcctgctgcccagcttcaagggcagcaatgcccacgagcaggccctggagaccggggtgacagtgacaggctgcaccgtgcactttgtggccgaggatgtggatgctggccagatcatcctgcaggaggccgtgcctgtgaagagaggagacacagtggccaccctgtctgagcgggtgaagctggccgagcacaagatcttccctgctgccctgcagctggtggccagcggcaccgtgcagctgggggagaatggcaagatctgctgggtgaaggaggagtag

SEQ ID NO: 295659 - DNA, 3033 bp, Artificial Sequence
  derived and/or modified sequence
atggccgcccgggtgctgatcatcggcagcggcggccgggagcacacactcgcctggaagcttgctcagtctcaccatgtcaaacaagtacttgtcgcccctgggaatgccggcactgcttgttccgagaagataagcaacaccgccatctcaatttccgatcacaccgccctagctcagttttgcaaggagaaaaagatcgaattcgtggtggtgggacctgaagccccccttgcggctgggatcgtaggaaaccttaggtctgctggagtacagtgttttggccccaccgcggaggcggcacaattggaatcttccaagagatttgccaaagaattcatggaccgccacggaattcctactgctcagtggaaggcattcacgaaacctgaagaggcctgttcctttatcctgtccgccgactttccagctttagtggtgaaagctagtggactggccgctgggaaaggagtgattgtggccaaatcgaaagaagaagcctgcaaggccgtgcaggagattatgcaggagaaagctttcggcgcagcaggagagacaatcgtgatcgaggagctcctggatggagaggaagtcagttgtctgtgttttaccgacggcaagacggtggcaccaatgccccctgctcaggatcacaagcgccttcttgagggagatggcggcccaaataccggggggatgggtgcctactgccctgctcctcaggtaagcaacgacctcctgctgaagataaaagacaccgtcctgcaaagaacagtggatgggatgcaacaggagggcactccatacactggcatcctgtatgcaggaatcatgcttacaaaaaatgggccgaaggttctggagtttaactgtaggttcggcgatcccgagtgtcaggtgatcttgccactcctgaaaagtgacttatatgaggttatccagagcaccctggacggcttgctgtgtacgagcttgcctgtgtggctcgagaatcatactgccttgacggtcgtcatggcttccaaaggctatcccggagattacaccaagggcgtcgagattaccgggttccctgaagcccaggcactaggattagaggtgtttcatgccgggactgcgctaaaaaacgggaaagttgtaactcatggcggacgggtgcttgcagtcacggcgataagggagaacctcattagcgccctggaagaggccaaaaagggactggcagctattaaatttgagggcgccatttatcggaaagacgtcggcttccgcgccatcgcgttcctgcagcagccacgctctctgacctacaaagaatccggcgtagacattgccgcaggaaatatgttggttaaaaaaatacagccactggcaaaagcaacttctcgcagtggctgtaaggtggatttgggggggtttgcagggctatttgatttgaaagccgcaggattcaaggatccacttctagcaagtggaacggatggcgtgggtaccaaactcaaaatcgcccagctgtgtaacaagcacgatactatcggacaggacttagtcgccatgtgtgtcaatgatatcctggcccagggcgccgagccgctgtttttcttggattacttctcatgtgggaaactggacctcagcgttaccgaagcagtcgtcgcagggatcgccaaggcgtgcgggaaggcagggtgtgctcttctcggaggggagactgctgagatgcctgatatgtaccctccaggcgaatacgacttggcagggttcgcggtgggggccatggaaagggaccagaagttacctcacctcgagcggatcacagagggtgatgtcgtggtaggcatcgccagtagcggcttgcacagcaacggcttctccttggtgcgaaaaattgttgctaagagctcactacaatacagcagcccagcacccgacggttgtggggaccagaccctgggggaccttctcctgacacctacgagaatctactcacacagcctcctccccgtgctgcgaagtggtcatgtgaaggcctttgcgcacatcaccggcggcggtctgctggaaaatatcccacgagtgctaccagaaaagcttggggttgacctcgatgctcagacctggcggataccaagggtgtttagctggctccagcaggagggacacctctcagaagaagagatggcgcgaacgttcaactgcggagtgggagcagtgctggttgtcagtaaggagcagaccgaacagatcttgagagatatccagcagcacaaggaggaagcctgggtgatcggatctgtggtcgcacgggccgagggctcacctagggtgaaagtgaagaaccttattgaatcaatgcaaattaacggttctgtcttaaagaatggcagtctcactaaccacttctcgtttgagaagaaaaaggcacgagttgcagtactgatcagcggcactggatctaacctccaggcactgatcgacagtacacgcgaacccaattcttcagcccaaattgacatagtgatttccaacaaagccgcagtggccggcctggacaaggccgaaagagctggcattccaacacgtgtcataaatcacaagttatacaaaaacagagtggagttcgacagtgccatcgatctggtcctagaggaattcagcattgacattgtgtgtctggccgggttcatgcgcatcctttctggccctttcgtgcagaagtggaacggcaaaatgctgaacatacacccctctttactcccgagcttcaagggttccaacgctcacgaacaggctctggagaccggggtgactgtgacgggctgtaccgtacattttgtggccgaagatgtcgacgcaggacagatcatactgcaggaggctgtccccgttaaacgcggggacactgttgccaccctgtcagagagagtaaaacttgcagagcataaaatatttcccgcagcactgcagctggttgcatctgggacggtgcaactcggtgagaatggcaagatttgttgggtcaaagaagaatag

SEQ ID NO: 295660 - DNA, 3033 bp, Artificial Sequence
  derived and/or modified sequence
atggccgcccgggtgctgatcatcggcagcggcggccgggagcacacgctggcatggaaactggcacaaagccaccacgttaagcaggtcctggttgcccctggcaacgctggaactgcttgctcagaaaaaatttctaataccgccataagcatcagcgaccatactgcactggcgcaattctgtaaggaaaaaaagatcgaatttgtggtggtcggccctgaagccccgcttgccgccggcatcgtggggaatttgcggtccgcaggcgttcaatgcttcggccctaccgcagaggcagctcagcttgaaagttctaaaagattcgccaaggaattcatggaccgacatggcatccccaccgcacagtggaaggccttcacgaaacctgaggaagcatgcagcttcatcctctctgccgattttcctgccctagtggtaaaagcgtccggcctcgccgcaggcaagggggtcattgtcgccaaaagcaaggaggaagcctgtaaggcggtgcaggaaattatgcaggagaaagcattcggggctgccggggaaacgattgtgatcgaagagcttttagatggagaagaagtatcctgtctgtgctttacagatgggaaaactgtcgccccgatgccgccggcccaggatcataagcgactcctggagggagatggaggaccaaacactgggggaatgggagcctattgtccagccccgcaagtgtctaatgatctgctactcaagatcaaagacaccgtcctccagagaactgtggacggtatgcaacaagaaggcaccccatatactggtattctttacgccgggatcatgctgaccaagaacggccctaaagtcctggagttcaattgcagatttggagatcccgagtgccaggtcatcctacctctgctcaagagcgacctgtacgaagtcatccagtcaaccctcgatgggctcttatgcacttctctgcccgtgtggctggagaaccataccgcgcttacagtcgtgatggccagcaaaggctatcccggagattacacaaaaggagttgagatcacagggttccctgaagcccaggccttgggcctggaggttttccacgctggcactgcgctcaaaaatggtaaggtggtgacccacggcggcagagtgctcgcagtcaccgccattagggaaaacctgatctccgctctggaggaggcaaagaaggggctcgctgcaatcaagttcgaaggcgctatctaccgaaaggacgtaggcttcagagccatcgctttccttcaacagccaaggagtctcacttataaggagtccggggtcgacatcgccgcagggaatatgcttgttaaaaagatccagcctttagctaaggccaccagtagatccggatgtaaagtcgacctggggggtttcgccggcctgttcgatctcaaggctgcaggctttaaggacccactgctagcctctggcacagatggggtgggtactaagctgaaaatagcccagctgtgcaacaaacatgatacaattgggcaggacctcgtcgcaatgtgcgtgaatgatatccttgcccagggcgctgaaccactgttcttccttgattattttagctgcggcaaattggacctgtccgttacagaagccgtggttgccggcatcgccaaagcctgtggcaaggccggctgcgcactgctgggaggggagactgccgagatgcccgatatgtatcctcctggggaatatgacctggccgggttcgctgtgggtgctatggaaagggaccagaaacttccacacctggagcgcattacagaaggagatgtggtggtgggtatcgccagcagtggcctacactccaacggattttctctggttcgaaagattgttgctaaaagctcgctgcagtattcatcacctgcccctgacggctgtggagaccagaccctgggcgacctcctgctcacgccgacacgaatttactcccactcgctcctgcccgtactcaggagcgggcacgtgaaagcttttgcccatataactggagggggtctcctcgagaacatacccagagttcttccggagaagcttggggtggatctcgacgctcagacctggagaatcccccgtgtgttctcatggttgcagcaggaaggacatctatctgaggaggagatggcccgcactttcaattgcggagtgggtgccgtgctcgtggtaagcaaagaacagactgaacaaatcctacgggacatacagcagcataaggaggaggcctgggtgatcggtagcgtggttgcccgagccgaagggagtccccgggtgaaggtcaagaaccttatcgaatcaatgcagatcaacggctctgtcctgaaaaacggcagtctcacaaaccacttttccttcgagaaaaaaaaagcgagggtggctgttctgattagcggcacaggatccaacctgcaagcgctgatcgattccaccagggagccaaatagctccgcccagattgacatcgtaatcagcaataaagcagccgtagctgggcttgacaaagcagaaagggctgggatccccacacgcgtgatcaaccacaaactgtataaaaacagagtggaatttgatagtgccatcgatcttgtgctcgaggagttctctattgacatagtgtgtctggccggatttatgcgcatcctctctggcccttttgtgcagaagtggaatggaaagatgttgaatattcatccatctctgcttccctccttcaagggaagcaacgcacacgagcaggctctggaaacaggggtgactgtcacaggatgcacggtgcattttgtggccgaagatgtcgacgcaggccagatcatcctccaagaggctgtgccggtgaaacgaggcgataccgtggctaccctaagcgagcgggtcaaactggccgaacacaaaatctttccggccgccctgcagctggtcgctagcggtactgtccagcttggagagaatggcaagatctgctgggttaaggaggagtag

SEQ ID NO: 295661 - DNA, 3033 bp, Artificial Sequence
  derived and/or modified sequence
atggccgcccgggtgctgatcatcggcagcggcggccgggagcacacactcgcctggaaactggcccaaagccatcacgtgaagcaggtgctggtggcgcccggtaacgcgggcacggcctgcagtgagaagatatcgaacactgccatttctatttccgatcatacggccttggctcagttttgcaaagaaaaaaaaatcgagttcgttgtagtcggacccgaagctccactggcagctggaattgtcggaaacctgcgctctgctggagttcagtgttttggacccaccgcagaggccgctcaactggagagctcaaaaagatttgccaaagagttcatggatcgccatggaatccctaccgcacaatggaaggcattcactaagcccgaagaggcatgctcatttattcttagcgctgattttccggcactggtggtcaaagcgtccgggcttgccgcaggtaagggcgtcattgtggccaagtctaaagaagaggcttgcaaagccgttcaggaaataatgcaggagaaagcgtttggtgccgctggagaaaccatcgtaatcgaagagctcctagacggagaagaagtgtcctgcttgtgcttcacagatgggaaaacagtggccccaatgcctcccgcgcaggatcacaagagactgctcgagggcgatggcggacccaatacaggaggcatgggcgcgtactgtcccgcaccccaggtttctaatgacctgcttctcaaaatcaaagataccgtgctacagcgaaccgtggatggaatgcagcaggaaggaaccccctacaccgggatcttatacgcgggaatcatgttgaccaagaacggaccaaaggtcttagagtttaactgcagatttggggatccagagtgtcaggtaattttgcctttactgaagtccgacctatatgaagtgatccagagtactctggatgggctgctgtgcactagcctgcccgtctggctggaaaaccacactgctctgactgtggtgatggcctccaagggatacccgggagactatacaaagggggttgagataacggggttccccgaagcccaagccctcgggttggaagtcttccacgcggggacggctctgaagaacggcaaggtggtaactcacgggggaagagtcctcgctgtaactgccatccgtgagaatctgatcagtgcactcgaggaagcaaagaaggggttggcagctatcaagttcgaaggcgcaatctatagaaaggatgttgggttcagagctatcgcattcctgcaacagccaagatccctcacgtacaaagagtccggtgtggacatcgcggctggaaatatgctggtgaaaaagattcagccgctcgcaaaggccaccagccgatcaggctgtaaggtggatctgggcggcttcgctgggctctttgacctcaaagctgcagggtttaaagaccccctcctggcatctggcactgacggcgtggggacaaaattgaagatcgcgcagctgtgcaataagcatgatactataggccaggaccttgtagccatgtgcgtcaatgacattctggctcaaggagctgaacctctctttttcctggactacttctcttgtggaaaactggatctcagcgttaccgaggccgtcgtggctggtatcgctaaagcctgtggtaaagcaggctgcgccctgctcggcggtgaaaccgccgaaatgcctgacatgtaccctcctggagagtatgacctcgcaggattcgctgtgggggccatggagagggatcagaagttgccacatctagaaaggattacagagggcgacgtcgttgtgggaatcgccagtagcggcttgcattctaacgggttctcactggtccgtaagatcgtcgccaagtcctccctgcaatattccagccccgcgcctgacgggtgcggagatcagacgctcggggatctgctcctcacccctacccgtatttattcccatagtctcctgcctgtcctgcgttccgggcacgtaaaggcgtttgcacacatcacagggggcgggttattagaaaatatccctcgggtgttaccggagaaactgggggtggacctcgacgcacagacttggcgaattcccagagtctttagctggcttcagcaggagggccatcttagtgaagaggaaatggctaggacatttaattgtggcgttggcgcagtcctggttgtctctaaagaacagactgagcagatcctccgcgatatccagcagcacaaagaggaagcctgggtcatcggtagtgtcgtggcccgcgccgaaggtagcccacgagtcaaagttaaaaatctaattgagagcatgcagataaacgggagcgtgctgaagaacggaagcctgacaaaccacttctctttcgaaaagaaaaaagcccgggtggcagtgctgatatctggaacaggaagcaaccttcaggccctgattgatagcactcgagaacccaatagctccgcacagatagacatcgtgatctcaaataaggccgccgttgccggtctggataaagccgaaagggccgggattccgacccgggttataaaccataagctttacaaaaaccgggttgaattcgattccgcaatcgaccttgtactggaggagttttctatagacattgtatgcctggctggtttcatgaggattctctccggaccattcgtgcagaagtggaatgggaaaatgctgaatatccacccctctcttctgccatctttcaaaggcagcaacgctcacgagcaggcgctggagactggagtgactgtgaccggatgcacagtccactttgttgcagaagatgtcgatgcgggccagattatactgcaagaagcggtgcctgtgaaacgcggagacactgtggcaactttaagcgagcgcgtaaaattggccgaacacaaaatctttcctgccgccctgcaactggtggcttctggtaccgtccagctgggtgagaacggaaagatttgttgggtgaaggaggaatag

SEQ ID NO: 295662 - DNA, 1689 bp, Artificial Sequence
  derived and/or modified sequence
atgctggtgaagaagatccagcccctggccaaggccaccagccggtctgggtgtaaggtggaccttggaggatttgctggcctgtttgatttaaaggctgccgggttcaaggacccactcctcgcctcaggcaccgatggcgttggcactaagctcaagattgcccaactgtgcaacaaacacgatactataggacaagatttagtggcaatgtgtgtaaacgatatcttagcccaaggggcggagcctttgttctttctggactacttctcctgtgggaaactggatctctcagtaacagaggccgtggtggccggaattgctaaggcctgtggtaaagcaggttgtgccctgttgggcggtgagacggccgagatgccggacatgtaccctcccggcgagtatgacctcgcagggtttgcagtcggagccatggagagagatcagaagttaccccacctggaacgcatcaccgaaggggacgtcgtggtgggcattgccagctctggcctccacagtaatggattttctctggttcgcaagattgtggccaagtctagtctgcaatattccagcccagctcccgatggctgtggcgatcaaaccctgggggacctgctgctgacgccaacgagaatttacagtcactctctgctacccgtgctcaggagtggtcacgtcaaagcttttgctcacattaccggcggtggcttgctggaaaatatcccacgcgtattgccagagaagttgggcgtggaccttgatgcacaaacctggcgtataccaagagtgttctcttggctccagcaagagggccatctatcagaagaagagatggcccggacattcaactgcggagttggcgctgtgctcgtggtgtccaaagagcagacagaacaaatcttgcgcgatatccagcagcacaaggaagaggcctgggtgatcggcagcgtggttgcgagggccgagggaagtcccagagtgaaggtgaaaaatctcatcgagtccatgcagatcaacggaagcgttctgaaaaacggatcactgaccaatcattttagctttgagaaaaagaaggctcgcgtggcagtacttatcagtggcacagggagtaaccttcaggcgcttatagatagtactagagaaccaaattcttctgctcagatagatatagtgataagtaataaagccgccgtggccggattggataaagctgagcgtgccgggatccctacacgcgtgatcaaccataagctctataaaaatagggtggagttcgactctgccatcgacctggtactcgaagagttctcaatcgatatagtttgcttagccggctttatgagaattctgtcagggccatttgtgcagaaatggaacggcaagatgctcaacatccaccctagtttactgccctcttttaaggggtcaaatgcccacgagcaagctttggagactggcgtcaccgttacgggctgcaccgttcacttcgtggctgaggatgtggacgccggccaaatcatcctgcaagaggcagtcccggtgaaaaggggtgatactgtcgctacgctgtcggaaagagtgaagctcgccgagcacaagatcttcccagcagcgttacagttggtggcaagcggcaccgttcagctcggtgagaatgggaaaatatgttgggtgaaggaggagtag

SEQ ID NO: 295663 - DNA, 1820 bp, Artificial Sequence
  derived and/or modified sequence
taaatgtactgctccgacttgtgggtcctatacagaaggaaatgatgcactgagagtttgacttacaaggaatctggagtagatatcgcagctggaaatatgctggtcaagaaaattcagcctttagcaaaagccacttccagatcaggctgtaaagttgatcttggaggttttgctggtctttttgatttaaaagcagctggtttcaaagatccccttctggcctctggaacagatggcgttggaactaaactaaagattgcccagctatgcaataaacatgataccattggtcaagatttggtagcaatgtgtgttaatgatattctggcacaaggagcagagcccctcttcttccttgattacttttcctgtggaaaacttgacctcagtgtaactgaagctgttgttgctggaattgctaaagcttgtggaaaagctggatgtgctctccttggaggtgaaacagcagaaatgcctgacatgtatccccctggagagtatgacctagctgggtttgccgttggtgccatggagcgagatcagaaactccctcacctggaaagaatcactgagggtgatgttgttgttggaatagcttcatctggtcttcatagcaatggatttagccttgtgaggaaaatcgtggcaaaatcttccctccagtactcctctccagcacctgatggttgtggtgaccagactttaggggacttacttctcacgcctaccagaatctacagccattcactgttacctgtcctacgttcaggacatgtcaaagcctttgcccatattactggtggaggattactagagaacatccccagagtcctccctgagaaacttggggtagatttagatgcccagacctggaggatccccagggtcttctcatggttgcagcaggaaggacacctctctgaggaagagatggccagaacatttaactgtggggttggcgctgtccttgtggtatcaaaggagcagacagagcagattctgagggatatccagcagcacaaggaagaagcctgggtgattggcagtgtggttgcacgagctgaaggttccccacgtgtgaaagtcaagaatctgattgaaagcatgcaaataaatgggtcagtgttgaagaatggctccctgacaaatcatttctcttttgaaaaaaaaaaggccagagtggctgtcttaatatctggaacaggatcgaacctgcaagcacttatagacagtactcgggaaccaaatagctctgcacaaattgatattgttatctccaacaaagccgcagtagctgggttagataaagcggaaagagctggtattcccactagagtaattaatcataaactgtataaaaatcgtgtagaatttgacagtgcaattgacctagtccttgaagagttctccatagacatagtctgtcttgcaggattcatgagaattctttctggcccctttgtccaaaagtggaatggaaaaatgctcaatatccacccatccttgctcccttcttttaagggttcaaatgcccatgagcaagccctggaaaccggagtcacagttactgggtgcactgtacactttgtagctgaagatgtggatgctggacagattattttgcaagaagctgttcccgtgaagaggggtgatactgtcgcaactctttctgaaagagtaaaattagcagaacataaaatatttcctgcagcccttcagctggtggccagtggaactgtacagcttggagaaaatggcaagatctgttgggttaaagaggaatgaagccttttaattcagaaatggggccagtttag

SEQ ID NO: 295664 - DNA, 3033 bp, Artificial Sequence
  derived and/or modified sequence
atggccgctagggtactgattatcggcagcggcggtagagaacatactctggcttggaaacttgcccagagtcatcatgtgaagcaggtgctggtggctcctggcaacgccggaactgcctgcagcgaaaagattagcaataccgccatctctatctccgaccacacagccctagctcagttttgcaaggaaaaaaagatcgagtttgtcgtggtgggtcctgaggcacctctcgcagccggtatcgtgggcaaccttcgcagcgccggagtgcagtgcttcggaccaaccgcagaggccgcacaactggaatctagcaagagattcgccaaggagtttatggaccgtcatggaatacctactgcccagtggaaggctttcacaaagcctgaagaggcgtgctcctttatcttatccgcagactttccagctttagtggtgaaggccagtggccttgctgcaggcaagggggtcatagtcgccaagtccaaggaggaagcctgcaaggccgtgcaggaaattatgcaagaaaaggcatttggagcggcaggggagacaatcgttattgaggaactcctggacggggaggaggtatcttgcctttgttttacggacggaaaaacagttgcccctatgccccctgcccaagaccataagcgactgttagaaggtgatgggggtcccaacacaggtgggatgggtgcctactgtccagctccacaagtgtctaatgacttgctacttaaaatcaaggatacagtgctgcagcggacagttgacggtatgcagcaggagggcaccccctacacagggatactgtatgccggaatcatgctgactaagaacggcccaaaggttcttgaattcaattgtcggttcggtgacccagagtgccaggtcatactccctttgttgaaatccgacctctatgaggttattcagtcaacgcttgacggactcctgtgcacaagtctgccagtatggttggagaaccataccgcgctgaccgtggtaatggcctctaagggttatcctggagactacactaagggcgtggaaattactggtttcccagaggcacaggccctagggcttgaagtcttccacgccggaactgctttaaagaatgggaaggtggtaacacatggtggccgtgtcctggccgtgaccgctattagggagaatcttatttcagcactagaggaagcaaagaaaggactggcggcaatcaagttcgaaggggcaatctaccgtaaagatgtgggttttcgggctatcgcgtttctgcagcagcctcggtctttgacttataaggagagcggtgtcgatatcgctgcaggcaacatgttggtgaagaaaatccagccactcgccaaggcgacatcacgcagcggctgtaaggtggatctgggcggatttgccggactgtttgacctgaaggcagccggatttaaggatccactgctcgcttcaggcaccgacggagtgggtacaaagttgaagattgcccagctgtgtaataaacacgatacaattggccaggacctggtagctatgtgcgtaaacgatattctcgctcagggcgctgaacccctgttcttcctcgactatttctcttgcgggaaacttgatctgtccgttactgaggccgtggttgccggtattgccaaggcctgtggtaaagctggctgtgctctcttggggggagagacagcggagatgcccgacatgtatccgccaggagagtacgacctggccggattcgccgttggagccatggagcgggatcagaaattgccccaccttgagcggatcacggaaggggacgtcgtggtgggaatcgcttcaagtgggctccacagcaacggtttcagcctcgtacggaagatagtggcgaagtcgagtcttcaatactcatccccggcacctgacggatgtggagatcagaccctgggcgatctgttgctcacgcccacccgtatctactcacactcgttgctcccagtgcttagatctggccatgtgaaagcctttgctcatatcacaggaggcggacttcttgagaacatacctagagtcttacccgagaagctgggtgtggacctggacgctcaaacctggaggatccctcgcgtgttctcttggctgcagcaagagggccacttgagcgaagaggagatggcaagaaccttcaactgcggcgtgggggctgtactggttgtctccaaagaacagactgaacaaattctgcgcgacattcaacaacacaaggaagaggcctgggtcattgggtcagtcgtagctagggccgaaggcagccccagagtaaaggtgaagaacttaatcgaatccatgcaaatcaatgggtctgtacttaaaaacgggagtcttaccaatcacttctcttttgagaaaaaaaaggctcgagttgccgtcttgatatcaggaaccggttccaacctgcaggctctgattgacagtacgagggagcctaactctagcgcccaaattgatattgtgattagcaacaaagccgcagtggccggactggacaaggccgagcgggcaggaatccctacacgggtcattaaccacaagttgtacaaaaaccgcgtagagttcgacagcgcaattgacctcgtgttagaggaattctccatcgacattgtctgtttagccggttttatgcgcatattgagtggccctttcgtgcagaagtggaatggcaaaatgctgaacatacatcctagtcttctgcctagcttcaagggttccaacgcgcatgagcaggctctggagacgggcgtgactgtgacagggtgcactgtgcacttcgtcgcagaggatgtggacgctggacagataatcctgcaggaggctgtcccagtgaaaaggggagatacagtcgcgacattgtccgagcgcgtgaaactggccgaacacaagatcttccctgcagcactgcagctggtggcctctggaactgtccagctcggcgaaaacggcaaaatttgctgggtgaaggaggagtag

SEQ ID NO: 295665 - DNA, 3033 bp, Artificial Sequence
  derived and/or modified sequence
atggcggcacgagtcctaatcatcgggtccggaggaagagaacacacactggcatggaaactggcacagtctcatcatgtcaaacaagttctggttgcaccagggaatgctggaacagcctgttcagaaaaaattagcaatacggccatcagcatttctgatcataccgctttggcccagttttgcaaggagaaaaagattgaattcgtggtggtcggcccagaggccccacttgccgctggcattgttgggaatctgaggtcggccggtgttcagtgcttcggaccaacagccgaggcagctcagctggagtcaagtaagcgctttgccaaagagttcatggacagacacgggatccctaccgcacaatggaaagccttcacaaagcccgaagaggcctgctccttcatcctgtccgcagattttcccgctctggtagtcaaagccagtggtctggctgccggaaagggagtaatagtagcaaagtccaaagaagaggcatgcaaggccgtgcaggagatcatgcaggaaaaagcatttggcgcagctggcgaaacaatcgtcatcgaagagctactagatggggaggaagtgagctgtctgtgttttacagatggaaagacggttgctcccatgccaccagcccaggaccataaacggctcctcgagggagacggcggacccaacaccggagggatgggagcttactgtccggcacctcaggtgtccaatgatcttctgctgaaaattaaggacacggtgctgcagcgaacagtagatgggatgcagcaggagggaactccctatactgggatcctgtacgctggaatcatgttgaccaagaatggtcccaaagtgcttgagtttaactgccggtttggggatcctgagtgccaagttattctacccctcctgaagtctgacctttacgaagtcatacagagcaccctcgatggacttctatgcacttctctgcccgtctggctggagaatcacacagccttgactgtggttatggcttcaaaggggtatcctggcgactatacaaaaggcgtggaaatcactggatttcccgaagctcaggcactgggactcgaggtctttcatgctgggaccgcccttaagaacggcaaggttgtcacacacggaggcagagtacttgccgtaacggccataagagaaaacttgatatcagctctcgaggaagccaaaaagggtctggccgctattaagtttgagggagccatctatcgcaaagacgttggtttccgagctatcgcttttcttcagcaacctcgtagcctgacgtataaagagagtggggtcgacatcgccgcaggaaacatgttggtcaagaagatacagccccttgcgaaggcaacctctagaagtggttgcaaagtggacctgggtggctttgccggattgttcgaccttaaggcagccggatttaaggatccccttctggcttccggcacggacggtgtgggcactaaacttaaaatcgcacagctgtgtaataaacatgacaccattggccaggatctggtggctatgtgtgtaaatgacatcctcgcccagggggctgagccactcttcttcctcgattatttctcctgcggaaaactggacctctccgtgacagaggccgtggtggccggaatcgctaaagcatgcgggaaggcaggctgtgccctcttgggcggtgagacagccgagatgcctgatatgtaccctcccggagaatacgatttagcgggattcgccgtcggcgcaatggaaagggaccagaagctgccccacctggagaggatcacggaaggagacgttgtcgttggtattgcttcatccggactgcactccaacggctttagtctcgtgaggaaaatcgtagctaaaagctcactccaatactcaagtcccgctccagatgggtgcggggaccaaactcttggcgatctcctcttaacgcctacacggatttatagccacagcctgctgccagttctgaggagcgggcatgtcaaggcttttgctcacattaccgggggtggactcttagagaatataccacgtgtgctccccgaaaaactcggggtggatttagacgcccagacttggagaatccccagagtcttttcctggctacagcaggaagggcatctctccgaagaggaaatggctagaacttttaattgcggggtgggagcagtcctggttgtatctaaagagcaaactgaacaaattctcagggacatacagcaacataaggaagaggcatgggtgatcgggtctgtggttgcgagagccgagggatcaccacgggtgaaggtgaagaacttgatcgaatctatgcaaatcaacggcagtgttttaaaaaatgggagcctgaccaaccacttttccttcgagaaaaaaaaagctcgcgtggccgtgcttatctccgggactggaagcaacttgcaagccctgatcgactccacgcgtgagccgaattctagtgcacagattgatattgttatttctaacaaagcagctgtcgcgggactggacaaggcagaacgggctggcatccccacccgggtgatcaatcataagctgtataaaaatcgcgtggaatttgatagcgccattgacctggtcctggaggagttctctatcgacattgtgtgtttggcaggatttatgcggattctatctgggccttttgtgcagaagtggaacggaaagatgcttaacatccaccctagtttgctgccatcctttaagggctcaaatgcccatgaacaggcccttgagacaggagtgaccgtaacgggttgtacagtgcatttcgtggccgaagacgttgatgctgggcagattatcctccaggaggccgtgcccgtaaagcgaggggacacagtggcaactctgtctgagagagttaaactggctgagcataagatcttccctgccgctcttcagcttgtggcttcgggaaccgtgcagttgggcgagaacgggaaaatctgctgggttaaggaagaatag

SEQ ID NO: 295666 - DNA, 3033 bp, Artificial Sequence
  derived and/or modified sequence
atggcagctagagtgctgatcattggatcaggcggacgggagcacaccctggcgtggaagttagcccagagtcaccatgtcaagcaggtgctcgtggctcccggaaacgcagggaccgcctgttcggaaaagatcagcaatacagcgattagcatcagcgatcacacagcccttgctcagttctgcaaggagaagaagattgagtttgttgtagtgggccctgaggcccctctggcggctggtattgtaggcaacctgcggtccgccggtgtacagtgcttcggaccaacggccgaagccgctcagctggaatcctccaagcgctttgcaaaagaattcatggacaggcacgggatccctacagctcagtggaaagccttcaccaagccagaagaagcgtgcagctttattctttctgctgattttcccgcactcgtagtgaaggcttctggccttgctgctggcaagggtgtgatcgtggccaagtccaaggaggaggcatgtaaagcggtacaggagataatgcaggaaaaggccttcggtgcagccggtgagacaattgtgattgaggagcttctggacggagaagaagtgtcctgtctttgctttacagacggcaagactgtggccccaatgccaccagcacaggaccacaagcgcctgctggagggcgacggtggacccaacacgggtggcatgggtgcttattgccccgctccccaggtctccaacgatctgttgcttaaaatcaaggacactgtactgcagcggactgttgacggaatgcaacaggagggaacaccctacaccggaattttgtacgcagggatcatgctgactaaaaacggtcccaaggtgctcgagttcaactgtagatttggcgaccccgagtgccaggtgattctgccactcctcaagtctgacctgtacgaggtcattcagtctactctggacggattgctttgtactagtctgccagtctggttagaaaaccataccgcgcttactgtggtgatggcctcgaagggctacccgggagactatactaagggcgtggagattacaggattccctgaggcccaggccctgggtctggaggtcttccacgccggaactgctctcaagaacggaaaggtagtaacccatggcggaagagtgctggctgtaaccgctataagagaaaatctgatttctgccttggaggaagccaagaagggcttggctgcgatcaagttcgagggcgcaatttacaggaaggacgttggatttcgtgccattgcattcctgcagcagcctcggagcctaacgtacaaagagagcggcgtagatattgccgcaggcaacatgctggtaaagaagatccaacccctagcaaaagcaacaagccggagtggctgcaaggttgaccttggagggtttgctggcctgtttgacttgaaagccgcaggctttaaagacccactgcttgcgtccggtactgatggagtgggcacgaaactaaaaatcgctcagttgtgcaataaacatgacaccattggccaagatctcgtggcaatgtgcgtcaatgacattctggcgcaaggtgctgaacccttgtttttcctggattatttttcctgcgggaaactcgatctctcagtgactgaagccgtcgtagcaggaattgcaaaggcatgcgggaaggcagggtgtgccctacttggtggtgaaacggccgagatgcctgatatgtatccacccggagagtacgacctggccggtttcgcagtgggcgctatggagagggatcagaaactgcctcacctggaacggatcaccgaaggagacgtggtagtcgggatcgccagctcaggtttgcactcaaatggctttagtctggtgcgcaagatagtcgccaagtcatcactgcaatactctagccccgcaccagatgggtgcggggatcagactctcggggatttgttgctgactcccaccaggatatacagtcactccctgttgccggtccttcgcagcggccacgtaaaagctttcgcccacataacaggaggagggttgttagagaacattccacgcgttctgcctgaaaaactgggcgtcgatcttgatgctcagacctggcggatcccacgcgtatttagttggctccagcaagaaggacacctgtccgaagaagaaatggcccgtactttcaactgcggcgtcggagccgttctggtggtgagcaaggaacagacagagcagatccttagagacatacagcaacataaagaagaggcgtgggtcatcgggtcagtagtcgccagggccgagggcagtccacgagtgaaggtcaagaacctaattgagagcatgcaaatcaacggctcagtgcttaaaaacggatccctcaccaatcactttagctttgagaaaaaaaaggcacgagtggccgttttaatttccggaaccggctctaatctccaggctttgattgatagtacacgcgaaccaaactcctctgcccaaatagatatcgtcatttccaataaagccgctgtggcgggactggataaagctgagcgggctgggatcccaacaagagttattaaccacaagctctacaagaatagggtagagtttgattccgctatcgacctcgtacttgaagagttctctattgacattgtttgtctggcaggtttcatgagaatactttctgggccatttgtgcagaaatggaacgggaaaatgttgaacatccatccctcgcttctcccctcatttaaaggttctaacgcacatgagcaggctcttgagaccggggtaacagtgaccggttgcacagttcattttgttgccgaggatgtagacgccggacagatcattctgcaggaggctgttcccgtaaagcggggagatacggtggctaccctgagcgagcgcgtaaaattggccgagcataaaatatttcctgcagcgttacagttggtcgcttcgggtacagtccaactgggagaaaatggaaaaatttgctgggttaaagaagaatag

SEQ ID NO: 295667 - DNA, 1689 bp, Artificial Sequence
  derived and/or modified sequence
atgctggtgaagaaaattcagcccctggccaaggcaacatcccgttcaggctgtaaagtggacttaggtgggtttgccggactctttgacctaaaggcagctggtttcaaagatcctctgctcgcttcaggcaccgacggggtgggaaccaagctgaaaatagcccaattatgcaataagcacgataccatcgggcaagacctcgttgcgatgtgcgtgaatgacatcttggcacaaggcgctgaacctctgttcttcctggattacttcagttgcggtaagctcgatcttagtgtcacagaggccgtggttgcaggaattgccaaggcctgcggcaaggccggatgcgcactgctaggcggagaaacagcggagatgcctgacatgtatccacccggagagtacgacctagccggttttgccgtgggggctatggagcgggatcagaagctgccccacctggagagaattaccgagggggacgtggtggtaggcattgcgagctctggcctgcacagcaacgggtttagtctagtcagaaaaatcgtagcaaagtcttctcttcagtattcctccccagcgcctgacgggtgtggcgaccaaacactgggcgacctgcttttgacacccacacgaatttactcccatagcctgttgccggttctcaggagcggtcacgtgaaagccttcgcgcacattaccggcggaggactgctggagaacatcccacgggtcctgcctgagaagctaggcgttgatctggatgcccagacgtggagaatcccaagagttttcagctggctgcagcaggagggacatcttagtgaggaagagatggctaggaccttcaattgcggggtaggggctgtcctggtcgtgagtaaagagcagaccgaacagattttgcgagacattcagcagcacaaagaggaagcctgggttataggtagcgtagtcgctagagctgagggttctccacgagtgaaagtcaagaatctcatagaatcaatgcagatcaacggcagtgtcctgaaaaatggctcgctgaccaatcactttagctttgagaagaaaaaggcacgggtggctgtgcttattagcggtactggttcaaatcttcaggccttaatcgattccaccagagagcctaacagctccgcacaaatagacatcgtaatatcaaataaggccgctgttgccggactggacaaggcggagcgggctgggatccctacgcgcgtcatcaaccataaattgtacaagaacagagtggagtttgatagcgcaatcgatctggtgctcgaagagttctccatagatatagtgtgcttggccggttttatgcgtattctgtccggaccatttgttcagaagtggaacggaaaaatgctcaacatccacccctctctgcttccctcctttaaagggagcaacgcccatgaacaagcattggaaaccggggtgaccgttacagggtgtactgtgcacttcgtcgctgaagacgttgatgccggtcagataattctccaagaggctgtgcccgtcaaacgcggtgacaccgtggctactctgagcgagagagtgaagctcgccgaacacaagatctttccagcggctttgcagctggtcgcgagtggcaccgtccagctgggagaaaacggcaaaatatgctgggttaaagaagagtag

SEQ ID NO: 295668 - DNA, 1689 bp, Artificial Sequence
  derived and/or modified sequence
atgctggtgaagaagatccagcccctggccaaggccaccagcagaagcggctgcaaggtggacctgggcggcttcgccggcctgttcgacctgaaggccgccggcttcaaggaccccctgctggccagcggcaccgacggcgtgggcaccaagctgaagatcgcccagctgtgcaacaagcacgacaccatcggccaggacctggtggccatgtgcgtgaacgacatcctggcccagggcgccgagcccctgttcttcctggactacttcagctgcggcaagctggacctgagcgtgaccgaggccgtggtggccggcatcgccaaggcctgcggcaaggccggctgcgccctgctgggcggcgagaccgccgagatgcccgacatgtacccccccggcgagtacgacctggccggcttcgccgtgggcgccatggagagagaccagaagctgccccacctggagagaatcaccgagggcgacgtggtggtgggcatcgccagcagcggcctgcacagcaacggcttcagcctggtgagaaagatcgtggccaagagcagcctgcagtacagcagccccgcccccgacggctgcggcgaccagaccctgggcgacctgctgctgacccccaccagaatctacagccacagcctgctgcccgtgctgagaagcggccacgtgaaggccttcgcccacatcaccggcggcggcctgctggagaacatccccagagtgctgcccgagaagctgggcgtggacctggacgcccagacctggagaatccccagagtgttcagctggctgcagcaggagggccacctgagcgaggaggagatggccagaaccttcaactgcggcgtgggcgccgtgctggtggtgagcaaggagcagaccgagcagatcctgagagacatccagcagcacaaggaggaggcctgggtgatcggcagcgtggtggccagagccgagggcagccccagagtgaaggtgaagaacctgatcgagagcatgcagatcaacggcagcgtgctgaagaacggcagcctgaccaaccacttcagcttcgagaagaagaaggccagagtggccgtgctgatcagcggcaccggcagcaacctgcaggccctgatcgacagcaccagagagcccaacagcagcgcccagatcgacatcgtgatcagcaacaaggccgccgtggccggcctggacaaggccgagagagccggcatccccaccagagtgatcaaccacaagctgtacaagaacagagtggagttcgacagcgccatcgacctggtgctggaggagttcagcatcgacatcgtgtgcctggccggcttcatgagaatcctgagcggccccttcgtgcagaagtggaacggcaagatgctgaacatccaccccagcctgctgcccagcttcaagggcagcaacgcccacgagcaggccctggagaccggcgtgaccgtgaccggctgcaccgtgcacttcgtggccgaggacgtggacgccggccagatcatcctgcaggaggccgtgcccgtgaagagaggcgacaccgtggccaccctgagcgagagagtgaagctggccgagcacaagatcttccccgccgccctgcagctggtggccagcggcaccgtgcagctgggcgagaacggcaagatctgctgggtgaaggaggagtag

SEQ ID NO: 295669 - protein, 949 aa, Artificial Sequence
  derived and/or modified sequence
MEHGTLLAQPGLWTRDTSWALLYFLCYILPQTAPQVLRIGGIFETVENEPVNVEELAFKFAVTSINRNRTLMPNTTLTYDIQRINLFDSFEASRRACDQLALGVAALFGPSHSSSVSAVQSICNALEVPHIQTRWKHPSVDNKDLFYINLYPDYAAISRAILDLVLYYNWKTVTVVYEDSTGLIRLQELIKAPSRYNIKIKIRQLPSGNKDAKPLLKEMKKGKEFYVIFDCSHETAAEILKQILFMGMMTEYYHYFFTTLDLFALDLELYRYSGVNMTGFRLLNIDNPHVSSIIEKWSMERLQAPPRPETGLLDGMMTTEAALMYDAVYMVAIASHRASQLTVSSLQCHRHKPWRLGPRFMNLIKEARWDGLTGHITFNKTNGLRKDFDLDIISLKEEGTEKAAGEVSKHLYKVWKKIGIWNSNSGLNMTDSNKDKSSNITDSLANRTLIVTTILEEPYVMYRKSDKPLYGNDRFEGYCLDLLKELSNILGFIYDVKLVPDGKYGAQNDKGEWNGMVKELIDHRADLAVAPLTITYVREKVIDFSKPFMTLGISILYRKPNGTNPGVFSFLNPLSPDIWMYVLLACLGVSCVLFVIARFTPYEWYNPHPCNPDSDVVENNFTLLNSFWFGVGALMQQGSELMPKALSTRIVGGIWWFFTLIIISSYTANLAAFLTVERMESPIDSADDLAKQTKIEYGAVRDGSTMTFFKKSKISTYEKMWAFMSSRQQTALVRNSDEGIQRVLTTDYALLMESTSIEYVTQRNCNLTQIGGLIDSKGYGVGTPIGSPYRDKITIAILQLQEEGKLHMMKEKWWRGNGCPEEDNKEASALGVENIGGIFIVLAAGLVLSVFVAIGEFIYKSRKNNDIEQKGKSSRIRFYFRNKVRFHGRKKQSLGVEKCLSFNAIMEELGISLKNQKKIKKKSRTKGKSSFTSILTCHQRRTQRKETVA

SEQ ID NO: 295670 - protein, 871 aa, Artificial Sequence
  derived and/or modified sequence
MEHGTLLAQPGLWTRDTSWALLYFLCYILPQTAPQVLRIGGIFETVENEPVNVEELAFKFAVTSINRNRTLMPNTTLTYDIQRINLFDSFEASRRACDQLALGVAALFGPSHSSSVSAVQSICNALEVPHIQTRWKHPSVDNKDLFYINLYPDYAAISRAILDLVLYYNWKTVTVVYEDSTGLIRLQELIKAPSRYNIKIKIRQLPSGNKDAKPLLKEMKKGKEFYVIFDCSHETAAEILKQILFMGMMTEYYHYFFTTLDLFALDLELYRYSGVNMTGFRLLNIDNPHVSSIIEKWSMERLQAPPRPETGLLDGMMTTEAALMYDAVYMVAIASHRASQLTVSSLQCHRHKPWRLGPRFMNLIKEARWDGLTGHITFNKTNGLRKDFDLDIISLKEEGTEKAAGEVSKHLYKVWKKIGIWNSNSGLNMTDSNKDKSSNITDSLANRTLIVTTILEEPYVMYRKSDKPLYGNDRFEGYCLDLLKELSNILGFIYDVKLVPDGKYGAQNDKGEWNGMVKELIDHRADLAVAPLTITYVREKVIDFSKPFMTLGISILYRKPNGTNPGVFSFLNPLSPDIWMYVLLACLGVSCVLFVIARFTPYEWYNPHPCNPDSDVVENNFTLLNSFWFGVGALMQQGSELMPKALSTRIVGGIWWFFTLIIISSYTANLAAFLTVERMESPIDSADDLAKQTKIEYGAVRDGSTMTFFKKSKISTYEKMWAFMSSRQQTALVRNSDEGIQRVLTTDYALLMESTSIEYVTQRNCNLTQIGGLIDSKGYGVGTPIGSPYRDKITIAILQLQEEGKLHMMKEKWWRGNGCPEEDNKEASALGVENIGGIFIVLAAGLVLSVFVAIGEFIYKSRKNNDIEQHY

SEQ ID NO: 295671 - DNA, 2850 bp, Artificial Sequence
  derived and/or modified sequence
atggagcatgggacacttttggcacagcctggactctggacccgagatactagctgggccctcctgtacttcttgtgctatatactacctcaaaccgctccgcaggtgcttcggattgggggcatttttgaaaccgtggaaaacgaacctgtgaacgtagaggaactcgcctttaagtttgcagtaaccagcatcaataggaataggaccctgatgccaaacaccacactgacatacgatatccagcggattaacctatttgacagctttgaagcatccagaagagcatgcgatcaactcgccctgggggtggcagccctgtttgggccttcccactcttcctccgtctcagccgtgcagagcatttgcaatgctctagaggttccacacatccagaccaggtggaagcatccttcagttgataataaggatctgttctatattaatctctatccagattacgccgcgatttcacgagccatccttgacctcgtcctttactacaactggaaaaccgtcaccgtggtatacgaggattctacaggtctcatccgactccaggagcttatcaaggcgccttccagatacaacattaagattaagatacggcaattaccttcaggtaacaaggatgccaagcccctgttaaaggagatgaagaaggggaaagagttctacgtaatcttcgattgttcacatgaaacagctgcggaaatactgaagcagattctgttcatgggcatgatgactgagtactaccactacttttttactacgctggatctcttcgcacttgacttggagttgtaccgctactcaggagtgaacatgacaggtttcagacttctgaacattgataatcctcacgtctcttctattattgagaaatggtccatggaacgcctacaggctcctccgaggcccgagaccggactcttggacggtatgatgaccaccgaagcagctctcatgtatgatgccgtgtatatggtggctatcgcttctcacagagctagccaactcacggtttcaagcctgcagtgccataggcacaagccctggagattaggaccccgcttcatgaatctgattaaggaggcaagatgggatgggctgaccggacatattacattcaacaagaccaacgggctgcgcaaggactttgacctggacatcatcagcctaaaagaggaaggcaccgagaaggccgcgggcgaagtctcgaaacacctgtacaaagtctggaagaagatcggcatctggaacagtaactctggactgaacatgacagactctaataaagacaaaagctctaacatcacagacagcctagcaaatagaacactgatcgtaaccaccatcctggaagagccatacgtgatgtaccgcaaaagcgacaaacccctctacggaaacgaccgcttcgaaggatactgtctagatctgctgaaggagctgagcaatatcctgggcttcatttacgacgtgaagctggttcccgatgggaaatatggagcccagaatgataaaggggaatggaatggtatggtgaaggagctgattgatcaccgagctgatttggcagtggctcctctgactataacctacgtccgcgaaaaggtaattgacttttctaaaccatttatgactctggggatcagtatcttatatcgcaaacccaatggaacgaatccgggggtcttctcttttctgaaccccttatctccggacatctggatgtacgtcttgctagcctgcttgggagtttcctgtgtgctttttgttatcgcacgtttcacgccctacgaatggtacaatccacatccctgtaatcccgactctgatgtggtggaaaacaatttcacactgctgaattcattttggtttggggtgggagctctcatgcagcagggatcggaacttatgcccaaggccttgagcacccgaatagtgggaggaatatggtggttctttaccctgatcattatctcctcctatacagcgaacttggctgcgtttctcacagtcgaacgaatggagtctccaattgactcagcagacgatctagcaaagcaaacgaagattgaatacggcgcagtccgggacggcagtaccatgacctttttcaaaaaatcaaaaatttctacctatgaaaaaatgtgggcttttatgtcatcaagacagcagacagctcttgtgcgcaatagtgacgaaggtatccaaagagtcctcacaactgactacgctctcttaatggagtctacttccatcgagtacgttacgcaaagaaattgcaacctgacacagatcgggggcttgattgacagcaaggggtacggcgtcggcacccccatcgggtctccttaccgagataagattaccatcgccattctccaacttcaggaggagggaaaattgcacatgatgaaggaaaagtggtggcggggcaacggctgtccggaggaggacaataaggaggcttccgcgctaggagtcgagaacataggcggaattttcatcgtgttagcagcgggtctcgtcttatctgtctttgttgctattggcgagtttatctataagagcagaaagaataacgatatcgaacaaaaggggaagtcaagcagaattcggttttattttcgcaacaaagtaaggtttcacgggcgcaagaaacagagccttggtgtcgaaaaatgtctgagttttaacgccatcatggaggaacttggaatcagtctcaaaaatcaaaagaagatcaaaaagaaatccagaaccaagggaaagagcagcttcacctctatcctgacctgccaccagcggcggacacagagaaaggaaacggtggcttag

SEQ ID NO: 295672 - DNA, 3179 bp, Artificial Sequence
  derived and/or modified sequence
tgtatctcggcatgaattaagaagctaggaagatggagcacggcacactcctcgcccagcccgggctctggaccagggacaccagctgggcactcctctatttcctctgctatatcctccctcagaccgccccgcaagtactcaggatcggagggatttttgaaacagtggaaaatgagcctgttaatgttgaagaattagctttcaagtttgcagtcaccagcattaacagaaaccgaaccctgatgcctaacaccacattaacctatgacatccagagaattaacctttttgatagttttgaagcctcgcggagagcatgtgaccagctggctcttggtgtggctgctctctttggcccttcccatagctcctccgtcagtgctgtgcagtctatttgcaatgctctcgaagttccacacatacagacccgctggaaacacccctcggtggacaacaaagatttgttttacatcaacctttacccagattatgcagctatcagcagggcgatcctggatctggtcctctattacaactggaaaacagtgacagtggtgtatgaagacagcacaggtctaattcgtctacaagagctcatcaaagctccctccagatataatattaaaatcaaaatccgccagctgccctctgggaataaagatgccaagcctttactcaaggagatgaagaaaggcaaggagttctatgtgatatttgattgttcacatgaaacagccgctgaaatccttaagcagattctgttcatgggcatgatgaccgagtactatcactactttttcacaaccctggacttatttgctttggatctggaactctataggtacagtggcgtaaacatgaccgggtttcggctgcttaacattgacaaccctcacgtgtcatccatcattgagaagtggtccatggagagactgcaggccccacccaggcccgagactggccttttggatggcatgatgacaactgaagcggctctgatgtacgatgctgtgtacatggtggccattgcctcgcaccgggcatcccagctgaccgtcagctccctgcagtgccatagacataagccatggcgcctcggacccagatttatgaacctgatcaaagaggcccggtgggatggcttgactgggcatatcacctttaataaaaccaatggcttgaggaaggattttgatctggacattattagtctcaaagaggaaggaactgaaaaggctgctggcgaagtgtctaaacacttgtataaagtgtggaagaagattgggatttggaattccaacagtgggcttaacatgacggacagcaacaaagacaagtccagcaatatcactgattcattggccaacagaacactcattgtcaccaccattctggaagaaccctatgttatgtacaggaaatctgataagcctctatatggaaatgacagatttgaaggatattgcctagacctgttgaaagaattgtcaaacatcctgggtttcatttatgatgttaaactagttcccgatggcaaatatggggcccagaatgacaaaggggagtggaacgggatggttaaagaactcatagatcacagggctgacctggcagtggctcctcttaccatcacctacgtgcgggagaaagtcattgacttctccaaacccttcatgaccctaggcatcagcattctctaccggaagcccaatggtaccaatccaggcgttttctccttcctcaaccccctgtctccagatatttggatgtatgtgctcttagcctgcttgggagtcagctgtgtactctttgtgattgcaaggtttacaccctacgagtggtataacccccacccatgcaaccctgactcagacgtggtggaaaacaattttactttactaaatagtttctggtttggagttggagctctcatgcagcaaggatcagagctgatgcccaaagctctatcgaccagaatagttggagggatatggtggtttttcaccctaatcatcatttcatcctacacggccaatctggctgccttcttgacagtagagagaatggaatcccccatagattcggcagatgatctggcaaagcaaaccaagatagaatatggggcggttagagatggatcaacaatgaccttcttcaagaaatcaaaaatctccacctatgagaagatgtgggctttcatgagcagcaggcagcagaccgccctggtaagaaacagtgatgaggggatccagagagtgctcaccacagactacgcgctgctgatggagtccaccagcattgagtatgtgacgcagagaaactgcaacctcactcagatcgggggcctcattgactccaaaggttacggagtgggaacacctattggttctccttaccgggataaaattactattgctattcttcaactccaagaagaagggaagctgcatatgatgaaagagaagtggtggcgtgggaatggctgccccgaggaagacaacaaagaagccagtgccctgggagtggaaaatattggaggcatcttcattgttctggctgccggactggtcctttctgtatttgtagctattggagaattcatatacaaatcacggaagaataatgatattgaacagaaaggaaagtcatcaagaattagattttattttaggaacaaagtaaggtttcatgggagaaaaaaacaaagccttggtgtagagaagtgtctctctttcaacgctatcatggaagaactgggaatctcactgaagaatcagaaaaaaataaagaaaaagtcaagaactaaggggaaatcttccttcacaagtatccttacttgtcatcagagacgaactcagagaaaagagactgtggcgtgatccaaggaaacgcctgtaggaagaaaaaggatgcattccctacagatttttggagaaaggatttctgaggagtgtgtgatgtgtttccatatatctatatccataactctgattatgaatacagatataagaaatacaaaagtttaaaaagctcacatagatatgacttgggaagtgacaccagttcttttaaaataaatttgtatgctcaattattttgcattttttctttttccccaataaattgttgtgtgtgctttctaaataataataaaacaacagggtttttttccagaa

SEQ ID NO: 295673 - DNA, 2850 bp, Artificial Sequence
  derived and/or modified sequence
atggagcacggcaccctgctggcccagcccggcctgtggacccgggacacctcctgggccctgctgtacttcctgtgctacatcctgccccagacagccccccaggtgctgagaattggaggcatctttgaaacagtggagaatgaacctgtgaatgtggaggagctggccttcaagtttgctgtgaccagcatcaacagaaacagaaccctgatgcccaacaccaccctgacctatgacatccagaggatcaacctgtttgacagctttgaggccagccggcgggcctgtgaccagctggccctgggcgtggccgccctgtttggccccagccacagcagctctgtgtctgctgtgcagagcatctgcaatgccctggaggtgccccacatccagacccgctggaagcaccccagcgtggacaacaaggacctcttctacatcaacctgtacccagactatgctgccatcagccgggccatcctggacctggtgctgtactacaactggaagacagtgacagtggtgtatgaggacagcacaggcctcatccggctgcaggagctgatcaaggcccccagccgctacaacatcaagatcaagatccggcagctgcccagcggcaacaaggatgccaagcccctgctgaaggagatgaagaagggcaaggagttctacgtgatctttgactgcagccatgaaacagctgctgagatcctgaagcagatcctcttcatgggcatgatgacagagtactaccactacttcttcaccaccctggacctgtttgccctggacctggagctgtaccgctacagcggcgtgaacatgacaggcttccggctgctgaacatcgacaacccccacgtgagcagcatcatcgagaagtggagcatggagcggctgcaggccccacccaggcctgagaccggcctgctggatggcatgatgaccacagaagctgccctgatgtatgatgctgtgtacatggtggccatcgccagccaccgggccagccagctgactgtgagcagcctgcagtgccaccgccacaagccctggaggctgggcccccgcttcatgaacctgatcaaggaggcccgctgggatggcctgaccggccacatcaccttcaacaagaccaacggcctgaggaaggactttgacctggacatcatcagcctgaaggaggagggcacagagaaggccgccggggaggtgtccaagcacctgtacaaggtgtggaagaagattggcatctggaacagcaacagcggcctgaacatgacagacagcaacaaggacaagagcagcaacatcacagacagcctggccaacagaaccctcatcgtgaccaccatcctggaggagccctacgtgatgtacaggaagagtgacaagcccctgtatggaaatgacagatttgagggctactgcctggacctgctgaaggagctgagcaacatcctgggcttcatctatgatgtgaagctggtgcctgatggcaagtacggggcccagaatgacaagggggagtggaatggcatggtgaaggagctgattgaccacagagctgacctggccgtggcccccctgaccatcacctacgtgcgggagaaggtgattgacttcagcaagcccttcatgaccctgggcatcagcatcctgtacaggaagcccaacggcaccaaccctggggtcttctccttcctgaaccccctgagcccagacatctggatgtatgtgctgctggcctgcctgggcgtgtcctgtgtgctcttcgtcatcgcccgcttcaccccctatgagtggtacaacccccacccctgcaacccagacagtgatgtggtggagaacaacttcaccctgctgaacagcttctggtttggagtgggcgccctgatgcagcagggcagcgagctgatgcccaaggccctgagcacccgcatcgtgggcggcatctggtggttcttcaccctcatcatcatcagcagctacacagccaacctggccgccttcctgactgtggagaggatggagagccccattgattctgcagatgacctggccaagcagaccaagattgaatatggagctgtgagagatggcagcaccatgaccttcttcaagaagagcaagatcagcacctatgagaagatgtgggccttcatgagcagccggcagcagacagccctggtgaggaacagtgatgagggcatccagagggtgctgaccacagattatgccctgctgatggagagcaccagcattgaatatgtgacccagaggaactgcaacctgacccagatcggcggcctgattgacagcaagggctatggagtgggcacccccatcggcagcccctacagagacaagatcaccatcgccatcctgcagctgcaggaggagggcaagctgcacatgatgaaggagaagtggtggagaggaaatggctgcccagaggaggacaacaaggaggccagcgccctgggcgtggagaacattggaggcatcttcatcgtgctggccgccggcctggtgctgtctgtgtttgtggccatcggggagttcatctacaagagcaggaagaacaatgacatcgagcagaagggcaagagcagccgcatccgcttctacttcaggaacaaggtgcgcttccacggcaggaagaagcagagcctgggcgtggagaagtgcctgtccttcaatgccatcatggaggagctgggcatcagcctgaagaaccagaagaagatcaagaagaagagcaggaccaagggcaagagcagcttcaccagcatcctgacctgccaccagaggaggacccagaggaaggagaccgtggcctag

SEQ ID NO: 295674 - DNA, 2850 bp, Artificial Sequence
  derived and/or modified sequence
atggagcacggcaccctgctggcccagcccggcctgtggacccgggacacctcgtgggccctcctatattttctctgttacattttgccgcaaacagcccctcaggtgttacgtatagggggcatcttcgagacagtggaaaatgaaccagtgaacgtggaggaactcgcatttaagtttgccgtcacctccattaacagaaaccgcacactaatgccgaacactaccctgacatatgatattcagagaataaatttgttcgatagtttcgaggcgtcacggagggcatgcgaccagctggccttgggcgtggccgcacttttcggcccaagccacagttcaagcgtgtcggcagtacagtccatatgtaatgccttagaggtcccccacatccagacccgctggaagcacccttccgtggacaacaaagatctgttttatattaatttgtacccggattatgccgccattagcagggccattcttgatctggttctgtactacaactggaaaactgtcacagtggtatatgaggattccacaggacttattagactccaggaactcatcaaggccccctcaagatataatatcaaaatcaagattagacagcttccatcagggaacaaggacgccaaaccactgctgaaggagatgaaaaagggcaaagagttctatgtgatcttcgattgctcccacgagaccgctgctgagatattgaagcagattttgttcatgggaatgatgaccgagtactaccattatttctttacaacattagatctctttgctctggacctggaactctaccggtattccggcgtgaacatgaccggattcaggctcctgaatattgataaccctcacgtctcctcgatcattgaaaaatggagcatggagcggttgcaggcgccgcctaggccagagaccggtctcctggacgggatgatgactacagaggctgccctgatgtatgacgcagtgtacatggtcgccattgcgtcccatagagcctcacaactgaccgtttcgagtcttcaatgccaccggcacaagccatggcgtctggggccacgatttatgaacctgatcaaggaagcccgatgggatggcttaaccggacatattacattcaataaaaccaacggactacgaaaagattttgaccttgacataatctcactgaaggaggaaggcacggagaaggcagctggtgaggtgtcaaaacacttatataaggtctggaagaagattggtatctggaactctaattctgggttgaacatgacagacagcaataaagataagtcttctaacatcacagatagcctagcgaaccggacactcatcgttacaacgattttagaagagccctatgtcatgtacaggaagagtgacaagcctttgtatgggaatgaccgattcgaagggtattgcttagacctgctgaaggaactctctaacattctggggtttatctatgacgtgaagcttgtgcctgatgggaaatacggcgcccagaatgacaaaggagagtggaatggaatggtaaaagagctgatcgaccatcgcgcggatctcgccgtggcacccctgactattacctacgtacgggagaaggtcatcgacttcagtaagccttttatgactctggggataagcatcctgtatcgcaagcccaacgggacaaaccctggagtattttccttcctgaatccactgtccccggacatatggatgtatgtgctgctggcttgtttgggcgttagctgcgtgctgttcgtgattgctcggtttacaccctatgagtggtacaacccacatccgtgtaatccagacagtgatgtggtagagaataactttaccttattaaacagcttttggtttggggttggggccttgatgcagcaggggagcgaattaatgccaaaggccctgagtactaggattgtgggaggcatttggtggttcttcaccctcatcattatttcttcctatacagcgaacctcgccgccttcctgaccgtagagcgcatggaaagtcctattgatagtgctgacgacctcgctaaacagacaaagatcgagtacggggcggtgagggatggttcgaccatgactttcttcaagaagagtaaaatctcaacctacgaaaagatgtgggccttcatgagcagccggcaacagacagccctggtcagaaattcagacgaggggattcagagggtcctgaccaccgattatgccctcctcatggagagcactagtatcgagtatgtgactcagcgcaattgcaatctaacacagattggtggtctgatagatagcaaaggctatggcgtgggaacccccataggcagcccttacagggataagattaccatcgccattctccaacttcaagaggagggcaagctgcacatgatgaaggagaagtggtggcgcggtaacggctgccctgaagaagataacaaggaagcaagtgccctgggcgttgaaaacatcggtggaatcttcatcgtactggcagcaggcctggtgctctccgtattcgttgcaattggagagtttatctacaaatctcggaaaaacaacgacatcgagcaaaagggaaaatctagccgtatccgattctattttcgtaacaaagtccggttccatggccggaagaaacagtcccttggagttgagaagtgcctgtcctttaacgcaatcatggaagagctgggaatttctctcaagaaccagaaaaagataaagaagaaaagcaggacaaaggggaagtccagcttcacgagtatactgacatgtcaccaaaggcgcacacagcgcaaggaaacagtagcttag

SEQ ID NO: 295675 - DNA, 2850 bp, Artificial Sequence
  derived and/or modified sequence
atggagcacggaacgctgcttgcccagcccggattatggactagggatactagttgggcactgctctatttcctttgctacatcctgccccaaacagctccacaggtgctgcggattggcggtatctttgaaactgtggagaatgaacctgtgaatgtcgaggagctggcattcaagtttgccgtgacaagcattaaccgtaataggacactcatgcccaacactacccttacctatgacatccagcgcattaatctcttcgatagtttcgaggcatctaggcgggcatgcgaccagttggcgctgggagtggctgccctgtttggtccatcccactcctcctccgtctcggcagtccagagtatttgtaacgcgctcgaggttcctcatattcaaactagatggaaacaccccagtgtggacaataaagatctattttacatcaatctgtatcccgactacgcggctatttccagggcaatcctagacctggtgctttattacaactggaagaccgtgactgtcgtgtatgaggacagcacgggccttatccggcttcaagaattaatcaaggccccaagccggtataacattaagatcaaaattcggcagcttccctctggaaacaaggacgccaagcctctgttgaaggagatgaaaaagggaaaggagttttacgtgatcttcgactgctctcacgagaccgctgcagagatcctaaaacaaatcctgttcatgggcatgatgacagagtactatcactacttcttcactactctggacttgtttgcactggatctggaactgtataggtatagcggggttaacatgacgggttttcgtttgcttaatatagacaacccccatgtctccagtatcattgagaagtggtcaatggaacgcttacaagcacccccaagacctgaaacagggctgctggacggaatgatgaccaccgaagctgccctgatgtatgatgcagtgtacatggtggctattgccagccatcgcgcttcccagctcaccgtaagtagtctgcagtgtcacagacataaaccctggcggctcggtccacgtttcatgaatctgatcaaggaggcccgatgggatggtctcaccggtcacatcactttcaacaaaaccaatgggctgcggaaggacttcgatttagacatcatcagcctaaaggaggaggggaccgaaaaggcagctggcgaagtgtccaaacacttgtacaaggtgtggaagaagatagggatttggaatagcaatagcggactcaatatgaccgattctaataaagacaaatcatccaacatcacagactctcttgccaatagaaccctaatcgtaaccacgattctggaggagccttacgtgatgtaccggaagagcgataagcccctttatggaaatgatcgctttgagggttactgtttggatctcctcaaagagctctccaacatccttggattcatatacgatgttaagctggtgcctgacggcaagtatggagcgcagaacgataaaggcgaatggaatgggatggtaaaagagctgatcgaccacagggccgacctcgccgtcgcacctcttaccattacttatgtgagagagaaggtgatagacttttcaaaaccattcatgaccttaggcatttctatcctctaccgcaagcctaatggaaccaaccctggagtgttctccttccttaatccactctcacccgatatttggatgtacgtactgttagcatgcttgggtgtgtcatgcgtccttttcgtcatagcacgcttcacaccttacgagtggtataacccccatccctgtaaccctgattccgatgtagtagagaacaattttaccctgctcaactctttctggttcggcgtcggggcactgatgcagcagggatcagagcttatgcccaaggccctgagcacgcggatcgtgggcggtatctggtggttcttcaccttgataatcatcagctcttatactgctaatttagccgcttttctcactgttgaacgcatggagtcccccattgactccgccgacgatcttgctaagcagactaagattgagtatggcgctgttagggacggctctactatgactttctttaaaaaatctaaaatttctacctatgagaagatgtgggcctttatgtcctctcggcagcaaactgctctggttaggaactctgacgaggggatccagagggtcctcaccacagactatgcactcctgatggaatctactagtattgagtacgtaacacagcgcaactgcaacctgacgcaaattggaggacttattgatagtaaggggtacggcgttggcaccccaatcggatcaccataccgggataagattacaatcgcaatattgcaactgcaggaagaaggcaaactccacatgatgaaagaaaagtggtggcggggaaacggctgccctgaggaggataataaggaagccagtgccttgggcgtggagaacatcggaggcattttcatcgtcctggccgcaggactggtactttctgtcttcgtggcgatcggcgagtttatctacaaaagcagaaaaaacaacgacattgagcagaagggcaaatcctcccgcatccgcttctatttcagaaacaaggtgagattccacgggcgtaaaaagcaaagccttggtgttgagaagtgcttgagctttaatgctataatggaggagctggggatctccctcaagaaccaaaagaagattaaaaaaaagtcccgaactaagggcaaatctagcttcacaagtattctgacatgccatcagaggaggacccagcgaaaagagactgtggcatag

SEQ ID NO: 295676 - DNA, 2850 bp, Artificial Sequence
  derived and/or modified sequence
atggagcacggcaccctgctggcccagcccggcctgtggaccagagacaccagctgggccctgctgtacttcctgtgctacatcctgccccagaccgccccccaggtgctgagaatcggcggcatcttcgagaccgtggagaacgagcccgtgaacgtggaggagctggccttcaagttcgccgtgaccagcatcaacagaaacagaaccctgatgcccaacaccaccctgacctacgacatccagagaatcaacctgttcgacagcttcgaggccagcagaagagcctgcgaccagctggccctgggcgtggccgccctgttcggccccagccacagcagcagcgtgagcgccgtgcagagcatctgcaacgccctggaggtgccccacatccagaccagatggaagcaccccagcgtggacaacaaggacctgttctacatcaacctgtaccccgactacgccgccatcagcagagccatcctggacctggtgctgtactacaactggaagaccgtgaccgtggtgtacgaggacagcaccggcctgatcagactgcaggagctgatcaaggcccccagcagatacaacatcaagatcaagatcagacagctgcccagcggcaacaaggacgccaagcccctgctgaaggagatgaagaagggcaaggagttctacgtgatcttcgactgcagccacgagaccgccgccgagatcctgaagcagatcctgttcatgggcatgatgaccgagtactaccactacttcttcaccaccctggacctgttcgccctggacctggagctgtacagatacagcggcgtgaacatgaccggcttcagactgctgaacatcgacaacccccacgtgagcagcatcatcgagaagtggagcatggagagactgcaggccccccccagacccgagaccggcctgctggacggcatgatgaccaccgaggccgccctgatgtacgacgccgtgtacatggtggccatcgccagccacagagccagccagctgaccgtgagcagcctgcagtgccacagacacaagccctggagactgggccccagattcatgaacctgatcaaggaggccagatgggacggcctgaccggccacatcaccttcaacaagaccaacggcctgagaaaggacttcgacctggacatcatcagcctgaaggaggagggcaccgagaaggccgccggcgaggtgagcaagcacctgtacaaggtgtggaagaagatcggcatctggaacagcaacagcggcctgaacatgaccgacagcaacaaggacaagagcagcaacatcaccgacagcctggccaacagaaccctgatcgtgaccaccatcctggaggagccctacgtgatgtacagaaagagcgacaagcccctgtacggcaacgacagattcgagggctactgcctggacctgctgaaggagctgagcaacatcctgggcttcatctacgacgtgaagctggtgcccgacggcaagtacggcgcccagaacgacaagggcgagtggaacggcatggtgaaggagctgatcgaccacagagccgacctggccgtggcccccctgaccatcacctacgtgagagagaaggtgatcgacttcagcaagcccttcatgaccctgggcatcagcatcctgtacagaaagcccaacggcaccaaccccggcgtgttcagcttcctgaaccccctgagccccgacatctggatgtacgtgctgctggcctgcctgggcgtgagctgcgtgctgttcgtgatcgccagattcaccccctacgagtggtacaacccccacccctgcaaccccgacagcgacgtggtggagaacaacttcaccctgctgaacagcttctggttcggcgtgggcgccctgatgcagcagggcagcgagctgatgcccaaggccctgagcaccagaatcgtgggcggcatctggtggttcttcaccctgatcatcatcagcagctacaccgccaacctggccgccttcctgaccgtggagagaatggagagccccatcgacagcgccgacgacctggccaagcagaccaagatcgagtacggcgccgtgagagacggcagcaccatgaccttcttcaagaagagcaagatcagcacctacgagaagatgtgggccttcatgagcagcagacagcagaccgccctggtgagaaacagcgacgagggcatccagagagtgctgaccaccgactacgccctgctgatggagagcaccagcatcgagtacgtgacccagagaaactgcaacctgacccagatcggcggcctgatcgacagcaagggctacggcgtgggcacccccatcggcagcccctacagagacaagatcaccatcgccatcctgcagctgcaggaggagggcaagctgcacatgatgaaggagaagtggtggagaggcaacggctgccccgaggaggacaacaaggaggccagcgccctgggcgtggagaacatcggcggcatcttcatcgtgctggccgccggcctggtgctgagcgtgttcgtggccatcggcgagttcatctacaagagcagaaagaacaacgacatcgagcagaagggcaagagcagcagaatcagattctacttcagaaacaaggtgagattccacggcagaaagaagcagagcctgggcgtggagaagtgcctgagcttcaacgccatcatggaggagctgggcatcagcctgaagaaccagaagaagatcaagaagaagagcagaaccaagggcaagagcagcttcaccagcatcctgacctgccaccagagaagaacccagagaaaggagaccgtggcctag

SEQ ID NO: 295677 - protein, 301 aa, Artificial Sequence
  derived and/or modified sequence
MATSGDCPRSESQGEEPAECSEAGLLQEGVQPEEFVAIADYAATDETQLSFLRGEKILILRQTTADWWWGERAGCCGYIPANHVGKHVDEYDPEDTWQDEEYFGSYGTLKLHLEMLADQPRTTKYHSVILQNKESLTDKVILDVGCGTGIISLFCAHYARPRAVYAVEASEMAQHTGQLVLQNGFADIITVYQQKVEDVVLPEKVDVLVSEWMGTCLLHHTLEADAVHDGRPSPCPYRRRGHGFSCVAEKPSVEKAHVCGSELGCHFQTRPHISKSWRKSLPHLEMTVDALFGKQCAYLEG

SEQ ID NO: 295678 - DNA, 906 bp, Artificial Sequence
  derived and/or modified sequence
atggctacatccggcgattgtccgaggtcagaaagtcagggtgaggagccggccgagtgctctgaagcaggtttactccaagaaggcgtacagcccgaagaatttgtcgctattgcagactatgccgcaaccgatgaaacccagctgtctttcctgcgcggcgagaagattctcattctgcggcaaacaactgccgactggtggtggggagaacgagcaggatgttgcggttacatccccgccaaccacgtagggaagcacgtcgacgaatacgatcctgaggacacctggcaagatgaggagtacttcgggtcttacgggacactgaagctgcatctggaaatgttagctgatcagccacggacgacaaaatatcactcggtcatactgcagaacaaggaaagcctgacagataaggtgatcctcgatgtgggatgcggcaccggaatcatcagcctgttttgtgcacattatgccaggccgagagctgtttacgcggtcgaagcgagcgagatggcgcagcacaccggacaacttgttctgcagaacggatttgccgatatcattactgtatatcagcaaaaagtggaggatgttgttctccctgagaaagtggacgtactggtgtcagagtggatgggcacttgcctcttgcatcatacactggaagctgacgcagttcatgatggtaggcctagcccttgcccctatcgcaggcgcggccatggattttcctgcgtggcagagaagcctagcgtagagaaagcccatgtgtgtggtagtgagctaggctgtcactttcagacaagacctcacatctcgaagagctggaggaaaagtttaccgcatctggagatgacagtagatgcattatttggcaagcagtgcgcttatctggaggggtag

SEQ ID NO: 295679 - DNA, 906 bp, Artificial Sequence
  derived and/or modified sequence
atggccaccagcggggactgccccaggtctgagagccagggcgaggagccagcagaatgttctgaggccggcctgctgcaggagggcgtgcagcctgaggagtttgtggccatcgctgactatgctgccacagatgagacccagctgtccttcctgcggggggagaagatcctgatcctgcggcagaccacagctgactggtggtggggcgagagagctggctgctgcggctacatcccagccaaccacgtgggcaagcacgtggatgaatatgaccctgaggacacctggcaggatgaggagtacttcggcagctatggcaccctgaagctgcacctggagatgctggccgaccagcccaggaccaccaagtaccacagcgtcatcctgcagaacaaggagagcctgacagacaaggtgatcctggatgtgggctgcggcaccggcatcatcagcctcttctgtgcccactacgcccggcccagggctgtgtatgctgtggaggccagcgagatggcccagcacacaggccagctggtgctgcagaatggatttgctgacatcatcaccgtgtaccagcagaaggtggaggatgtggtgctgcctgagaaggtggatgtgctggtgtctgagtggatgggcacctgcctgctgcaccacaccctggaggctgatgctgtgcatgatggccggcccagcccctgcccctacagaagaagaggccacggcttcagctgtgtggccgagaagcccagcgtggagaaggcccacgtgtgtggcagcgagctgggctgccacttccagacccggccccacatcagcaagtcctggaggaagagcctgccccacctggagatgacagtggatgccctgtttgggaagcagtgtgcctacctggagggctag

SEQ ID NO: 295680 - DNA, 906 bp, Artificial Sequence
  derived and/or modified sequence
atggccaccagcggcgactgcccccggagcgagagccagggcgaggagccagcagagtgttcggaggccggcctgctccaggaaggggtccagccggaagaatttgttgcaattgctgactatgccgccactgacgagactcagctgagcttccttagaggagaaaagattctgatcctgagacagaccactgccgattggtggtggggcgagcgagcaggttgctgcgggtatatcccggctaaccatgtaggcaaacacgttgacgagtacgatcctgaggatacctggcaggacgaagagtacttcggcagctatggcacactgaaactgcacctagagatgctggccgatcagcctcgtaccaccaagtaccattcggtgatacttcagaacaaggagtcactgacagacaaggtgatcttggacgttggatgcgggaccggcatcattagcctcttctgcgcgcactacgcaagaccccgcgccgtatacgccgtcgaagccagtgagatggcccaacacaccggacagctggtgctacaaaatgggttcgcagatatcatcactgtttatcagcagaaagtggaggatgtcgtgctgcctgaaaaagtggatgtgctggtgtcagaatggatgggcacatgcttgctacatcacacgctggaagctgacgccgtgcatgacggccggccgagcccatgtccctatcgtagaagaggccatggcttttcttgtgtggccgagaaaccaagcgttgaaaaggcacatgtgtgtggatccgagctgggctgtcacttccagaccaggccccacatttccaagtcatggaggaagtctctgcctcatctcgagatgacagtggatgctctgtttggcaagcagtgtgcctacctggagggttag

SEQ ID NO: 295681 - DNA, 906 bp, Artificial Sequence
  derived and/or modified sequence
atggccacctctggtgactgtcctcgttcggaatcccagggggaagagccagcagagtgctctgaagccggtctccttcaggagggcgtacagcccgaagaattcgtggccatcgccgactacgcggctacggatgagacccaactaagcttcctgcgcggagagaaaatcctgatactgcgccagaccactgcggattggtggtggggggagcgcgcagggtgctgcgggtacattcccgctaatcacgtggggaagcacgtcgacgagtacgatccggaagacacctggcaggatgaagaatactttggctcatatggtactttaaagctccatctggagatgttggccgaccagcccaggactacaaagtatcattccgttatcctccaaaacaaagaatcgctgaccgacaaggtgatccttgacgtcggttgtggaaccggaatcatttccctgttctgtgctcactacgctcggcctcgggcagtgtatgccgttgaggcaagcgagatggctcaacacactggacaactcgtgcttcagaatggctttgccgacataattactgtataccagcagaaagttgaagacgtggtgcttccagagaaggttgacgtcctggttagtgaatggatgggcacatgcttactgcatcacaccctggaagccgatgccgtacacgatgggagaccgtccccgtgcccctacagacgtcgaggacacggatttagctgtgtggctgaaaaaccgagcgtggagaaggctcatgtgtgcggtagcgagttaggttgccactttcagacccggcctcacatctctaaaagctggcggaagagtctgccccacctagaaatgaccgttgatgctctcttcgggaaacagtgtgcttacttggaagggtag

SEQ ID NO: 295682 - DNA, 1652 bp, Artificial Sequence
  derived and/or modified sequence
ggcctgcgtgcactgcgcttgcgcgggttgagggcggtggctcaggctcctggaaaggaccgtccacccctccgcgctggcggtgtggacgcggaactcagcggagaaacgcgattgagaaatggaaaagaaaatgaaataaatcagcagttatgaggcagagcctaagagaactatggcaacatcaggtgactgtcccagaagtgaatcgcagggagaagagcctgctgagtgcagtgaggccggtctcctgcaggagggagtacagccagaggagtttgtggccatcgcggactacgctgccaccgatgagacccagctcagttttttgagaggagaaaaaattcttatcctgagacaaaccactgcagattggtggtggggtgagcgtgcgggctgctgtgggtacattccggcaaaccatgtggggaagcacgtggatgagtacgaccccgaggacacgtggcaggatgaagagtacttcggcagctatggaactctgaaactccacttggagatgttggcagaccagccacgaacaactaaataccacagtgtcatcctgcagaataaagaatccctgacggataaagtcatcctggacgtgggctgtgggactgggatcatcagtctcttctgtgcacactatgcgcggcctagagcggtgtacgcggtggaggccagtgagatggcacagcacacggggcagctggtcctgcagaacggctttgctgacatcatcaccgtgtaccagcagaaggtggaggatgtggtgctgcccgagaaggtggacgtgctggtgtctgagtggatggggacctgcctgctgcaccacacactggaagcagacgctgttcatgatggacgacccagtccctgtccatacaggagacgtggtcacgggttcagttgtgttgcagagaaacccagtgtggagaaggcacatgtctgtggctctgagctgggctgtcacttccagacaagaccccacatctcaaaaagttggagaaaaagtcttccccatctggagatgacagttgatgctttatttggaaagcagtgtgcatatcttgaggggtgatgaacacaagcaaaccaagttgcacctggcttctgcacactcctgcgaaagtcggtgaacattcactccacattgacccctccctagcctggcaggtgacgtcagggtccttcacagacaaacacgcttgggctcggcaggagctgccgtggccacccccgctgcccagtgtctgccctctagaagtaggctgtgtttccaggtgttcacccgtggtgcccacagtgccgacccgtggctgggtcggagctccatgttcctaagctaggtctaggtctacactcctaggacgcacgcatatcagcccgtgtaccctgtgacagtgactgtccccacctcctatgttagtggtgcccttactgccgtcgctcatccactcgtgtgggacgtaggattgcacagggctgtgccagtggcgtgtagggaacactgccctggctcagcgtgcgagctaaggtggtgatgtatgcgatgggactctgcatgggatagtacagttgtgtagacgtcttccaaataaattatgtgttggtccatcgcacatgctcaataaatatttttaaatgagtga

SEQ ID NO: 295683 - DNA, 906 bp, Artificial Sequence
  derived and/or modified sequence
atggccaccagcggcgactgccccagaagcgagagccagggcgaggagcccgccgagtgcagcgaggccggcctgctgcaggagggcgtgcagcccgaggagttcgtggccatcgccgactacgccgccaccgacgagacccagctgagcttcctgagaggcgagaagatcctgatcctgagacagaccaccgccgactggtggtggggcgagagagccggctgctgcggctacatccccgccaaccacgtgggcaagcacgtggacgagtacgaccccgaggacacctggcaggacgaggagtacttcggcagctacggcaccctgaagctgcacctggagatgctggccgaccagcccagaaccaccaagtaccacagcgtgatcctgcagaacaaggagagcctgaccgacaaggtgatcctggacgtgggctgcggcaccggcatcatcagcctgttctgcgcccactacgccagacccagagccgtgtacgccgtggaggccagcgagatggcccagcacaccggccagctggtgctgcagaacggcttcgccgacatcatcaccgtgtaccagcagaaggtggaggacgtggtgctgcccgagaaggtggacgtgctggtgagcgagtggatgggcacctgcctgctgcaccacaccctggaggccgacgccgtgcacgacggcagacccagcccctgcccctacagaagaagaggccacggcttcagctgcgtggccgagaagcccagcgtggagaaggcccacgtgtgcggcagcgagctgggctgccacttccagaccagaccccacatcagcaagagctggagaaagagcctgccccacctggagatgaccgtggacgccctgttcggcaagcagtgcgcctacctggagggctag

SEQ ID NO: 295684 - protein, 228 aa, Artificial Sequence
  derived and/or modified sequence
MATSGDCPRSESQGEEPAECSEAGLLQEGVQPEEFVAIADYAATDETQLSFLRGEKILILRQTTADWWWGERAGCCGYIPANHVGKHVDEYDPEDTWQDEEYFGSYGTLKLHLEMLADQPRTTKYHSVILQNKESLTDKVILDVGCGTGIISLFCAHYARPRAVYAVEASEMAQHTGQLVLQNGFADIITVYQQKVEDVVLPEKVDVLVSEWMGTCLLVGEKVFPIWR

SEQ ID NO: 295685 - DNA, 687 bp, Artificial Sequence
  derived and/or modified sequence
atggctacatctggggattgtcctagaagcgagagccagggagaagagcctgctgagtgtagcgaagccggtctattgcaggagggggtgcagccagaagagttcgtggcaattgcagactacgccgctaccgatgagacacagcttagctttctgaggggtgagaagatcttgattttgcgtcaaaccactgctgactggtggtggggcgagagggccggatgctgcggctatattccagccaatcacgtaggtaagcacgtagatgagtacgatcctgaggacacttggcaagacgaagagtacttcgggagctacggcacgttaaagctccatttggaaatgcttgccgatcagcccagaactaccaaataccactctgtgatcctgcagaataaagagtctttgactgacaaagtgattcttgatgtcggctgcgggacaggaatcattagccttttctgtgcacattacgcgagacccagagccgtctatgccgttgaagccagcgagatggcgcagcacacagggcagctggtcctgcaaaatggctttgccgacatcattaccgtgtaccagcagaaggtcgaagacgttgtactccctgaaaaagtggatgttttagtttcagagtggatggggacatgcctgctcgtcggggaaaaagtgttccctatctggcggtag

SEQ ID NO: 295686 - DNA, 687 bp, Artificial Sequence
  derived and/or modified sequence
atggccaccagcggggactgccccaggtctgagagccagggcgaggagccagcagaatgttctgaggccggcctgctgcaggagggcgtgcagcctgaggagtttgtggccatcgctgactatgctgccacagatgagacccagctgtccttcctgcggggggagaagatcctgatcctgcggcagaccacagctgactggtggtggggcgagagagctggctgctgcggctacatcccagccaaccacgtgggcaagcacgtggatgaatatgaccctgaggacacctggcaggatgaggagtacttcggcagctatggcaccctgaagctgcacctggagatgctggccgaccagcccaggaccaccaagtaccacagcgtcatcctgcagaacaaggagagcctgacagacaaggtgatcctggatgtgggctgcggcaccggcatcatcagcctcttctgtgcccactacgcccggcccagggctgtgtatgctgtggaggccagcgagatggcccagcacacaggccagctggtgctgcagaatggatttgctgacatcatcaccgtgtaccagcagaaggtggaggatgtggtgctgcctgagaaggtggatgtgctggtgtctgagtggatgggcacctgcctgctggtgggggagaaggtgttccccatctggaggtag

SEQ ID NO: 295687 - DNA, 687 bp, Artificial Sequence
  derived and/or modified sequence
atggccaccagcggcgactgcccccggagcgagagccagggcgaggaaccagctgagtgttccgaggctggtctgctgcaggagggcgtgcagccagaggaatttgttgccattgcagattacgcagctaccgacgaaactcagctgtctttcttgcggggcgagaagatcctgatcctgcgacagactactgccgactggtggtggggcgagcgggcgggctgttgcggctacattcccgcaaatcacgtgggtaagcatgtcgacgagtatgatcctgaggatacctggcaggacgaagagtatttcggcagttacggcacactgaagctccatctcgaaatgctggcagatcaaccacggaccacaaagtaccactcggtcatcctccagaataaggagtcactaacggacaaggtaatcctagacgtggggtgcggtacaggcattatctccctcttttgcgcccattatgccagaccccgtgccgtttacgccgtcgaagctagcgagatggcacaacatacgggccagctggtgttgcagaacgggttcgccgacattattacagtttaccagcaaaaagtcgaagatgtggtgttgcctgagaaagtggacgttctggtatccgaatggatgggaacatgcctcttagtgggagagaaggtgttccctatttggagatag

SEQ ID NO: 295688 - DNA, 687 bp, Artificial Sequence
  derived and/or modified sequence
atggcaacttccggagactgcccacggagtgaaagtcagggggaagagccagcggagtgctccgaggcgggactcctccaggagggagttcaaccggaagagttcgtggcaattgctgattacgctgcaaccgacgaaacacagttgagctttttacgcggagagaagattctgatcctgcggcagacaacggcagactggtggtggggagagagggcagggtgctgcggctatattcccgcaaatcatgttggaaagcacgttgacgaatacgaccctgaggacacctggcaggacgaggagtattttgggtcttacggcaccctgaaactgcatctcgagatgttggcagatcaacccagaacaaccaaataccacagcgtgatattgcagaacaaggaatctctgacagacaaggtcattcttgacgtcgggtgcggaaccgggataatcagcctgttctgcgctcactatgcccgtccacgtgccgtgtacgccgtggaagcatccgaaatggcccagcatactgggcagcttgtgctgcagaatggcttcgctgacataatcacggtgtaccaacagaaggttgaagatgtggtgctgcccgagaaagtggatgtgttggtgtcagagtggatggggacctgcttgttggtgggagagaaagtgtttcccatatggaggtag

SEQ ID NO: 295689 - DNA, 1480 bp, Artificial Sequence
  derived and/or modified sequence
ggcctgcgtgcactgcgcttgcgcgggttgagggcggtggctcaggctcctggaaaggaccgtccacccctccgcgctggcggtgtggacgcggaactcagcggagaaacgcgattgagaaatggaaaagaaaatgaaataaatcagcagttatgaggcagagcctaagagaactatggcaacatcaggtgactgtcccagaagtgaatcgcagggagaagagcctgctgagtgcagtgaggccggtctcctgcaggagggagtacagccagaggagtttgtggccatcgcggactacgctgccaccgatgagacccagctcagttttttgagaggagaaaaaattcttatcctgagacaaaccactgcagattggtggtggggtgagcgtgcgggctgctgtgggtacattccggcaaaccatgtggggaagcacgtggatgagtacgaccccgaggacacgtggcaggatgaagagtacttcggcagctatggaactctgaaactccacttggagatgttggcagaccagccacgaacaactaaataccacagtgtcatcctgcagaataaagaatccctgacggataaagtcatcctggacgtgggctgtgggactgggatcatcagtctcttctgtgcacactatgcgcggcctagagcggtgtacgcggtggaggccagtgagatggcacagcacacggggcagctggtcctgcagaacggctttgctgacatcatcaccgtgtaccagcagaaggtggaggatgtggtgctgcccgagaaggtggacgtgctggtgtctgagtggatggggacctgcctgctggttggagaaaaagtcttccccatctggagatgacagttgatgctttatttggaaagcagtgtgcatatcttgaggggtgatgaacacaagcaaaccaagttgcacctggcttctgcacactcctgcgaaagtcggtgaacattcactccacattgacccctccctagcctggcaggtgacgtcagggtccttcacagacaaacacgcttgggctcggcaggagctgccgtggccacccccgctgcccagtgtctgccctctagaagtaggctgtgtttccaggtgttcacccgtggtgcccacagtgccgacccgtggctgggtcggagctccatgttcctaagctaggtctaggtctacactcctaggacgcacgcatatcagcccgtgtaccctgtgacagtgactgtccccacctcctatgttagtggtgcccttactgccgtcgctcatccactcgtgtgggacgtaggattgcacagggctgtgccagtggcgtgtagggaacactgccctggctcagcgtgcgagctaaggtggtgatgtatgcgatgggactctgcatgggatagtacagttgtgtagacgtcttccaaataaattatgtgttggtccatcgcacatgctcaataaatatttttaaatgagtga

SEQ ID NO: 295690 - DNA, 687 bp, Artificial Sequence
  derived and/or modified sequence
atggccaccagcggcgactgccccagaagcgagagccagggcgaggagcccgccgagtgcagcgaggccggcctgctgcaggagggcgtgcagcccgaggagttcgtggccatcgccgactacgccgccaccgacgagacccagctgagcttcctgagaggcgagaagatcctgatcctgagacagaccaccgccgactggtggtggggcgagagagccggctgctgcggctacatccccgccaaccacgtgggcaagcacgtggacgagtacgaccccgaggacacctggcaggacgaggagtacttcggcagctacggcaccctgaagctgcacctggagatgctggccgaccagcccagaaccaccaagtaccacagcgtgatcctgcagaacaaggagagcctgaccgacaaggtgatcctggacgtgggctgcggcaccggcatcatcagcctgttctgcgcccactacgccagacccagagccgtgtacgccgtggaggccagcgagatggcccagcacaccggccagctggtgctgcagaacggcttcgccgacatcatcaccgtgtaccagcagaaggtggaggacgtggtgctgcccgagaaggtggacgtgctggtgagcgagtggatgggcacctgcctgctggtgggcgagaaggtgttccccatctggagatag

SEQ ID NO: 295691 - protein, 253 aa, Artificial Sequence
  derived and/or modified sequence
MRSMCNQGRGRESSRGGLHVQGSCRGLSRSPQQETGFAKAPAGTDCFFHCSPGSRGQGDRKEEVTSEPGGTSIMSRLGGMNAAVRAVTRMGIYVGAKVFLIYEGYEGLVEGGENIKQANWLSVSNIIQLGGTIIGSARCKAFTTREGRRAAAYNLVQHGITNLCVIGGDGSLTGANIFRSEWGSLLEELVAEGKISETTARTYSHLNIAGLVGSIDNDFCGTDMTIGTDSALHRIMEVIDAITTRGRLGELHV

SEQ ID NO: 295692 - protein, 827 aa, Artificial Sequence
  derived and/or modified sequence
MCNQGRGRESSRGGLHVQGSCRGLSRSPQQETGFAKAPAGTDCFFHCSPGSRGQGDRKEEVTSEPGGTSIMSRLGGMNAAVRAVTRMGIYVGAKVFLIYEGYEGLVEGGENIKQANWLSVSNIIQLGGTIIGSARCKAFTTREGRRAAAYNLVQHGITNLCVIGGDGSLTGANIFRSEWGSLLEELVAEGKISETTARTYSHLNIAGLVGSIDNDFCGTDMTIGTDSALHRIMEVIDAITTTAQSHQRTFVLEVMGRHCGYLALVSALASGADWLFIPEAPPEDGWENFMCERLGETRSRGSRLNIIIIAEGAIDRNGKPISSSYVKDLVVQRLGFDTRVTVLGHVQRGGTPSAFDRILSSKMGMEAVMALLEATPDTPACVVTLSGNQSVRLPLMECVQMTKEVQKAMDDKRFDEATQLRGGSFENNWNIYKLLAHQKPPKEKSNFSLAILNVGAPAAGMNAAVRSAVRTGISHGHTVYVVHDGFEGLAKGQVQEVGWHDVAGWLGRGGSMLGTKRTLPKGQLESIVENIRIYGIHALLVVGGFEAYEGVLQLVEARGRYEELCIVMCVIPATISNNVPGTDFSLGSDTAVNAAMESCDRIKQSASGTKRRVFIVETMGGYCGYLATVTGIAVGADAAYVFEDPFNIHDLKVNVEHMTEKMKTDIQRGLVLRNEKCHDYYTTEFLYNLYSSEGKGVFDCRTNVLGHLQQGGAPTPFDRNYGTKLGVKAMLWLSEKLREVYRKGRVFANAPDSACVIGLKKKAVAFSPVTELKKDTDFEHRMPREQWWLSLRLMLKMLAQYRISMAAYVSGELEHVTRRTLSMDKGF

SEQ ID NO: 295693 - DNA, 762 bp, Artificial Sequence
  derived and/or modified sequence
atgaggtctatgtgtaaccagggtcgaggccgggaaagttcacggggcggactccatgttcaggggtcatgccgcgggttgagcagatccccccaacaagaaactggctttgcaaaagcccctgcaggaactgactgctttttccattgtagccccggctcccggggccagggtgaccgtaaagaagaggtcacttccgaaccaggagggacttcaattatgtctagactcgggggcatgaatgctgctgtcagggccgtgacccgaatggggatatacgttggagccaaagtgtttctcatatatgaaggttatgaggggcttgtggagggaggggagaatatcaagcaggccaactggctttccgtctcaaatatcatccagctgggcggcaccatcattggaagtgcccggtgtaaggctttcacaacacgcgaaggccggcgcgctgctgcttacaatctggtacagcacggtatcacgaatctgtgtgtaatcggcggcgacgggtcgctcaccggtgctaacatctttaggagcgaatggggttccctgctggaggagttagttgccgaagggaaaatctcagaaactactgctcgaacctatagccatttgaacattgccggtctggtcggttctatcgacaatgacttctgtggaactgacatgaccataggcacagactcggccctgcatagaattatggaagtgatagacgcgattaccaccaggggtcggttaggagagctgcacgtttag

SEQ ID NO: 295694 - DNA, 2484 bp, Artificial Sequence
  derived and/or modified sequence
atgtgtaatcagggacgggggcgcgaatcaagccgtggcggtcttcatgtgcaagggtcctgccgggggcttagcagatccccccagcaggaaacaggtttcgccaaagccccagccgggaccgactgtttcttccattgctccccaggttcgcgcggccagggcgacagaaaggaagaggtcacatctgagccgggtggtacgagcattatgtcacgactggggggcatgaatgccgccgtgcgcgccgtgaccaggatgggaatctacgtgggggcgaaggtttttttgatctatgaaggctatgaggggctggttgagggcggggaaaatatcaagcaggccaattggcttagcgtttccaacataattcagttgggtggtacaattatcggatctgccaggtgcaaagcctttactacccgcgaaggccgccgtgctgcggcctacaaccttgtgcaacacgggataaccaatctctgtgtgataggcggtgacgggagtctcaccggagccaatatctttcgatcagaatggggatctctgctcgaagaacttgtcgccgagggtaaaatatctgagacgaccgcacgaacatattcgcacctgaacattgctgggctagtcggttctatcgacaatgacttttgtggcaccgacatgacgatcggaactgactctgctcttcatcggatcatggaggtcattgacgcaatcactacaaccgctcaaagccaccagcgtactttcgtcctggaggtgatgggcagacattgcggatacctggctctggtgtcagccttggcgtcaggcgcagattggctgttcattcctgaggccccgcccgaggatggttgggagaactttatgtgcgagagactcggggagactaggagccgggggtccagactcaacatcatcataattgcagaaggcgctatcgatcggaacggcaaacccatttcctccagctacgtcaaggatctggttgtccagcgcttgggtttcgatacccgtgtgaccgtgctggggcatgtgcagagaggtggaacaccatcggccttcgacagaattctgagctccaagatgggcatggaagccgtcatggctctgctggaggcaacccctgacactccagcttgcgtggtgacccttagcggtaatcagtctgtgcgtctgcctctgatggaatgcgtacagatgaccaaggaggtccagaaggccatggatgacaagcggtttgacgaggcaacacagctgcgggggggctcctttgaaaataattggaacatatacaaactgcttgcgcaccagaagccaccaaaagagaaaagcaatttttccctggcaatcctcaatgtgggagcaccagccgctggcatgaatgcagcagtccggtccgcagttcgtaccggcatcagccatggtcataccgtatatgtcgtgcacgatggtttcgaggggctggctaagggccaagtacaggaagtcgggtggcatgacgtcgccggatggctaggacgcggtggaagcatgcttggcacaaaaagaacccttccgaaggggcagctggagagcatcgtggagaacattcgtatttacggcatccacgccctattagttgtcggaggatttgaggcttatgagggcgtgctgcagctggtggaagcgcgaggaaggtacgaggagctatgtatcgtcatgtgcgtgatccccgccactatatccaacaacgtgcctgggaccgactttagcctgggtagcgacaccgccgtaaacgccgcaatggaatcctgtgacaggatcaagcagagcgcatcaggaacaaagagacgcgtgtttatcgtcgagacgatgggaggttattgcggctatttggccaccgttactggcattgcagtgggtgcagacgccgcgtacgtatttgaagatcctttcaatatccacgatcttaaagtcaacgttgagcacatgacagaaaaaatgaaaaccgatattcagagaggcctcgtgctcagaaatgagaaatgccacgactactacacaacagaatttctgtataatctttactcttccgaggggaagggtgtgtttgattgtcgtactaatgtgttgggccacttacagcagggcggggctccaacgcccttcgatcgaaactacggcacgaagctgggcgtcaaggccatgctatggttgagtgagaaattgagggaagtgtaccgcaaagggcgggtgttcgccaacgcacccgacagtgcgtgcgtgattggtctgaagaagaaggctgtcgccttttctcccgtgaccgaattgaagaaggacactgatttcgagcacagaatgccgagagagcagtggtggcttagtctgcgcctgatgctcaagatgttggcccagtacaggatctctatggcagcctacgtatcaggcgagctagagcacgtgactaggagaactctgtctatggataagggattctag

SEQ ID NO: 295695 - DNA, 762 bp, Artificial Sequence
  derived and/or modified sequence
atgaggtccatgtgcaaccagggccggggccgggagagcagccggggcggcctgcacgtgcagggcagctgccggggcctgagccgcagcccccagcaggagactggatttgccaaggccccagctggaacagactgcttcttccactgcagccctggcagccggggccagggcgacaggaaggaggaggtgaccagcgagcccggcggcaccagcatcatgagccggctgggcggcatgaatgctgctgtgcgggctgtgaccaggatgggcatctacgtgggcgccaaggtgttcctgatctatgagggctatgagggcctggtggagggcggggagaacatcaagcaggccaactggctgtctgtgagcaacatcatccagctgggcggcaccatcatcggcagcgcccgctgcaaggccttcaccacccgggagggccggcgggctgctgcctacaacctggtgcagcacggcatcaccaacctgtgtgtgattggaggagatggcagcctgactggagccaacatcttccgctctgagtggggcagcctgctggaggagctggtggccgagggcaagatcagcgagaccacagcccggacctacagccacctgaacattgctggcctggtgggcagcattgacaatgacttctgtggcacagacatgaccatcggcacagacagcgccctgcaccgcatcatggaggtgattgatgccatcaccacccggggccgcctgggggagctgcacgtgtag

SEQ ID NO: 295696 - DNA, 2484 bp, Artificial Sequence
  derived and/or modified sequence
atgtgcaaccagggccggggccgggagagcagcagaggaggcctgcacgtgcagggcagctgccggggcctgagccgcagcccccagcaggagaccggctttgccaaggccccagctggaacagactgcttcttccactgcagccctggcagccggggccagggcgacaggaaggaggaggtgaccagcgagcccggcggcaccagcatcatgagccggctgggcggcatgaatgctgctgtgcgggctgtgaccaggatgggcatctacgtgggcgccaaggtgttcctgatctatgagggctatgagggcctggtggagggcggggagaacatcaagcaggccaactggctgtctgtgagcaacatcatccagctgggcggcaccatcatcggcagcgcccgctgcaaggccttcaccacccgggagggcagaagagctgctgcctacaacctggtgcagcacggcatcaccaacctgtgtgtgattggaggagatggcagcctgaccggggccaacatcttccgctctgagtggggcagcctgctggaggagctggtggccgagggcaagatcagcgagaccacagcccggacctacagccacctgaacattgctggcctggtgggcagcattgacaatgacttctgtggcacagacatgaccatcggcacagattctgccctgcaccgcatcatggaggtgattgatgccatcaccaccacagcccagagccaccagaggacctttgtgctggaggtgatgggccgccactgcggctacctggccctggtgtctgccctggccagcggggctgactggctgttcatccctgaggcccccccagaagatggctgggagaacttcatgtgtgagcggctgggggagaccaggagccggggcagccggctgaacatcatcatcatcgccgagggcgccatcgacagaaatggcaagcccatcagcagcagctatgtgaaggacctggtggtgcagaggctgggctttgacaccagggtgacagtgctgggccacgtgcagagaggaggcaccccatctgcctttgaccgcatcctgagcagcaagatgggcatggaggccgtgatggccctgctggaggccaccccagacaccccagcctgtgtggtgaccctgagcggcaaccagagcgtgcggctgcccctgatggagtgtgtgcagatgaccaaggaggtgcagaaggccatggatgacaagagatttgatgaggccacccagctgcggggcggcagctttgagaacaactggaacatctacaagctgctggcccaccagaagccacccaaggagaagagcaacttcagcctggccatcctgaatgtgggcgccccagctgctggcatgaatgctgctgtgcgctctgctgtgaggacaggcatcagccacggccacacagtgtatgtggtgcatgatggctttgagggcctggccaagggccaggtgcaggaggtgggctggcatgatgtggccggctggctgggccggggcggctccatgctgggcaccaagaggaccctgcccaagggccagctggagagcatcgtggagaacatccgcatctacggcatccacgccctgctggtggtgggcggctttgaggcctatgagggcgtgctgcagctggtggaggcccggggccgctatgaggagctgtgcatcgtgatgtgtgtgatcccagccaccatcagcaacaacgtgcccggcacagacttcagcctgggcagtgacacagctgtgaatgctgccatggagagctgtgaccgcatcaagcagagcgccagcggcaccaagagaagagtcttcatcgtggagaccatgggcggctactgcggctacctggccaccgtgactggaattgctgtgggcgcagatgctgcctacgtgtttgaggaccccttcaacatccatgacctgaaggtgaatgtggagcacatgacagagaagatgaagacagacatccagaggggcctggtgctgagaaatgagaagtgccacgactactacaccacagagttcctgtacaacctgtacagcagcgagggcaaaggagtgtttgactgcaggaccaacgtgctgggccacctgcagcagggcggggcccccaccccatttgacagaaattatggcaccaagctgggcgtgaaggccatgctgtggctgtctgagaagctgcgggaggtgtacaggaagggccgggtgtttgccaatgccccagattctgcctgtgtgattggcctgaagaagaaggctgtggccttcagccctgtgacagagctgaagaaggacacagactttgagcacaggatgccccgggagcagtggtggctgagcctgcggctgatgctgaagatgctggcccagtaccgcatctccatggccgcctacgtgtctggagagctggagcacgtgaccaggaggaccctgtccatggacaagggcttctag

SEQ ID NO: 295697 - DNA, 762 bp, Artificial Sequence
  derived and/or modified sequence
atgcggagcatgtgcaaccagggccggggccgggagagcagccggggtggactgcatgtacaggggagctgcaggggattgtcccggtcgccccaacaggagacaggatttgccaaagctcccgcagggacggattgtttcttccactgttcccccggcagtcgggggcaaggggacagaaaggaggaggttacatctgagcctggcggcacgtccatcatgtctcgcctcggcggaatgaacgctgccgtgagagctgtaaccaggatgggtatctacgtcggagccaaggtgttcctgatctacgagggttacgaaggcctggtggaggggggagaaaacataaagcaggctaactggctctctgtctccaatatcatccagctcggcggcacgatcatcggtagcgcgaggtgtaaagcattcaccacaagagaaggtaggcgtgccgccgcatacaatctggtgcaacatggcattacaaacttatgcgtcatcggaggagacgggagtctgacgggggctaacatctttcgcagcgaatgggggagcctcctggaggaacttgttgccgaagggaagatttctgaaaccaccgctcggacctattcacacctcaatatcgcaggactggtgggttccattgacaacgacttctgtggcacggatatgaccatagggacagatagtgccctgcaccggattatggaagtcatagatgctataaccactagaggccgacttggtgagctgcacgtgtag

SEQ ID NO: 295698 - DNA, 2484 bp, Artificial Sequence
  derived and/or modified sequence
atgtgcaaccagggccggggccgggagagcagccggggcggcctgcatgtgcaaggatcttgccgaggtctctccaggtctcctcagcaggaaacaggatttgccaaagcaccagccggaactgactgttttttccactgcagccctggttcccgaggccagggggatcgaaaggaggaggtgacctctgaaccagggggaacatcaattatgagcaggctgggcggaatgaatgccgctgtgcgagctgtgacccggatgggcatctacgtgggggcaaaagtgttcctgatttacgaaggatacgagggtctggtggagggcggcgagaatattaaacaagcaaattggctctccgtgagcaacataattcagttggggggaacgatcattggaagcgccagatgcaaggcctttacgacacgggagggaaggagggcggctgcgtacaacctggtgcagcacggtataaccaacctctgtgtcatcgggggcgacgggagcttaacaggagctaacatctttaggagcgaatggggttcactgttggaggaacttgtggccgagggtaagataagtgaaacaaccgctcggacttacagccatttgaacattgctgggctggttggatcaatcgataatgacttctgtggtactgatatgacaatcggcacagatagcgcacttcacaggatcatggaagtcatagatgccattacgaccacggcccagtcccaccagagaaccttcgttctggaggtcatgggtagacattgcggctacctggccctggtgagtgctctggcatccggtgcggattggctctttatccccgaggcccctccggaggatggatgggagaacttcatgtgtgagcgccttggagagacccgaagcaggggaagtagattgaacatcattatcattgctgagggcgctattgataggaatggcaagccaatctcaagttcatacgtgaaggatctcgttgtgcagcgcctgggattcgatacacgggtcacagtactgggacacgtgcagaggggtggcaccccgtcggctttcgatcgcattttaagcagtaagatgggaatggaggcagtgatggctttactagaagcaacccctgatacacccgcctgtgttgtcaccctttcaggcaatcagtctgttaggctgcccctgatggaatgtgtgcaaatgactaaggaggttcagaaggcgatggacgataagagattcgacgaagctacccagctgaggggcggatcctttgaaaacaattggaacatctacaagctgctggcccatcagaagccacccaaagaaaaatctaatttctcgctggcaatcctgaacgtcggggccccagctgccgggatgaatgctgccgttcggagtgccgttcgcactggaattagccatggccatactgtgtatgtcgtgcacgacggctttgagggtcttgccaagggccaggtccaggaggttggctggcatgatgtagcagggtggctcggccgaggcgggtctatgcttggaacgaagagaactctgcccaaaggccaactcgagtccattgtggagaacatacgaatttacggaatccacgctcttctcgtggtgggaggattcgaagcttatgaaggtgttctgcagttggtggaggcacgcggccgatatgaggaactgtgcatcgttatgtgtgtcatccccgctactatttctaataatgtccctggcaccgacttttcactcgggtctgacactgctgtaaacgccgctatggagtcgtgtgatagaataaagcaatccgcgtccggcacaaagagaagagtattcattgtagaaacaatgggcggctattgtggttacctcgctaccgtgaccggaatcgcggtgggagcagacgccgcgtacgtctttgaagatccattcaatattcacgacctgaaggtcaacgtggagcacatgaccgaaaaaatgaagaccgatattcaaagaggactggtgttacgtaatgaaaagtgtcacgactactatacaactgagtttctgtacaacctgtattcttccgaggggaagggggtcttcgattgcagaacgaacgtacttggacacctgcagcagggaggggctcctaccccctttgataggaactacggaactaagttgggcgtgaaggccatgctttggctctccgagaaattgagagaggtttacagaaaaggcagagtctttgctaacgccccagactccgcttgcgttatcgggctgaaaaaaaaagctgttgccttcagccccgtgaccgagctaaagaaagacactgatttcgagcatcggatgccccgggagcagtggtggcttagtctgcgactcatgctgaaaatgctcgcccagtaccgcatcagcatggccgcctatgtttctggcgaactggagcacgtaacacgcagaaccctctcaatggataaaggattttag

SEQ ID NO: 295699 - DNA, 1108 bp, Artificial Sequence
  derived and/or modified sequence
cgtgtttcggccgccgccatggccgcggtggacctggagaagctgcgggcgtcgggcgcgggcaaggccatcggcgtcctgaccagcggcggcgacgcgcaaggtcccctgacaagcccaccaggccccctgctgagatggctgtgaccctgggctgacccgcccagtggcacattgactccgcctggagctggggagaccagagaggccctgtggttggacggtggcctgggtgcgctgctcctgccctctccttgccctgcctcagctgctgcctgccagaggcgtggcacctcacctcacacctgctccctgctgctgagccccacgccaagctggagagcggatgagaagcatgtgtaaccagggtagaggtcgagagtcctctcgtgggggtctccatgttcaagggagctgccgaggcttgagcaggagcccccagcaggaaactggctttgccaaggcccccgctgggacagactgtttctttcactgcagtcctgggagccgagggcaaggggacaggaaagaggaagtgacctcagagcctggtggcaccagcatcatgtccaggctggggggcatgaacgctgctgtccgggctgtgacgcgcatgggcatttatgtgggtgccaaagtcttcctcatctacgagggctatgagggcctcgtggagggaggtgagaacatcaagcaggccaactggctgagcgtctccaacatcatccagctgggcggcactatcattggcagcgctcgctgcaaggcctttaccaccagggaggggcgccgggcagcggcctacaacctggtccagcacggcatcaccaacctgtgcgtcatcggcggggatggcagcctcacaggtgccaacatcttccgcagcgagtggggcagcctgctggaggagctggtggcggaaggtaagatctcagagactacagcccggacctactcgcacctgaacatcgcgggcctagtgggctccatcgataacgacttctgcggcaccgacatgaccatcggcacggactcggccctccaccgcatcatggaggtcatcgatgccatcaccacccgaggacggctgggagaacttcatgtgtga

SEQ ID NO: 295700 - DNA, 2992 bp, Artificial Sequence
  derived and/or modified sequence
atgtgtaaccagggtagaggtcgagagtcctctcgtgggggtctccatgttcaagggagctgccgaggcttgagcaggagcccccagcaggaaactggctttgccaaggcccccgctgggacagactgtttctttcactgcagtcctgggagccgagggcaaggggacaggaaagaggaagtgacctcagagcctggtggcaccagcatcatgtccaggctggggggcatgaacgctgctgtccgggctgtgacgcgcatgggcatttatgtgggtgccaaagtcttcctcatctacgagggctatgagggcctcgtggagggaggtgagaacatcaagcaggccaactggctgagcgtctccaacatcatccagctgggcggcactatcattggcagcgctcgctgcaaggcctttaccaccagggaggggcgccgggcagcggcctacaacctggtccagcacggcatcaccaacctgtgcgtcatcggcggggatggcagcctcacaggtgccaacatcttccgcagcgagtggggcagcctgctggaggagctggtggcggaaggtaagatctcagagactacagcccggacctactcgcacctgaacatcgcgggcctagtgggctccatcgataacgacttctgcggcaccgacatgaccatcggcacggactcggccctccaccgcatcatggaggtcatcgatgccatcaccaccactgcccagagccaccagaggaccttcgtgctggaagtgatgggccggcactgcgggtacctggcgctggtatctgcactggcctcaggggccgactggctgttcatccccgaggctccacccgaggacggctgggagaacttcatgtgtgagaggctgggtgagactcggagccgtgggtcccgactgaacatcatcatcatcgctgagggtgccattgaccgcaacgggaagcccatctcgtccagctacgtgaaggacctggtggttcagaggctgggcttcgacacccgtgtaactgtgctgggccacgtgcagcggggagggacgccctctgccttcgaccggatcctgagcagcaagatgggcatggaggcggtgatggcgctgctggaagccacgcctgacacgccggcctgcgtggtcaccctctcggggaaccagtcagtgcggctgcccctcatggagtgcgtgcagatgaccaaggaagtgcagaaagccatggatgacaagaggtttgacgaggccacccagctccgtggtgggagcttcgagaacaactggaacatttacaagctcctcgcccaccagaagccccccaaggagaagtctaacttctccctggccatcctgaatgtgggggccccggcggctggcatgaatgcggccgtgcgctcggcggtgcggaccggcatctcccatggacacacagtatacgtggtgcacgatggcttcgaaggcctagccaagggtcaggtgcaagaagtaggctggcacgacgtggccggctggttggggcgtggtggctccatgctggggaccaagaggaccctgcccaagggccagctggagtccattgtggagaacatccgcatctatggtattcacgccctgctggtggtcggtgggtttgaggcctatgaaggggtgctgcagctggtggaggctcgcgggcgctacgaggagctctgcatcgtcatgtgtgtcatcccagccaccatcagcaacaacgtccctggcaccgacttcagcctgggctccgacactgctgtaaatgccgccatggagagctgtgaccgcatcaaacagtctgcctcggggaccaagcgccgtgtgttcatcgtggagaccatggggggttactgtggctacctggccaccgtgactggcattgctgtgggggccgacgccgcctacgtcttcgaggaccctttcaacatccacgacttaaaggtcaacgtggagcacatgacggagaagatgaagacagacattcagaggggcctggtgctgcggaacgagaagtgccatgactactacaccacggagttcctgtacaacctgtactcatcagagggcaagggcgtcttcgactgcaggaccaatgtcctgggccacctgcagcagggtggcgctccaaccccctttgaccggaactatgggaccaagctgggggtgaaggccatgctgtggttgtcggagaagctgcgcgaggtttaccgcaagggacgggtgttcgccaatgccccagactcggcctgcgtgatcggcctgaagaagaaggcggtggccttcagccccgtcactgagctcaagaaagacactgatttcgagcaccgcatgccacgggagcagtggtggctgagcctgcggctcatgctgaagatgctggcacaataccgcatcagtatggccgcctacgtgtcaggggagctggagcacgtgacccgccgcaccctgagcatggacaagggcttctgaggccagccatgcccacgcccctccccagcccccacccatgccagcgcagcgccagggctcagatggggcctgggctgttgtgtctggagcctgcaggcaggtgggggctgcgtccctgctcagcccatcccctgcctctatccctggccacctgccaggcctccctcgggctggtgtcttgagaccagcctgccaggccctccagcaggaggacagagtgccctggggcatccaccttcctgcccaggggacgtggcgctgtcggtgtttggaggctgctgccccctggctttggcgccccatgggccctcagcgtctccccatgctgggctcactacatgggccagcccttgctctacctggccggtaggctgctggcgcctaggttgtgttgagagggggatgcccctggccctgcctcactgtgacctgctcctgcccacgtgcagcacctgtcaccttttctagaaataaaatcaccctgactgtggggtgcatcggtctccgg

SEQ ID NO: 295701 - DNA, 762 bp, Artificial Sequence
  derived and/or modified sequence
atgcggtcgatgtgcaaccaaggcaggggacgcgagagttctcggggtgggttgcacgtgcagggatcctgtagggggctgtctcgttctcctcagcaggagactggcttcgctaaggctccagcgggaaccgactgctttttccactgttcaccaggatcacgagggcagggtgatcgcaaagaggaagtcacaagtgagccaggcggaacgtcgataatgtcacgccttggaggcatgaacgccgcagtcagggctgtaacaaggatggggatctatgtgggtgcaaaagtctttctcatctatgagggatacgagggcctggtggaaggcggagagaatattaagcaggccaactggctaagcgtgagtaatataatacagctggggggtacgattattggaagcgccaggtgtaaagcattcacaactagagaaggcagacgcgcagccgcatataacctggtgcagcacgggatcacaaatttgtgcgtgatcggaggcgacgggtcattaaccggcgctaatatatttaggtctgaatgggggtctctcctcgaggagctagtggctgagggcaagatttctgaaacaactgcgaggacatactctcatctcaatattgcgggtctggtgggcagtatcgacaatgatttctgcggtactgatatgaccatcgggacagactctgcattgcaccgtatcatggaggtcatcgacgcaatcacgacccgagggaggctcggcgaactgcacgtctag

SEQ ID NO: 295702 - DNA, 2484 bp, Artificial Sequence
  derived and/or modified sequence
atgtgcaaccagggcaggggccgagagagctcgcgcggaggacttcatgtgcaggggagttgtagggggctgtctagaagtccacaacaagaaaccggcttcgctaaggctcccgctggaaccgactgcttcttccactgttctcctggaagtcgcggacagggagataggaaggaggaggtgacctcggagccaggcggaaccagtatcatgagtcggctcggcggaatgaatgcagcggtcagagccgtgacacgcatgggcatctatgtgggggcaaaagtattcctcatctatgaagggtatgaagggttagttgaaggcggagaaaacatcaagcaggccaactggttgtccgtgtctaatatcattcagctgggcggtacgattatcggctcagccagatgcaaggcatttacaacacgagagggaaggagggcagctgcttataatttggtccagcacggtatcaccaacctttgcgtgataggcggagacggctccttaactggcgcaaacattttccgcagtgagtggggatccctgctagaagagttagttgcagaaggaaagatctccgagacaacagctcgaacatatagtcacctgaacattgcagggctcgtcggaagcatagacaacgacttctgtggcaccgatatgacaattgggacagactctgcgctgcatcgtattatggaggtaatcgacgccatcacaaccactgctcagagtcatcaaagaaccttcgtgctggaggtcatgggtaggcactgtgggtacctcgctctcgtttcagccctggcctccggggcagactggctgtttattccagaagctccaccagaggacggatgggagaacttcatgtgcgagaggttgggcgagacccgaagccgaggttctaggctaaatattattatcatcgccgagggagccatagatcggaatggaaagccaattagctcatcatacgtcaaggatctggtggtccaacggcttgggttcgacacacgagtaacggttttgggacacgttcaacggggaggtacaccttctgccttcgaccgaatccttagcagtaaaatgggcatggaggccgtgatggcactgctcgaagctactccagacacacccgcatgcgtggtcacattatcgggaaaccaaagcgtacgtctccccctcatggaatgcgttcaaatgacaaaggaggtccagaaagcgatggatgataagcggtttgatgaggccacccagctgcgaggcggtagctttgaaaacaactggaacatttacaagctgctggcgcaccagaaacctccaaaagagaaatctaacttttctctggccattctgaatgtgggggcacctgccgcagggatgaacgcagccgtcagatctgccgtgcgcactggcatttcccacgggcacactgtctatgtcgttcacgacggctttgagggcctcgcgaaagggcaagtgcaggaagtgggctggcacgacgtcgctggttggcttgggagaggcggatcaatgctgggaaccaaacgaacactgcctaagggacagctcgagtctatcgttgagaacatccgtatttacgggatccatgctttactggtagtggggggtttcgaggcatacgagggggtccttcagctcgtggaagctcggggaagatatgaggagctgtgtattgttatgtgtgtgattcccgctacgatctctaacaatgtccctggcacagattttagcctgggatcggacacagccgtgaatgcagctatggagagctgtgaccggatcaaacaatctgcgagcggcaccaaaaggcgagttttcatagtggaaactatggggggttactgcggctacctggccaccgtcactggcattgcagtcggagcagatgctgcctacgtcttcgaggacccattcaacatccatgacctgaaggtgaacgtggagcatatgactgagaaaatgaagacggacatccaacgaggtttagtgcttaggaacgagaagtgccacgattattacacgaccgagtttctgtataacttatattcttctgagggaaaaggtgtgtttgattgtcgcactaacgtgctgggacacctccagcaaggcggagctcctaccccatttgataggaactacggaactaagctcggcgtaaaggccatgctttggctgtcagaaaaactccgagaggtatacaggaaaggcagagtttttgcaaatgctccggactctgcctgcgtgataggcctgaagaaaaaagcagtggccttttcaccagtgaccgaactcaaaaaggacaccgatttcgagcatagaatgccgagggagcagtggtggctgagtcttcgattgatgcttaagatgctggcccagtaccgcatcagcatggcggcttatgtgtccggggagctggagcacgtgaccagaagaacactgtcaatggacaaggggttctag

SEQ ID NO: 295703 - DNA, 762 bp, Artificial Sequence
  derived and/or modified sequence
atgagaagcatgtgcaaccagggcagaggcagagagagcagcagaggcggcctgcacgtgcagggcagctgcagaggcctgagcagaagcccccagcaggagaccggcttcgccaaggcccccgccggcaccgactgcttcttccactgcagccccggcagcagaggccagggcgacagaaaggaggaggtgaccagcgagcccggcggcaccagcatcatgagcagactgggcggcatgaacgccgccgtgagagccgtgaccagaatgggcatctacgtgggcgccaaggtgttcctgatctacgagggctacgagggcctggtggagggcggcgagaacatcaagcaggccaactggctgagcgtgagcaacatcatccagctgggcggcaccatcatcggcagcgccagatgcaaggccttcaccaccagagagggcagaagagccgccgcctacaacctggtgcagcacggcatcaccaacctgtgcgtgatcggcggcgacggcagcctgaccggcgccaacatcttcagaagcgagtggggcagcctgctggaggagctggtggccgagggcaagatcagcgagaccaccgccagaacctacagccacctgaacatcgccggcctggtgggcagcatcgacaacgacttctgcggcaccgacatgaccatcggcaccgacagcgccctgcacagaatcatggaggtgatcgacgccatcaccaccagaggcagactgggcgagctgcacgtgtag

SEQ ID NO: 295704 - DNA, 2484 bp, Artificial Sequence
  derived and/or modified sequence
atgtgcaaccagggcagaggcagagagagcagcagaggcggcctgcacgtgcagggcagctgcagaggcctgagcagaagcccccagcaggagaccggcttcgccaaggcccccgccggcaccgactgcttcttccactgcagccccggcagcagaggccagggcgacagaaaggaggaggtgaccagcgagcccggcggcaccagcatcatgagcagactgggcggcatgaacgccgccgtgagagccgtgaccagaatgggcatctacgtgggcgccaaggtgttcctgatctacgagggctacgagggcctggtggagggcggcgagaacatcaagcaggccaactggctgagcgtgagcaacatcatccagctgggcggcaccatcatcggcagcgccagatgcaaggccttcaccaccagagagggcagaagagccgccgcctacaacctggtgcagcacggcatcaccaacctgtgcgtgatcggcggcgacggcagcctgaccggcgccaacatcttcagaagcgagtggggcagcctgctggaggagctggtggccgagggcaagatcagcgagaccaccgccagaacctacagccacctgaacatcgccggcctggtgggcagcatcgacaacgacttctgcggcaccgacatgaccatcggcaccgacagcgccctgcacagaatcatggaggtgatcgacgccatcaccaccaccgcccagagccaccagagaaccttcgtgctggaggtgatgggcagacactgcggctacctggccctggtgagcgccctggccagcggcgccgactggctgttcatccccgaggccccccccgaggacggctgggagaacttcatgtgcgagagactgggcgagaccagaagcagaggcagcagactgaacatcatcatcatcgccgagggcgccatcgacagaaacggcaagcccatcagcagcagctacgtgaaggacctggtggtgcagagactgggcttcgacaccagagtgaccgtgctgggccacgtgcagagaggcggcacccccagcgccttcgacagaatcctgagcagcaagatgggcatggaggccgtgatggccctgctggaggccacccccgacacccccgcctgcgtggtgaccctgagcggcaaccagagcgtgagactgcccctgatggagtgcgtgcagatgaccaaggaggtgcagaaggccatggacgacaagagattcgacgaggccacccagctgagaggcggcagcttcgagaacaactggaacatctacaagctgctggcccaccagaagccccccaaggagaagagcaacttcagcctggccatcctgaacgtgggcgcccccgccgccggcatgaacgccgccgtgagaagcgccgtgagaaccggcatcagccacggccacaccgtgtacgtggtgcacgacggcttcgagggcctggccaagggccaggtgcaggaggtgggctggcacgacgtggccggctggctgggcagaggcggcagcatgctgggcaccaagagaaccctgcccaagggccagctggagagcatcgtggagaacatcagaatctacggcatccacgccctgctggtggtgggcggcttcgaggcctacgagggcgtgctgcagctggtggaggccagaggcagatacgaggagctgtgcatcgtgatgtgcgtgatccccgccaccatcagcaacaacgtgcccggcaccgacttcagcctgggcagcgacaccgccgtgaacgccgccatggagagctgcgacagaatcaagcagagcgccagcggcaccaagagaagagtgttcatcgtggagaccatgggcggctactgcggctacctggccaccgtgaccggcatcgccgtgggcgccgacgccgcctacgtgttcgaggaccccttcaacatccacgacctgaaggtgaacgtggagcacatgaccgagaagatgaagaccgacatccagagaggcctggtgctgagaaacgagaagtgccacgactactacaccaccgagttcctgtacaacctgtacagcagcgagggcaagggcgtgttcgactgcagaaccaacgtgctgggccacctgcagcagggcggcgcccccacccccttcgacagaaactacggcaccaagctgggcgtgaaggccatgctgtggctgagcgagaagctgagagaggtgtacagaaagggcagagtgttcgccaacgcccccgacagcgcctgcgtgatcggcctgaagaagaaggccgtggccttcagccccgtgaccgagctgaagaaggacaccgacttcgagcacagaatgcccagagagcagtggtggctgagcctgagactgatgctgaagatgctggcccagtacagaatcagcatggccgcctacgtgagcggcgagctggagcacgtgaccagaagaaccctgagcatggacaagggcttctag

SEQ ID NO: 295705 - protein, 376 aa, Artificial Sequence
  derived and/or modified sequence
MGLLAFLKTQFVLHLLVGFVFVVSGLVINFVQLCTLALWPVSKQLYRRLNCRLAYSLWSQLVMLLEWWSCTECTLFTDQATVERFGKEHAVIILNHNFEIDFLCGWTMCERFGVLGSSKVLAKKELLYVPLIGWTWYFLEIVFCKRKWEEDRDTVVEGLRRLSDYPEYMWFLLYCEGTRFTETKHRVSMEVAAAKGLPVLKYHLLPRTKGFTTAVKCLRGTVAAVYDVTLNFRGNKNPSLLGILYGKKYEADMCVRRFPLEDIPLDEKEAAQWLHKLYQEKDALQEIYNQKGMFPGEQFKPARRPWTLLNFLSWATILLSPLFSFVLGVFASGSPLLILTFLGFVGAASFGVRRLIGVTEIEKGSSYGNQEFKKKE

SEQ ID NO: 295706 - protein, 255 aa, Artificial Sequence
  derived and/or modified sequence
MGLLAFLKTQFVLHLLVGFVFVVSGLVINFVQLCTLALWPVSKQLYRRLNCRLAYSLWSQLVMLLEWWSCTECTLFTDQATVERFGKEHAVIILNHNFEIDFLCGWTMCERFGVLGSSKVLAKKELLYVPLIGWTWYFLEIVFCKRKWEEDRDTVVEGLRRLSDYPEYMWFLLYCEGTRFTETKHRVSMEVAAAKGLPVLKYHLLPRTKGFTTAVKCLRGTVAAVYDVTLNFRGNKNPSLLGILYGKKYEADMCV

SEQ ID NO: 295707 - protein, 370 aa, Artificial Sequence
  derived and/or modified sequence
MGLLAFLKTQFVLHLLVGFVFVVSGLVINFVQLCTLALWPVSKQLYRRLNCRLAYSLWSQLVMLLEWWSCTECTLFTDQATVERFGKEHAVIILNHNFEIDFLCGWTMCERFGVLGSSKVLAKKELLYVPLIGWTWYFLEIVFCKRKWEEDRDTVVEGLRRLSDYPEYMWFLLYCEGTRFTETKHRVSMEVAAAKGLPVLKYHLLPRTKGFTTAVKCLRGTVAAVYDVTLNFRGNKNPSLLGILYGKKYEADMCVRRFPLEDIPLDEKEGHCWPVAPVTHPEPGATLEAPRREGPGPPTGVWPVKLPAWAVVSWGRRWPPSLGPGARCHGVSCPSSQGCHCCLHRLPPCETLVVWYSATVYQTRTLCEVL

SEQ ID NO: 295708 - DNA, 1131 bp, Artificial Sequence
  derived and/or modified sequence
atgggcctgctggccttcctgaagacccagttcgtgctgcacctgctggtgggcttcgtgttcgtggtgagcggcctggtgatcaacttcgtgcagctgtgcaccctggccctgtggcccgtgagcaagcagctgtacagaagactgaactgcagactggcctacagcctgtggagccagctggtgatgctgctggagtggtggagctgcaccgagtgcaccctgttcaccgaccaggccaccgtggagagattcggcaaggagcacgccgtgatcatcctgaaccacaacttcgagatcgacttcctgtgcggctggaccatgtgcgagagattcggcgtgctgggcagcagcaaggtgctggccaagaaggagctgctgtacgtgcccctgatcggctggacctggtacttcctggagatcgtgttctgcaagagaaagtgggaggaggacagagacaccgtggtggagggcctgagaagactgagcgactaccccgagtacatgtggttcctgctgtactgcgagggcaccagattcaccgagaccaagcacagagtgagcatggaggtggccgccgccaagggcctgcccgtgctgaagtaccacctgctgcccagaaccaagggcttcaccaccgccgtgaagtgcctgagaggcaccgtggccgccgtgtacgacgtgaccctgaacttcagaggcaacaagaaccccagcctgctgggcatcctgtacggcaagaagtacgaggccgacatgtgcgtgagaagattccccctggaggacatccccctggacgagaaggaggccgcccagtggctgcacaagctgtaccaggagaaggacgccctgcaggagatctacaaccagaagggcatgttccccggcgagcagttcaagcccgccagaagaccctggaccctgctgaacttcctgagctgggccaccatcctgctgagccccctgttcagcttcgtgctgggcgtgttcgccagcggcagccccctgctgatcctgaccttcctgggcttcgtgggcgccgccagcttcggcgtgagaagactgatcggcgtgaccgagatcgagaagggcagcagctacggcaaccaggagttcaagaagaaggagtag

SEQ ID NO: 295709 - DNA, 768 bp, Artificial Sequence
  derived and/or modified sequence
atgggcctgctggccttcctgaagacccagttcgtgctgcacctgctggtgggcttcgtgttcgtggtgagcggcctggtgatcaacttcgtgcagctgtgcaccctggccctgtggcccgtgagcaagcagctgtacagaagactgaactgcagactggcctacagcctgtggagccagctggtgatgctgctggagtggtggagctgcaccgagtgcaccctgttcaccgaccaggccaccgtggagagattcggcaaggagcacgccgtgatcatcctgaaccacaacttcgagatcgacttcctgtgcggctggaccatgtgcgagagattcggcgtgctgggcagcagcaaggtgctggccaagaaggagctgctgtacgtgcccctgatcggctggacctggtacttcctggagatcgtgttctgcaagagaaagtgggaggaggacagagacaccgtggtggagggcctgagaagactgagcgactaccccgagtacatgtggttcctgctgtactgcgagggcaccagattcaccgagaccaagcacagagtgagcatggaggtggccgccgccaagggcctgcccgtgctgaagtaccacctgctgcccagaaccaagggcttcaccaccgccgtgaagtgcctgagaggcaccgtggccgccgtgtacgacgtgaccctgaacttcagaggcaacaagaaccccagcctgctgggcatcctgtacggcaagaagtacgaggccgacatgtgcgtgtag

SEQ ID NO: 295710 - DNA, 1113 bp, Artificial Sequence
  derived and/or modified sequence
atgggcctgctggccttcctgaagacccagttcgtgctgcacctgctggtgggcttcgtgttcgtggtgagcggcctggtgatcaacttcgtgcagctgtgcaccctggccctgtggcccgtgagcaagcagctgtacagaagactgaactgcagactggcctacagcctgtggagccagctggtgatgctgctggagtggtggagctgcaccgagtgcaccctgttcaccgaccaggccaccgtggagagattcggcaaggagcacgccgtgatcatcctgaaccacaacttcgagatcgacttcctgtgcggctggaccatgtgcgagagattcggcgtgctgggcagcagcaaggtgctggccaagaaggagctgctgtacgtgcccctgatcggctggacctggtacttcctggagatcgtgttctgcaagagaaagtgggaggaggacagagacaccgtggtggagggcctgagaagactgagcgactaccccgagtacatgtggttcctgctgtactgcgagggcaccagattcaccgagaccaagcacagagtgagcatggaggtggccgccgccaagggcctgcccgtgctgaagtaccacctgctgcccagaaccaagggcttcaccaccgccgtgaagtgcctgagaggcaccgtggccgccgtgtacgacgtgaccctgaacttcagaggcaacaagaaccccagcctgctgggcatcctgtacggcaagaagtacgaggccgacatgtgcgtgagaagattccccctggaggacatccccctggacgagaaggagggccactgctggcccgtggcccccgtgacccaccccgagcccggcgccaccctggaggcccccagaagagagggccccggcccccccaccggcgtgtggcccgtgaagctgcccgcctgggccgtggtgagctggggcagaagatggccccccagcctgggccccggcgccagatgccacggcgtgagctgccccagcagccagggctgccactgctgcctgcacagactgcccccctgcgagaccctggtggtgtggtacagcgccaccgtgtaccagaccagaaccctgtgcgaggtgctgtag

SEQ ID NO: 295711 - DNA, 387 bp, Artificial Sequence
  derived and/or modified sequence
atgggcctgctggccttcctgaagacccagttcgtgctgcacctgctggtgggcttcgtgttcgtggtgagcggcctggtgatcaacttcgtgcagctgtgcaccctggccctgtggcccgtgagcaagcagctgtacagaagactgaactgcagactggcctacagcctgtggagccagctggtgatgctgctggagtggtggagctgcaccgagtgcaccctgttcaccgaccaggccaccgtggagagattcggcaaggagcacgccgtgatcatcctgaaccacaacttcgagatcgacttcctgtgcggctggaccatgtgcgagagattcggcgtgctgggcagcagcaaggtgctggccaagaaggagctgctgtactag

SEQ ID NO: 295712 - DNA, 240 bp, Artificial Sequence
  derived and/or modified sequence
atgggcctgctggccttcctgaagacccagttcgtgctgcacctgctggtgggcttcgtgttcgtggtgagcggcctggtgatcaacttcgtgcagctgtgcaccctggccctgtggcccgtgagcaagcagctgtacagaagactgaactgcagactggcctacagcctgtggagccagctggtgatgctgctggagtggtggagctgcaccgagtgcaccctgttcaccgaccagtag

SEQ ID NO: 295713 - DNA, 1131 bp, Artificial Sequence
  derived and/or modified sequence
atgggtttgctagcattcctgaagacacagttcgtcctacatttactggtgggattcgtgtttgtggtgtctggcctcgtaataaacttcgtccagctgtgcacattggccctgtggcccgtgtcaaaacagctgtatagaaggctcaattgtcggttagcgtatagcttgtggtctcagcttgtcatgcttcttgagtggtggtcctgcaccgagtgcacccttttcactgaccaggctacggtagaaaggtttgggaaggaacacgcagtgattatccttaaccacaacttcgaaattgattttctttgtgggtggacaatgtgcgaacggttcggtgtcttgggttctagcaaagtactggctaagaaggagcttctgtatgtacccttaatcggatggacctggtattttctggaaattgtgttctgtaagagaaaatgggaagaagatagggacaccgtggtggaggggctgcggagactgtcagattaccctgagtacatgtggtttctgctttactgtgaaggcacgcggttcaccgagactaaacatagagtctctatggaagttgcggccgcaaagggtttgccagtgctgaaatatcacttactgccgagaaccaaaggttttaccaccgccgtcaagtgccttagagggactgtggccgccgtctacgacgttacactgaatttcagagggaacaaaaacccctcactgctgggaatcttatatggtaagaaatatgaggcagacatgtgtgtgagacgctttcctctggaggacatacccctggacgagaaagaggccgctcagtggttacacaaactatatcaggagaaggacgccctccaagaaatctacaatcaaaaaggtatgttcccaggggagcaattcaaaccagctcgtcggccatggactctgctgaacttcctgtcctgggctaccatactgctatctccattgttttcatttgttctgggggtcttcgcttctggaagccccctgctgattctgacttttctcgggtttgtcggcgctgcttccttcggggttcgacgcctaatcggtgtgaccgagatcgagaaagggagtagttatgggaaccaggaatttaagaagaaggagtag

SEQ ID NO: 295714 - DNA, 1131 bp, Artificial Sequence
  derived and/or modified sequence
atggggctgttggcattcctgaaaactcagttcgtgcttcatctcctggttggcttcgtctttgtggtgtcaggcctggtgataaacttcgtgcaattatgtacactcgcactatggccagtcagcaaacaactctacagaaggctcaactgccgccttgcatactctttgtggtcacagctcgtaatgcttctggaatggtggtcttgcaccgagtgtaccctgttcactgaccaagctacagtggagagattcggaaaggaacatgccgtgattatactcaaccataacttcgagatcgatttcctgtgcggatggacaatgtgtgagcggttcggcgtgctggggtccagtaaagtgcttgccaaaaaggaactactttatgtgccgctgattggatggacctggtattttttggagatcgtgttttgtaagaggaagtgggaggaggaccgagacactgtcgttgagggcttgaggcgactaagtgactatcctgaatatatgtggttcttgctgtattgcgaaggtaccagattcaccgaaactaagcacagagtcagcatggaggtggccgcggccaagggcttaccagttcttaaatatcacctgttacctagaacaaagggcttcacaacagccgttaaatgcctacgcgggaccgtcgctgctgtctatgacgttacgctgaacttcaggggcaacaagaatcccagtttactgggaatcctgtacggcaagaaatatgaggcggacatgtgtgtacgcaggtttccgctggaggacattcctctcgatgagaaggaagccgcgcagtggttgcataagctatatcaggagaaggacgcgttgcaggaaatctacaatcaaaagggcatgttcccaggtgaacagttcaaaccagcaagaagaccctggacactattgaactttctctcatgggccacaattttgcttagccccttgttctcgtttgtcttaggggtgtttgcaagcggcagcccattactgatcctgacctttctgggtttcgtcggggctgcctcttttggggtacgccgcctgattggagttaccgagatagagaagggttcgtcttatgggaatcaggaatttaaaaagaaggaatag

SEQ ID NO: 295715 - DNA, 1131 bp, Artificial Sequence
  derived and/or modified sequence
atgggcctcctggcttttctgaagacgcaatttgttctgcacctccttgttggatttgtgttcgttgtgtcagggctcgttatcaactttgtgcagctgtgcacactcgccctctggccagttagcaagcagttgtacaggcgactcaactgcagactcgcgtatagcctttggtcccaactggtgatgctgctggaatggtggtcgtgcacagagtgcaccttattcactgatcaggcgactgtggagcgattcgggaaggagcacgcagttatcatcctgaatcataattttgagattgactttctctgcggctggactatgtgtgaaaggtttggcgtgctaggaagctccaaagtgcttgcaaaaaaggagttgttatatgttcctctgatcggatggacctggtacttcctggagattgttttttgtaagcgcaagtgggaggaggacagagatacagtggttgaaggcctcagacgattgtcggactatcctgaatacatgtggtttctgctgtattgtgagggcactagatttactgagacgaaacatcgtgtgtccatggaggtggcagccgctaagggtttgcctgtgctgaaatatcaccttctcccacgaactaaaggtttcacaactgccgtgaaatgccttcgcggcacagtcgccgccgtgtacgacgtgacgttgaattttcgcggcaacaaaaacccaagcctgctgggcattctttacggcaaaaaatatgaggctgatatgtgtgtccggcgctttcccctggaagatatccccctcgacgaaaaagaggctgcacaatggctgcataagttgtatcaagagaaggacgccctgcaggaaatttacaaccagaaaggtatgttccctggagagcagtttaagccagcacgtcgcccatggacactattaaacttcctgagctgggccacaattttactttcgccccttttcagttttgtgcttggggtattcgcaagtggcagtcctctcctgattctgaccttcttggggttcgtgggcgccgcttcttttggtgttcgccgccttatcggggtgacagaaattgagaagggaagcagctatgggaaccaggagttcaaaaagaaggagtag

SEQ ID NO: 295716 - DNA, 1131 bp, Artificial Sequence
  derived and/or modified sequence
atgggtcttctggctttccttaagacgcagttcgttctccacctcctggttggatttgtcttcgtggtttcaggtcttgttatcaattttgtgcagctttgcactctggccctgtggcccgtatccaagcaattataccgtcgtctgaattgccgtctggcctactctctgtggagccagctcgtcatgctcctggagtggtggagctgtactgagtgtacactgttcactgatcaggctactgtggaacgatttggcaaggagcatgcagtaatcatcttgaatcacaactttgaaattgacttcctgtgcggctggaccatgtgcgaacgcttcggcgtactgggcagcagcaaggttctggctaagaaggaactcctctacgtccccttgattgggtggacatggtacttcctggaaatcgttttctgcaagaggaaatgggaagaggacagggacaccgtggtggagggtcttcgccgcttgtctgattacccagagtacatgtggttcctactctactgcgaagggacacgtttcactgagactaaacaccgcgtcagtatggaggtggcagccgcgaaaggcctccccgtgctgaagtatcacctgctccccagaacaaagggattcactactgcggtcaagtgccttaggggcactgtggcagccgtgtacgacgtaacgctgaattttaggggaaataaaaacccctctttactgggaatactctacggcaagaaatacgaggccgacatgtgtgtacgaaggtttcctctcgaagacatccccttggatgaaaaggaagcagcccagtggttgcacaagctctaccaggaaaaggacgctctgcaagagatttacaaccagaaggggatgtttccaggggagcagttcaagcctgccagacgcccctggacgctgctgaatttcctctcctgggccaccatcctcttaagccccttgttcagctttgtcttgggcgtgttcgcgtctggctctcctttgctgatcttgacctttcttggcttcgtaggcgctgcctcattcggtgtcagacggctcataggagtgactgagatcgagaaagggagctcatacgggaaccaggagttcaaaaagaaggagtag

SEQ ID NO: 295717 - DNA, 1131 bp, Artificial Sequence
  derived and/or modified sequence
atggggttattagctttcttaaagacgcaatttgtgcttcacctgcttgtggggtttgtctttgtcgtttccggcctggtgatcaattttgtgcaactatgtactctagcactttggcctgtatcaaagcagctgtaccggagactaaattgccggctagcatactccctgtggtctcagttggtaatgctccttgaatggtggagctgtaccgaatgcaccttattcaccgaccaggcgaccgtggaaaggttcggcaaggagcacgctgtgattatcctaaaccacaattttgagattgattttctatgcggctggacaatgtgtgagcggttcggtgtactcggaagctccaaggtgctggcgaagaaggaactgctttacgtccctctgattggctggacctggtacttcctggagatcgtcttttgcaagcgaaaatgggaggaggatagagacacagttgtagaaggcctgagaaggttatccgattatcccgagtacatgtggttcctactgtactgcgaagggacacgcttcactgagacgaaacatcgtgtgtctatggaagttgctgcagccaagggactacctgtgctgaaataccacctcctgccaaggactaaaggatttacaactgcagtgaagtgtctgcggggcactgtggccgcagtgtatgatgtgaccctgaattttcgcggtaataagaatccgtccttactggggatactttacggcaagaaatacgaggccgacatgtgcgtaagaaggttccctctcgaggatatacccctggacgagaaggaggcagcccagtggttgcacaagctctaccaggagaaagacgctctgcaggagatttacaatcagaaggggatgttccctggtgaacagtttaaacccgcccgtagaccttggaccctcttaaacttcctcagctgggcaacgatcttgttatcaccactctttagtttcgtgctgggagtattcgctagtggctctccattacttattctcacctttctcggttttgtgggggccgcaagctttggcgtaaggaggctgatcggggttacagagatagagaagggttcgagttatggcaatcaagaatttaagaagaaggagtag

SEQ ID NO: 295718 - DNA, 768 bp, Artificial Sequence
  derived and/or modified sequence
atgggccttctggctttcctgaaaacgcaatttgtgctgcacttgttggttggcttcgtgttcgtggtgagcggcctagtaattaatttcgtacagctgtgtaccctggcactttggccagtttcaaaacagctttatagaagactgaactgcaggctggcctattccctgtggagtcaacttgttatgctcctcgagtggtggtcctgtacggagtgcaccttgttcaccgaccaagcgactgtcgagcggtttggaaaagagcatgctgttattattctgaaccacaactttgagatcgattttctctgtggatggactatgtgtgagcgtttcggtgtcctcggcagcagcaaggttctagcaaaaaaagagctgctctatgtgccgctgatcggttggacatggtactttctggagatagttttttgcaaacgcaagtgggaggaagaccgagacacagtggtggaaggactgaggagactatccgattatcctgaatatatgtggttccttctgtattgcgaggggacaaggtttactgaaactaagcacagagtctctatggaagtggcagctgcgaaaggtctgcctgtgctcaaataccacttgctgccccggacaaaaggtttcactaccgccgtcaaatgcctgagggggactgtggcagcagtgtacgatgtgaccctgaactttcgcggaaacaagaatcctagcctgctcggaattctctacggcaagaagtatgaggccgatatgtgcgtgtag

SEQ ID NO: 295719 - DNA, 1113 bp, Artificial Sequence
  derived and/or modified sequence
atgggactgctagcgttcttaaaaacccaattcgtgctacacttacttgtcgggttcgtgttcgtggtgtcagggctcgttattaatttcgttcaactttgtacactggcgttatggcccgtgtctaaacagctgtataggcggttaaattgccggttggcatatagtctctggagccagttggtcatgctcttggagtggtggtcatgcactgagtgtaccctgtttactgaccaggcaacggtcgagaggtttggaaaggaacacgccgttatcatcctgaatcataacttcgaaattgacttcctctgtggttggaccatgtgcgaaagattcggggtgctcggcagttccaaagtgctcgccaagaaggaactgctgtacgtgccactgatagggtggacttggtactttctggagatagtgttttgtaagcgcaaatgggaggaagacagagacaccgtggttgaaggactgcgcaggctgtcagattaccctgagtacatgtggttcttgttgtactgcgaaggtacacgctttacagagacaaagcaccgggtgtccatggaagtcgcagccgcaaagggactgcctgtgttaaaatatcatcttctgccgaggaccaagggtttcaccaccgcagtgaagtgcttaagaggcaccgtggctgctgtgtatgacgtgacactaaatttccgaggcaacaaaaacccctccctgctgggtatcctctacggaaaaaaatatgaggctgatatgtgtgtgcgccggttcccgctggaagacattccccttgatgagaaagagggacactgctggcccgtggctccggtgacgcatcccgagccaggtgcaaccctggaggccccccgccgtgagggccccggaccccccaccggtgtgtggcctgtaaaactgccagcctgggctgtggtatcttggggacggaggtggcccccatccctcgggcctggggcccggtgccatggggtgagttgccccagcagccaggggtgtcattgttgtctccaccggctgcctccttgcgagacgttagtggtgtggtattccgccaccgtctaccagacacggacgttgtgtgaagttctgtag

SEQ ID NO: 295720 - DNA, 387 bp, Artificial Sequence
  derived and/or modified sequence
atgggtctcctggcctttctcaaaacacagttcgtactacatcttcttgtcgggttcgtatttgtggtctccggactcgtgatcaactttgtgcaactgtgtacactcgccctttggccggtgtcaaaacagctgtaccggcggctaaactgtcgcctggcatattccctgtggtcccagctggtgatgttgctggaatggtggtcatgcaccgaatgtaccctgtttacggatcaggctactgtagaacgattcggaaaagagcacgcagtcattatcctaaaccacaacttcgagatcgatttcctgtgtgggtggactatgtgcgaaagatttggagtccttgggagcagcaaagtgctcgctaaaaaagagctgttgtactag

SEQ ID NO: 295721 - DNA, 240 bp, Artificial Sequence
  derived and/or modified sequence
atgggcctcctcgccttcctgaagacacaattcgtgcttcacctgctggtaggttttgtgtttgttgtgtccggactggtcatcaactttgtgcagctctgtacactggccctgtggcctgtttctaagcaactttatcgccggcttaattgccgactggcatactccttatggagccagctggtcatgctgctggagtggtggagctgtactgaatgcacactgttcacagaccagtag

SEQ ID NO: 295722 - DNA, 768 bp, Artificial Sequence
  derived and/or modified sequence
atgggactgctagccttcttgaagacccaattcgtgctgcacctgctagtgggctttgtttttgtcgtaagtggtcttgtgattaattttgttcaactatgtacccttgccttgtggcctgtttcaaaacaactgtatagaaggctcaattgccgacttgcatacagtctctggtcacagttagtcatgctgctggagtggtggtcctgcacggagtgtaccttatttactgaccaggccacagtcgagagatttgggaaagaacatgcagttattattctcaaccacaatttcgagatcgatttcctttgcggatggacaatgtgcgaacggttcggcgttctcggcagtagtaaggttctggctaaaaaagagctgctatatgtgccgcttattgggtggacatggtacttcctggagatagtgttttgcaaacgcaagtgggaggaagacagggataccgtggtagaagggctgcgaagactgagcgattatcccgagtacatgtggtttctcttgtattgcgaggggacacggttcacagaaaccaaacatcgggtgtcaatggaagtggctgctgcaaagggattgccagtgctcaaataccacctcctgccgagaaccaagggctttacaactgctgtgaagtgcttacgcggaactgtggcagcggtgtacgacgtgactcttaattttaggggtaataagaacccttcccttttgggaattttgtatgggaagaagtacgaggcggacatgtgcgtctag

SEQ ID NO: 295723 - DNA, 1131 bp, Artificial Sequence
  derived and/or modified sequence
atgggtctgctggcttttttgaagacacagttcgtgctccaccttcttgtcgggttcgtttttgttgtgtcaggattggtaataaatttcgtccaactgtgtacactcgcactttggcccgtctccaagcagctgtacagacggctcaattgccgcctagcatacagtctttggagtcaattagtgatgctgcttgaatggtggagctgcacagagtgtacgttgtttaccgaccaggcaacagtcgaaagattcggcaaggagcatgctgtaattattttgaatcacaactttgagatcgattttctctgtgggtggactatgtgtgagagatttggggtgcttgggtcctcaaaggttctggccaagaaggaacttctgtacgtgcctctgataggctggacctggtacttcttagaaatcgtgttttgtaagcggaagtgggaagaggaccgggacactgtggtcgaaggactgcgtcgcttgtctgactacccggaatatatgtggtttctgctctactgtgagggcacaagatttacggaaacgaaacacagggtctcaatggaagttgcggcggcaaaaggactgcccgtcctcaagtatcatctgctcccgaggactaaaggttttaccaccgcggtcaagtgtctgcggggcaccgtggccgcagtctacgatgtgactctgaattttaggggaaacaaaaaccctagtttgctcggcattctatatggcaagaaatatgaagctgacatgtgcgtaagacgtttccccctggaggatattccacttgacgaaaaagaagcagctcagtggctgcacaaactgtatcaggaaaaagatgccctgcaggaaatctataaccagaagggcatgtttcctggagaacagtttaagcccgccaggaggccctggactctgctcaactttctctcgtgggcaacgatactcctcagtccactcttttctttcgtattaggggtctttgcttcggggagccccctgcttattttgaccttcctgggctttgtaggggccgcctcatttggagttaggcggctcatcggtgtcacagagattgaaaaaggttcatcctatggaaaccaggaatttaaaaagaaagagtag

SEQ ID NO: 295724 - DNA, 1131 bp, Artificial Sequence
  derived and/or modified sequence
atgggcctgctggccttcctgaagacccagtttgtgctgcacctgctggtgggctttgtgtttgtggtgtctggcctggtgatcaactttgtgcagctgtgcaccctggccctgtggcctgtgtccaagcagctgtacagaaggctgaactgccgcctggcctacagcctgtggagccagctggtgatgctgctggagtggtggagctgcacagagtgcaccctcttcacagaccaggccaccgtggagagatttgggaaggagcacgccgtcatcatcctgaaccacaactttgaaattgacttcctgtgtggctggaccatgtgtgagcgcttcggcgtgctgggcagcagcaaggtgctggccaagaaggagctgctgtatgtgcccctcatcggctggacctggtacttcctggagatcgtgttctgcaagaggaagtgggaggaggaccgggacacagtggtggagggcctgcggcggctgagtgactacccagagtacatgtggttcctgctgtactgtgagggcacccgcttcacagagaccaagcaccgggtgtccatggaggtggccgccgccaagggcctgcctgtgctgaagtaccacctgctgcccaggaccaagggcttcaccacagctgtgaagtgcctgcggggcaccgtggccgctgtgtatgatgtgaccctgaacttccggggcaacaagaaccccagcctgctgggcatcctgtatggcaagaagtatgaagctgacatgtgtgtgcggcgcttccccctggaggacatccccctggatgagaaggaggccgcccagtggctgcacaagctgtaccaggagaaggatgccctgcaggagatctacaaccagaagggcatgtttcctggagagcagttcaagccagcccggcggccctggaccctgctgaacttcctgtcctgggccaccatcctgctgagccccctcttctcctttgtgctgggcgtgtttgccagcggcagccccctgctgatcctgaccttcctgggctttgtgggcgccgccagctttggagtgagaagactcatcggcgtgacagaaattgagaagggcagcagctatggcaaccaggagttcaagaagaaggagtag

SEQ ID NO: 295725 - DNA, 768 bp, Artificial Sequence
  derived and/or modified sequence
atgggcctgctggccttcctgaagacccagtttgtgctgcacctgctggtgggctttgtgtttgtggtgtctggcctggtgatcaactttgtgcagctgtgcaccctggccctgtggcctgtgtccaagcagctgtacagaaggctgaactgccgcctggcctacagcctgtggagccagctggtgatgctgctggagtggtggagctgcacagagtgcaccctcttcacagaccaggccaccgtggagagatttgggaaggagcacgccgtcatcatcctgaaccacaactttgaaattgacttcctgtgtggctggaccatgtgtgagcgcttcggcgtgctgggcagcagcaaggtgctggccaagaaggagctgctgtatgtgcccctcatcggctggacctggtacttcctggagatcgtgttctgcaagaggaagtgggaggaggaccgggacacagtggtggagggcctgcggcggctgagtgactacccagagtacatgtggttcctgctgtactgtgagggcacccgcttcacagagaccaagcaccgggtgtccatggaggtggccgccgccaagggcctgcctgtgctgaagtaccacctgctgcccaggaccaagggcttcaccacagctgtgaagtgcctgcggggcaccgtggccgctgtgtatgatgtgaccctgaacttccggggcaacaagaaccccagcctgctgggcatcctgtatggcaagaagtatgaagctgacatgtgtgtgtag

SEQ ID NO: 295726 - DNA, 1113 bp, Artificial Sequence
  derived and/or modified sequence
atgggcctgctggccttcctgaagacccagtttgtgctgcacctgctggtgggctttgtgtttgtggtgtctggcctggtgatcaactttgtgcagctgtgcaccctggccctgtggcctgtgtccaagcagctgtacagaaggctgaactgccgcctggcctacagcctgtggagccagctggtgatgctgctggagtggtggagctgcacagagtgcaccctcttcacagaccaggccaccgtggagagatttgggaaggagcacgccgtcatcatcctgaaccacaactttgaaattgacttcctgtgtggctggaccatgtgtgagcgcttcggcgtgctgggcagcagcaaggtgctggccaagaaggagctgctgtatgtgcccctcatcggctggacctggtacttcctggagatcgtgttctgcaagaggaagtgggaggaggaccgggacacagtggtggagggcctgcggcggctgagtgactacccagagtacatgtggttcctgctgtactgtgagggcacccgcttcacagagaccaagcaccgggtgtccatggaggtggccgccgccaagggcctgcctgtgctgaagtaccacctgctgcccaggaccaagggcttcaccacagctgtgaagtgcctgcggggcaccgtggccgctgtgtatgatgtgaccctgaacttccggggcaacaagaaccccagcctgctgggcatcctgtatggcaagaagtatgaagctgacatgtgtgtgcggcgcttccccctggaggacatccccctggatgagaaggagggccactgctggcctgtggcccctgtgacccaccctgagcccggggccaccctggaggccccccggcgggagggccctggccccccaactggagtgtggcctgtgaagctgcctgcctgggccgtggtgtcctggggccgccgctggccacccagcctgggccctggggcccgctgccacggcgtgtcctgccccagcagccagggctgccactgctgcctgcaccggctgcccccctgtgagaccctggtggtgtggtacagcgccaccgtgtaccagaccaggaccctgtgtgaggtgctgtag

SEQ ID NO: 295727 - DNA, 387 bp, Artificial Sequence
  derived and/or modified sequence
atgggcctgctggccttcctgaagacccagtttgtgctgcacctgctggtgggctttgtgtttgtggtgtctggcctggtgatcaactttgtgcagctgtgcaccctggccctgtggcctgtgtccaagcagctgtacagaaggctgaactgccgcctggcctacagcctgtggagccagctggtgatgctgctggagtggtggagctgcacagagtgcaccctcttcacagaccaggccaccgtggagagatttgggaaggagcacgccgtcatcatcctgaaccacaactttgaaattgacttcctgtgtggctggaccatgtgtgagcgcttcggcgtgctgggcagcagcaaggtgctggccaagaaggagctgctgtactag

SEQ ID NO: 295728 - DNA, 240 bp, Artificial Sequence
  derived and/or modified sequence
atgggcctgctggccttcctgaagacccagtttgtgctgcacctgctggtgggctttgtgtttgtggtgtctggcctggtgatcaactttgtgcagctgtgcaccctggccctgtggcctgtgtccaagcagctgtacagaaggctgaactgccgcctggcctacagcctgtggagccagctggtgatgctgctggagtggtggagctgcacagagtgcaccctcttcacagaccagtag

SEQ ID NO: 295729 - DNA, 1131 bp, Artificial Sequence
  derived and/or modified sequence
atgggcctgctggccttcctgaagacccagttcgtgctgcacctgttggtgggctttgtgtttgtcgtttccgggctggtgatcaattttgtgcagttgtgcaccttggccctgtggcccgtctcgaaacagctctatcgcaggctgaattgccgactagcttattcactttggagccaactggtgatgcttctggagtggtggtcgtgcaccgagtgtacactgttcaccgatcaagcgactgttgaaagattcggcaaagagcatgctgtgattatcttgaaccacaatttcgagattgatttcctctgcggctggacaatgtgtgagcgttttggtgtactaggctcctccaaagtcctggccaagaaagagctactttacgtgcctctgatcggctggacgtggtatttcctggagatcgtgttttgtaaaaggaaatgggaggaggatcgggataccgttgtcgaggggctccgccgcctgagcgactatcctgagtacatgtggttcttactgtattgcgagggaactcgtttcactgagacgaagcatagggtatctatggaagttgctgctgctaaggggcttcccgttttgaaataccatctgctccctcgtactaagggcttcaccacggccgtgaaatgcctacgcggtacagtagctgccgtgtatgatgtaaccctgaacttcaggggcaacaaaaatccctcgttgctgggtattctgtacggtaagaagtatgaagctgatatgtgcgtacgccgatttcccctggaagatatccctctggatgagaaagaggctgcccagtggttgcacaagctgtatcaggaaaaagacgcactgcaggagatctacaaccagaaggggatgttcccgggggaacaatttaagcccgctcggcgcccatggacactgctaaacttccttagttgggctacaattctgctgtcccctcttttctcttttgtgctcggtgtgtttgcttccgggtcaccgctgctaattctcacgttcctgggattcgtgggggctgccagctttggtgtgagaaggcttatcggagttacagaaatcgagaaaggctctagttacggcaatcaggagttcaaaaaaaaggaatag

SEQ ID NO: 295730 - DNA, 1131 bp, Artificial Sequence
  derived and/or modified sequence
atgggcctgctggccttcctgaagacccagttcgtgctgcacctgttagtaggcttcgtcttcgtggtctcaggtttggtgattaattttgtgcagctgtgcacgctagcgctgtggcccgtgagcaagcagctttatcgccgcctgaactgccggttggcctattctctgtggtcccagctggtgatgttgctagaatggtggagctgtactgagtgcaccctctttaccgaccaggcaactgtagaaaggttcggcaaagaacacgctgtgattattctgaatcacaatttcgagattgatttcctgtgcggctggacaatgtgcgaacggtttggggtgctcggttcgtcaaaagtgctggccaaaaaggagctcctgtacgtccctctcatagggtggacctggtatttcctggaaatcgtgttctgtaagcgaaagtgggaggaggatagggacaccgtggtagaggggctgagacggctctctgactacccagaatatatgtggttcctgctgtattgtgaaggcacgcggtttactgagacaaaacatcgagtcagcatggaggtggctgctgctaagggtctgcccgtcctgaagtatcatctactccccagaacgaagggatttacaactgcagttaaatgccttaggggcacagtggcagctgtctatgatgtcaccctgaacttccgcggaaataagaatccatcattactgggcatcctctatggcaaaaaatatgaagccgacatgtgtgtccgcagattccccctggaggacatacctttggacgaaaaggaagcagcacagtggcttcacaaactataccaggagaaagacgccctccaggagatatataaccagaaaggcatgttcccaggggaacagttcaagccggctaggcgtccatggaccctccttaattttctgtcctgggccaccattttactcagcccactgtttagctttgtgctcggcgttttcgctagtggcagcccattgttgattctcactttcttgggtttcgtgggggccgccagtttcggcgtcagaagactgatcggagtgacagagatagaaaaaggatcctcatacggaaatcaggaatttaagaaaaaagagtag

SEQ ID NO: 295731 - DNA, 1131 bp, Artificial Sequence
  derived and/or modified sequence
atgggcctgctggccttcctgaagacccagttcgtgctgcacctgctcgtaggcttcgttttcgtggtgagcggtctggtaattaacttcgtacaactgtgtaccctcgctctctggccggtcagtaaacaactataccggcggctaaattgccgacttgcctatagcctatggagccaactcgtgatgctccttgaatggtggtcctgcactgagtgcactcttttcacagaccaggctacagtggaaaggttcggaaaggagcacgcagtgattatcctgaatcacaatttcgagatcgatttcctctgcggttggactatgtgcgaacgcttcggagtcttggggagctccaaggtactagccaaaaaggaactcctctacgtgccactgatagggtggacgtggtacttcctagaaatcgtgttttgcaaacggaaatgggaggaggatcgagataccgtggttgaaggcctgcggagactgtcagattacccggagtatatgtggtttctgctgtattgcgagggaactaggtttactgaaactaaacaccgtgtttccatggaggtggctgccgcaaagggcctgccagtgctgaaataccacctgctccctcggacaaaaggtttcaccaccgctgtgaagtgccttcgaggtactgtggctgcagtctacgacgtgactcttaacttcagaggtaataaaaacccctcccttctagggatattgtacgggaagaaatatgaggccgatatgtgcgtcagacgtttccccctcgaggatatcccgttggatgaaaaagaggccgcccagtggctgcacaagttgtaccaggagaaggacgcactgcaggagatatataaccagaaagggatgtttcccggggaacagttcaagccggcccggagaccctggacactgctcaattttctgagctgggcaactatcctgctctctccactgttcagttttgtcctgggggtcttcgcatcagggagccccctgcttatacttaccttcctaggatttgtgggcgctgcctctttcggcgtgcggcggctgatcggggttacggagatcgaaaagggaagtagctatggaaatcaagagtttaaaaagaaggaatag

SEQ ID NO: 295732 - DNA, 1131 bp, Artificial Sequence
  derived and/or modified sequence
atgggcctgctggccttcctgaagacccagttcgtgctgcacctgcttgtcggtttcgtttttgttgtctccgggctggtgataaatttcgtccagttgtgcacactcgcactatggccggtaagtaagcagttgtatcgccgcctaaactgccggctggcctattcactatggtcccagttggttatgctcctggagtggtggtcgtgtactgaatgtaccctcttcaccgaccaggccaccgtggagcggttcggtaaggagcatgcagtcatcatcctgaaccacaacttcgagattgatttcctatgtgggtggacgatgtgcgagcgcttcggggttttggggtcttccaaagttctcgctaagaaggagttgctctatgtgcccttaatcgggtggacctggtattttctggagatcgtgttctgcaaacgtaagtgggaagaggacagggatacagtagttgaaggcctcagacggttgtccgattatcccgaatacatgtggttcctattatactgcgaagggaccagattcacagaaaccaagcacagagtttccatggaggtggcagctgctaaaggacttcctgtgctgaagtaccatttactgcctcggactaaaggattcactactgcagttaagtgtctcaggggcaccgtggcggccgtgtatgatgtgacattaaacttccgtggcaataaaaacccgtcccttcttggtatcctgtacggaaagaagtacgaggctgatatgtgtgtgcggagatttcctctcgaggacatccctctggatgagaaagaggctgcccaatggctacacaaactgtatcaagagaaggatgccctccaagagatctacaaccagaaaggaatgttcccaggggaacagttcaagcccgctagacggccatggacactgttaaattttttgagctgggctacgatcctcttgagtcctctcttctcttttgtcctgggagtgttcgctagtgggtccccacttctcatcctaacattcctaggatttgtgggcgcagcctccttcggtgtgaggaggttaataggggttacggagatcgagaaggggtccagttatggtaatcaggaattcaaaaaaaaggagtag

SEQ ID NO: 295733 - DNA, 1131 bp, Artificial Sequence
  derived and/or modified sequence
atgggcctgctggccttcctgaagacccagttcgtgctgcacctgctcgtcggatttgtcttcgttgtgagcggcctggtcatcaacttcgtgcagctgtgtaccctggccctttggccagtgtcaaaacagttgtataggcggttgaactgtcggttagcgtactccctctggagccaactagtcatgctcttggaatggtggtcttgtacggaatgcaccctattcaccgaccaggccactgtggagaggttcggtaaggagcacgccgttatcatattaaaccacaattttgagatcgatttcctgtgtggatggactatgtgcgagcggttcggtgtactcggcagttctaaagtgctggccaaaaaggaacttctgtacgtgcctttgataggctggacttggtattttctagaaatcgttttttgcaaaagaaagtgggaggaggatcgcgataccgtggtggagggtcttagacgactatctgactacccagagtacatgtggtttctcctgtactgtgagggcactcgattcaccgagaccaagcaccgcgtgtctatggaggtggcagccgccaagggcctccctgtactgaagtaccacctgctgcctcggactaagggatttaccaccgccgtgaaatgcctgaggggaacagtagcagctgtttatgacgtcactctcaattttagagggaataagaacccaagcctcctgggaattctatacggaaagaagtacgaagccgatatgtgtgtccggaggtttcctctggaggacatcccactggacgagaaggaggcagctcagtggctgcataaactgtatcaggaaaaggacgcattgcaagaaatctacaaccaaaaaggtatgttccccggagagcagtttaaacccgctagacgtccctggaccttactcaatttcctctcctgggccactatactgctcagccctctgtttagctttgtgctgggggtgtttgcctcaggctcacccctactgatactcactttcctgggcttcgtgggggctgcatcatttggcgtgaggaggcttatcggggttacagagatcgagaaaggatcctcatatggtaatcaggagttcaagaagaaagaatag

SEQ ID NO: 295734 - DNA, 768 bp, Artificial Sequence
  derived and/or modified sequence
atgggcctgctggccttcctgaagacccagttcgtgctgcacctgctggtgggattcgtgttcgtggttagcggcctcgtcatcaattttgtgcagttatgcacgctggctctgtggcctgtgagcaaacagctctatcgcaggcttaattgtcgtctggcctatagtctgtggtctcagttggtcatgcttcttgagtggtggtcgtgcaccgagtgtaccctgttcaccgatcaggccactgtggaaaggttcgggaaggagcatgccgttatcattctgaaccataactttgagatcgatttcctgtgtggctggactatgtgcgagaggtttggcgtgctcggctcatccaaggtgctggcaaaaaaggagctcctgtatgtgccattaatcgggtggacctggtattttttggaaatcgtgttttgcaagcgcaagtgggaggaagacagagacactgtcgtcgaaggcctccggcggctctccgactacccggagtatatgtggtttctgctgtactgtgagggcactcgcttcactgagacaaagcaccgagtatctatggaggtggccgccgcaaaaggcctgccggtcttaaagtatcaccttctcccgagaacaaagggatttacaaccgctgttaaatgcctcagaggcacagtggccgctgtctacgatgtgaccctcaacttcagaggtaataagaacccatctcttctgggcatcctgtatggcaagaaatatgaggcggatatgtgcgtgtag

SEQ ID NO: 295735 - DNA, 1113 bp, Artificial Sequence
  derived and/or modified sequence
atgggcctgctggccttcctgaagacccagttcgtgctgcacctgctcgtagggttcgtgtttgtggtgtccggactggtaataaattttgtccaattgtgtaccctcgcactgtggccagtgtctaaacaactttatagacggcttaattgccgtctggcttatagcttatggtcacagctggtgatgctgctggagtggtggagctgcaccgaatgcactttgtttaccgaccaggccaccgtggagaggttcgggaaggaacatgccgtgatcatcctcaatcacaactttgaaatagactttctctgtgggtggaccatgtgcgaaaggtttggcgtcctgggctcttctaaagtgcttgcaaagaaggagcttctatacgtgccgttaatcggctggacatggtacttccttgagatcgtgttctgcaagaggaaatgggaagaggacagagatacagttgtggagggacttaggaggctatccgactaccccgaatatatgtggttccttctatattgcgaagggacgcggttcaccgagacaaagcaccgcgtcagcatggaggtagccgccgccaaaggcctgcctgtgctcaagtatcatctgctcccacggaccaaggggttcacaacagcagtgaagtgcctaagaggtaccgttgcagctgtgtatgacgtcacccttaattttagaggcaataaaaacccctccctgcttggcatcttgtatggtaagaagtacgaggccgacatgtgcgttagacgattccccttggaagacatcccccttgacgagaaggaggggcactgttggcctgtcgccccagtcactcatccagagcctggcgccactcttgaagcgccccgccgcgaaggtccagggcctccgaccggggtttggccagtcaagctgcctgcttgggcggtggtgagctggggcagacgttggcctccctccctcggaccaggggcccggtgtcatggcgtcagttgtccctcttcccaaggatgtcactgctgccttcatagactgcccccttgtgaaactctggtggtatggtactcggccactgtgtatcagaccagaactttatgcgaggtactgtag

SEQ ID NO: 295736 - DNA, 387 bp, Artificial Sequence
  derived and/or modified sequence
atgggcctgctggccttcctgaagacccagttcgtgctgcacctgctcgtgggcttcgtctttgttgtgagcggtctagtgataaattttgtgcaactttgcacgctggcactctggcccgtcagcaagcagctctaccgacgcctgaattgccgtctggcctattccctttggtcgcagctcgtgatgctcttggagtggtggtcctgcacggagtgcacactgttcactgaccaggcaacagtggagagattcggaaaggagcacgcggtgattatcttaaatcataattttgaaattgatttcctatgcggatggaccatgtgcgagcgattcggggtcctggggtcttcaaaagttctcgctaagaaagagttgttgtattag

SEQ ID NO: 295737 - DNA, 240 bp, Artificial Sequence
  derived and/or modified sequence
atgggcctgctggccttcctgaagacccagttcgtgctgcacctgcttgtcgggttcgtgttcgtggtttctggcctggtgattaatttcgtgcagctgtgtactctggccttatggcctgtgtctaagcaactctacaggcgcctgaactgccgtctggcttattcgctgtggtcccaattggtcatgctgctggagtggtggtcttgtaccgaatgtacactgtttaccgaccaatag

SEQ ID NO: 295738 - DNA, 768 bp, Artificial Sequence
  derived and/or modified sequence
atgggcctgctggccttcctgaagacccagttcgtgctgcacctgctggtcgggtttgtgttcgttgtctccgggctggttataaactttgtccagctgtgtaccctagcactctggccagtttcaaaacaactataccgccgactgaattgtcggctagcctattccctctggagccagctggtgatgctgctggaatggtggtcctgcaccgaatgcactctgttcacagaccaggcgactgtggagcgattcggcaaggagcatgccgtgataatcctgaatcataattttgagattgacttcctgtgcggttggacaatgtgtgagcgcttcggagtgctgggcagcagcaaagtgttggctaagaaggagctgctgtatgtgcctctgattggctggacatggtactttttggagatcgtgttttgcaaaaggaagtgggaggaggatcgggatactgtggttgaaggactgcggcggttgtcggattacccggagtacatgtggtttttactctattgcgaaggcacccgattcaccgaaaccaagcacagggtgagtatggaggtggcggccgccaaggggttgcccgttttgaaatatcatttactcccaagaacgaaaggctttaccacagctgttaaatgtctccgaggcaccgtggccgctgtgtatgatgtaaccctgaatttccgaggtaataaaaacccatcattacttggtatactctacgggaagaaatacgaagctgatatgtgcgtttag

SEQ ID NO: 295739 - DNA, 1131 bp, Artificial Sequence
  derived and/or modified sequence
atgggcctgctggccttcctgaagacccagttcgtgctgcacctgctcgtcggattcgtttttgttgtgagtggtctggtgattaatttcgtccagctgtgtaccttggcgctgtggccggtgagcaaacaactgtaccgccgcctgaactgtaggctggcctacagtctgtggtcacaactcgtgatgctattggagtggtggtcctgcaccgagtgtacattgtttacagatcaagcgacagttgagaggttcggcaaagagcacgccgtaattatccttaaccacaatttcgagattgactttctgtgtggctggacaatgtgtgaacgtttcggggtgctgggctcttcaaaagtgttggctaagaaggaactgctgtatgttccactgattgggtggacttggtatttcctggagatcgtgttctgcaaaagaaaatgggaggaggaccgagatacggtggtcgagggactcaggagactgagtgactatccagagtacatgtggttccttttgtattgtgaggggacccgattcaccgagactaagcaccgggtgtctatggaggtggcggcggctaagggattgcccgtcttgaagtaccacctcttgccacgtactaagggatttacgaccgcagtgaagtgtttacggggcaccgtcgcagcagtgtacgatgtgaccctcaattttcgcggcaataaaaatccttccctgctgggaatactgtatgggaagaagtacgaagccgacatgtgcgtaaggcgattccccttggaagatatccctctcgacgagaaagaagccgctcagtggctgcataagctctaccaagagaaagatgctctccaagagatctacaaccagaagggcatgttccccggcgaacagttcaagcctgctagacggccatggacgttactgaacttcctgagctgggcgaccatcttgctctctcccctcttctccttcgtactcggggtctttgctagcggaagtcccttactgattctgactttcttgggattcgtcggcgccgctagcttcggagtccgacgcctcattggcgtgaccgaaattgagaaagggtcatcttatggcaaccaggagttcaaaaagaaagagtag

SEQ ID NO: 295740 - DNA, 1131 bp, Artificial Sequence
  derived and/or modified sequence
atgggcctgctggcattcttgaagacgcagttcgtcctccacttattggtggggttcgtgttcgttgtaagtggcctggttataaacttcgtgcagctgtgcacacttgctctctggccggtctccaagcaactgtacaggagactgaattgtcggttggcttactctctctggtcccaactggttatgctgctggagtggtggtcgtgcaccgaatgcacattgtttactgatcaggctacagtggagagatttggaaaggagcacgctgttataatcttgaatcacaacttcgaaatagactttctatgtggctggactatgtgcgagcgatttggagtcctgggctcatccaaagtgctggccaaaaaagaactgctctatgtcccactgatcggctggacatggtatttcttagagattgtcttctgtaagcggaagtgggaggaggatcgggacactgtggttgaaggactgcggaggttgtccgattatccagaatacatgtggttcctgctttactgcgagggcaccagattcactgagaccaaacacagggtgagcatggaggtcgccgctgcaaaaggactcccggtcctcaagtaccaccttttgccaagaaccaagggctttactaccgcggtgaagtgcttaaggggaaccgtcgcagccgtgtatgatgttacgcttaatttccggggtaataaaaacccctctttactcggcatcctgtacggtaaaaaatatgaagcagatatgtgcgtgaggagatttccactcgaagatatccccctggatgagaaggaggccgcacagtggttgcataaactatatcaggagaaagatgcactccaagagatttataatcagaaagggatgtttccgggtgaacagttcaagcccgcaagaagaccctggacattgctcaacttcctctcttgggcaacaatccttctttcccctctgttttcttttgtgttgggcgtattcgcctcgggcagccccctgctaatcctgactttcttaggcttcgtgggggcagcctctttcggagtacggagactgatcggagtgactgagattgagaagggttcctcttatggaaatcaggagttcaaaaagaaagaatag

SEQ ID NO: 295741 - DNA, 1131 bp, Artificial Sequence
  derived and/or modified sequence
atgggcctccttgcattcctgaaaacacagttcgtgctgcatttgctagtgggcttcgttttcgttgtgtcaggactcgtgatcaattttgtgcagttgtgcacactcgctctgtggcctgtgtcgaagcagctttacaggcggttgaattgccgacttgcatacagcctctggtcacagttggttatgctgctggagtggtggagctgtaccgaatgcactttgttcactgatcaggccactgttgagcggttcgggaaggagcacgctgttatcatcctgaaccataatttcgaaatcgacttcctgtgcggttggactatgtgtgagagattcggagtacttggcagctcaaaggtgctggccaaaaaagagctcctctacgttccactgataggctggacatggtattttttagaaatagtcttctgcaaacgtaaatgggaggaagatcgggatacagttgttgagggactgaggcgcctgagtgactatcccgaatacatgtggttcctcctttactgcgaagggaccaggtttaccgaaacaaagcatcgcgtcagtatggaggtcgccgctgccaagggactgcctgtgctgaaatatcacctgctgcccagaactaaaggatttacgaccgcagtcaagtgcctgcgtggcactgtggcagccgtgtatgacgtcaccctgaattttaggggtaacaagaatccgagcctgctggggatcctctatggaaagaagtacgaggctgacatgtgtgtgaggaggttccctttggaagacattcccctggacgaaaaagaagccgctcagtggctccacaaactctatcaggaaaaggatgctctccaggaaatttataaccaaaaagggatgtttccaggcgaacagttcaaacccgcaaggcggccatggacactgctgaactttttgtcatgggccaccatcctcttatcccccctgtttagtttcgtactgggagttttcgcctccggttcaccactcctgatactaacatttctggggttcgtcggtgccgcttctttcggtgtgaggcgtctgatcggggtgacagagattgagaagggttcatcatacggcaatcaggagttcaaaaaaaaagaatag

SEQ ID NO: 295742 - DNA, 1131 bp, Artificial Sequence
  derived and/or modified sequence
atggggttgttggccttcctgaagacgcaattcgtcctccatttgctcgtgggcttcgtttttgtcgtttctggcttggtcatcaatttcgttcagctctgcacactggctctgtggccagtatcgaagcagctctacaggagactgaactgcagactcgcctactccctgtggagccagctggtaatgctgctggagtggtggagttgcacagaatgcacactttttaccgatcaggccactgtggagcggttcggaaaggaacatgccgtcattatacttaatcataatttcgagattgacttcttatgtggatggaccatgtgcgagcgcttcggtgttctgggcagtagcaaggtgcttgcaaagaaggagttgctgtacgtgcctctaattggctggacctggtacttcctggaaattgttttctgtaagcgaaaatgggaagaggaccgagacaccgttgtggagggcctgcgaagactgtctgactaccccgaatacatgtggttcttgttgtactgcgagggtacccggttcacagagacaaagcatcgggttagcatggaagtggccgctgctaagggcctgcctgtgcttaagtaccacctcctgcctcggaccaaaggttttacgactgccgtaaaatgcctgaggggaacagtagcagctgtgtatgacgtaacgctgaactttagggggaataagaatccttcgttgttggggatcctgtacggaaagaagtatgaggcagacatgtgtgtccgcagatttcccttagaggatatccccctggatgagaaagaggccgctcaatggctccataaactgtaccaagaaaaggacgccttgcaggagatttacaatcagaaggggatgtttcctggcgagcagttcaagcccgcaaggaggccatggactcttctgaacttcctctcctgggcaactattctattgtccccacttttctcatttgttctgggtgtgttcgctagcgggagccctctgcttattctgacgttcctcggcttcgtaggtgcagcatcattcggggtccgtcgactgataggagttactgaaatcgagaagggatcttcatacggtaaccaggagtttaagaaaaaggaatag

SEQ ID NO: 295743 - DNA, 1131 bp, Artificial Sequence
  derived and/or modified sequence
atggggttgctggcttttctgaagacacagtttgtgctccacctgctcgtgggattcgtattcgtggtttccggacttgtgatcaacttcgtccagttatgcaccctagccctctggcctgtatccaagcagctctacaggcggctgaactgtagattagcctactcactgtggtcacagctggtgatgcttctggagtggtggtcctgcacggagtgtactttgtttacggatcaggccacggtcgaaagatttggtaaggagcacgccgtgattatcctgaaccacaactttgaaattgactttttgtgtgggtggaccatgtgcgagaggttcggtgtcctaggatccagcaaggtgttggctaagaaggaactactttacgtccccctgattggatggacctggtacttcctcgagatcgtgttttgtaagcgaaagtgggaggaagaccgtgacactgttgttgagggcctcaggcggttatcagactacccggagtacatgtggtttctgctgtattgtgaaggaacccgcttcacagaaaccaagcatcgagtttccatggaggtggctgccgctaagggcttgcctgtgctcaagtatcacttgctacccaggaccaaaggttttactaccgctgtgaaatgccttagggggactgttgctgctgtttacgacgtaactctaaactttagaggaaacaagaatccttcacttctggggattctgtacggtaagaaatatgaagccgacatgtgcgtaagacggtttccactcgaggatatccctttggacgagaaggaagccgctcagtggctccacaaattgtaccaagagaaagatgcgcttcaagagatttacaatcaaaaggggatgttccctggggaacagtttaagccggctcgccgaccatggacactgttgaacttcctgagctgggcaacgattctcctgagtccattgttcagctttgtcctgggtgtgtttgcgagtggcagccccctgctaattttaacgtttctgggcttcgtgggagctgcatcctttggtgttagacggctgattggtgttaccgagatcgagaaggggagcagttacggcaatcaggagtttaaaaaaaaggagtag

SEQ ID NO: 295744 - DNA, 1131 bp, Artificial Sequence
  derived and/or modified sequence
atgggtttgctcgcctttctgaagacacaattcgtcctacatctgttagtagggttcgttttcgtcgtgagtggcctcgtcatcaatttcgtacagctctgcaccctcgccttatggcctgttagcaagcagctctatcggagactgaactgcagactggcgtactctctatggtcccagcttgtgatgctattggaatggtggagctgtacggagtgcactctctttacagaccaggcaacagttgagagattcggcaaggagcatgctgtcattattctgaaccacaactttgagatcgattttctgtgcggatggactatgtgcgaaaggtttggcgttctggggagtagtaaggttctcgctaaaaaggagctgctgtacgtccccctgatcggatggacttggtactttctcgaaatagtattttgcaagaggaaatgggaggaggaccgcgacaccgtggtcgagggcttaagaaggctctccgattacccagaatatatgtggtttcttttgtactgtgaggggacccgcttcaccgaaacaaaacaccgtgtcagtatggaggtggccgcagcgaagggattacctgtgctgaagtaccacctcctgccgaggacaaagggcttcactactgctgtcaaatgtcttaggggcaccgtggctgccgtgtacgacgtgaccctgaacttccgcggaaataagaacccatcactgctaggtatcttgtatggcaagaaatacgaggctgatatgtgcgtcaggcggttccctctggaggatatcccactggatgaaaaagaagccgctcagtggctccataagttgtaccaagaaaaggatgccctccaggagatctacaatcagaaggggatgtttccaggcgaacagtttaaacctgctcgcaggccctggactctgctgaacttcctgagctgggcgactatcttgctatctcccctcttttcctttgtgctgggtgtgttcgcttccggtagtcccctactgatcctcaccttcctgggattcgtcggtgctgcatcctttggtgtccgaaggctaattggggtaacagaaatcgagaaaggctcctcgtacggtaatcaagagttcaaaaagaaagagtag

SEQ ID NO: 295745 - DNA, 768 bp, Artificial Sequence
  derived and/or modified sequence
atgggtctcctggccttcttaaagacccagtttgtgctacacttgttggtgggattcgtgttcgtggtgagtggactggtgattaacttcgtgcagctttgtaccctggccctgtggccggtttctaagcagctgtacagacggttgaactgtaggctcgcctactccttgtggtcccaactcgtgatgctgcttgaatggtggtcttgcacggaatgcacgctcttcaccgaccaagctaccgtggaacgcttcgggaaggagcacgcggttataattctgaaccacaacttcgaaatcgacttcctttgcggttggacgatgtgtgaaagatttggggtgttgggttcctctaaagtgttggctaagaaagagctcctgtacgtgccactgatcgggtggacctggtacttcctcgaaatagtgttctgcaagcggaaatgggaggaagatcgcgacactgtggtggaaggactgaggcgcctctccgattaccctgaatacatgtggttcctgctctactgcgagggcactaggtttacggagacaaaacatcgagtgagtatggaagtagctgcagcaaagggacttcctgtgctgaaatatcaccttctaccccgaactaagggattcacaacagccgtgaaatgcctgagaggtacagtggctgctgtctacgacgtgactcttaactttagaggaaacaaaaacccttcactcttgggcatcttgtacggtaagaaatatgaagccgatatgtgcgtatag

SEQ ID NO: 295746 - DNA, 1113 bp, Artificial Sequence
  derived and/or modified sequence
atggggctattggccttcctcaaaacacaatttgtgctccatctgctcgtggggtttgtctttgtggtgagcggtctcgtgattaattttgtacagctgtgcacgctcgccctctggccagtttctaaacagctgtataggaggctgaactgccgtttggcctattcgttgtggtcacaactcgtaatgttgcttgagtggtggagttgcactgaatgcacactttttaccgatcaggccacagtggaacgattcggaaaggagcatgctgtgattattctgaatcataatttcgaaatcgacttcctgtgcggctggacaatgtgcgaacgatttggggtgctaggcagctccaaggttctggctaagaaggaactcctatacgtgcccctgatcggctggacgtggtactttcttgagatagtgttctgcaagaggaagtgggaagaggatcgagacacggtcgtggagggtttacgcagattgtccgactatcctgagtacatgtggttcctgttatactgcgaggggacgaggtttactgaaacgaaacaccgcgtttccatggaagtggccgcagccaaagggcttcctgtgctgaagtatcacctgctcccccgaaccaaaggcttcacgactgcggttaagtgtctgcgaggaaccgttgcagctgtgtatgatgtgactctgaattttagaggcaataagaacccctcattgctaggtattctatacggaaagaaatatgaagcagatatgtgtgtgcggagatttcccctggaggatattcctttagacgagaaagagggacactgctggcccgtagctcctgtgactcatcctgagcccggtgctacacttgaagctccccgaagggagggccctggaccccctaccggcgtctggccagttaaactccccgcttgggccgttgtgagctggggtaggcggtggcctccttctctgggacctggagccaggtgccacggcgtgtcttgcccttcctctcagggatgtcactgctgcctccatcggctacctccgtgcgagaccttagtcgtgtggtactctgccacggtctatcagacacggactctttgcgaggtcctttag

SEQ ID NO: 295747 - DNA, 387 bp, Artificial Sequence
  derived and/or modified sequence
atgggactcctggccttcttaaagacccaattcgtgctccacctgctggtaggatttgtcttcgttgtttctgggctggtgatcaattttgttcagctgtgcacgctggcactgtggcctgtaagcaagcagctgtacagaagactgaattgccgattggcttactccctctggtctcagcttgtaatgttactggagtggtggtcatgcacagaatgcacattgttcaccgaccaggcgacagtggagcgcttcggaaaagagcacgctgtgatcattctcaatcataactttgagatagattttctctgcggctggaccatgtgtgagcgatttggagtccttggtagttccaaagtactagcaaaaaaggaattactgtactag

SEQ ID NO: 295748 - DNA, 240 bp, Artificial Sequence
  derived and/or modified sequence
atgggcctcttggctttcttgaagactcagttcgtgctgcacttgctggtggggttcgtctttgttgtgtcaggcttagtgatcaacttcgtccagttgtgcaccttggcactgtggccagtatctaagcagctgtataggcgactgaactgccgactggcatacagcctgtggagtcaattggttatgctgttggagtggtggtcatgcaccgaatgtacgctctttactgaccagtag

SEQ ID NO: 295749 - DNA, 768 bp, Artificial Sequence
  derived and/or modified sequence
atggggttactcgccttcctgaaaacacagtttgttttacacctcctagtaggcttcgttttcgttgtgtcgggcttggtgattaacttcgttcagttatgcaccctggccctgtggcccgtctctaagcaactctatcggcgacttaattgcaggctggcatactcgctgtggagtcagctggttatgctgctggagtggtggtcttgtacagaatgtacattgtttactgatcaggctaccgtcgaacggttcggtaaagagcacgccgttattatcctcaaccacaacttcgagatagatttcctgtgcgggtggactatgtgcgagcgcttcggtgtcctgggctcttctaaggtactggcaaagaaagagctgctatacgtgcccctaatcggctggacatggtactttcttgaaattgtcttctgtaaacgcaaatgggaggaggatagggacacagttgttgagggactgaggcggctatcggattacccggaatacatgtggtttctgctgtactgcgagggcaccagattcacagaaaccaagcacagggtgagcatggaggttgcagctgctaaagggctccctgtgcttaaataccacttgctcccgcgaaccaagggctttactactgccgttaaatgtctcaggggtactgtggcagctgtgtacgacgtgacactgaattttcggggtaacaaaaatccatctctgctggggattctttatggtaaaaagtatgaagccgatatgtgtgtgtag

SEQ ID NO: 295750 - DNA, 1131 bp, Artificial Sequence
  derived and/or modified sequence
atgggcctgcttgcctttctaaagactcagttcgtccttcatctgctggtgggcttcgtgtttgtcgtgtccggcttggtgatcaattttgtgcagctttgcacgttggctctgtggcccgtaagcaagcaactctatagaaggctgaattgcagattagcgtacagcctgtggagtcaactcgtgatgcttctagaatggtggtcatgtactgagtgcacacttttcacagatcaagcgaccgtggagagattcgggaaagaacacgcagtgattatactgaaccataatttcgagatcgactttctgtgcggctggacaatgtgtgagaggtttggagtgttgggcagctcgaaagtcctggctaaaaaagaattgctgtacgtgcctttaatcggatggacctggtactttctcgaaattgtgttctgcaagagaaagtgggaggaggaccgtgatacagtggtcgagggactgcgcaggctgagcgattatcccgagtatatgtggttcctcttgtactgcgaaggtacccgttttaccgagacaaaacacagagtgagtatggaggtggcagcggcaaagggcctccccgtgctgaaataccacctgctgcccaggaccaaggggttcaccaccgctgtgaaatgcctgcggggaaccgtagccgcagtttatgatgtgacgctgaactttcggggtaacaagaatccgtctctccttggaattctgtatggaaagaaatatgaagccgatatgtgtgtacggagatttccgcttgaagatattccactggatgagaaggaggccgctcaatggttacacaaactgtatcaagagaaggatgccctacaggagatttacaaccagaaggggatgtttcctggcgagcagttcaaaccagctaggaggccatggaccctactgaattttcttagctgggcaacaatcctgctcagtcccctgttcagtttcgttctcggtgttttcgcgtccggtagcccactactaatcctgaccttcctgggattcgtcggtgcagcatctttcggagtgcgcagacttattggagtaacagaaatcgaaaagggctcatcctatggaaatcaggagttcaagaaaaaagaatag

SEQ ID NO: 295751 - DNA, 129 bp, Artificial Sequence
  derived and/or modified sequence
gccaaccagtggatcaagttcaagagcgtgaagggccggcggcggcgaggatatactttcaggggactgcctgattcagtgttgaatctcgtgaaagaggaggaaaacccagttaacgagatacagtag

SEQ ID NO: 295752 - protein, 1449 aa, Artificial Sequence
  derived and/or modified sequence
MEPSALRKAGSEQEEGFEGLPRRVTDLGMVSNLRRSNSSLFKSWRLQCPFGNNDKQESLSSWIPENIKKKECVYFVESSKLSDAGKVVCQCGYTHEQHLEEATKPHTFQGTQWDPKKHVQEMPTDAFGDIVFTGLSQKVKKYVRVSQDTPSSVIYHLMTQHWGLDVPNLLISVTGGAKNFNMKPRLKSIFRRGLVKVAQTTGAWIITGGSHTGVMKQVGEAVRDFSLSSSYKEGELITIGVATWGTVHRREGLIHPTGSFPAEYILDEDGQGNLTCLDSNHSHFILVDDGTHGQYGVEIPLRTRLEKFISEQTKERGGVAIKIPIVCVVLEGGPGTLHTIDNATTNGTPCVVVEGSGRVADVIAQVANLPVSDITISLIQQKLSVFFQEMFETFTESRIVEWTKKIQDIVRRRQLLTVFREGKDGQQDVDVAILQALLKASRSQDHFGHENWDHQLKLAVAWNRVDIARSEIFMDEWQWKPSDLHPTMTAALISNKPEFVKLFLENGVQLKEFVTWDTLLYLYENLDPSCLFHSKLQMHHVAQVLRELLGDFTQPLYPRPRHNDRLRLLLPVPHVKLNVQGVSLRSLYKRSSGHVTFTMDPIRDLLIWAIVQNRRELAGIIWAQSQDCIAAALACSKILKELSKEEEDTDSSEEMLALAEEYEHRAIGVFTECYRKDEERAQKLLTRVSEAWGKTTCLQLALEAKDMKFVSHGGIQAFLTKVWWGQLSVDNGLWRVTLCMLAFPLLLTGLISFREKRLQDVGTPAARARAFFTAPVVVFHLNILSYFAFLCLFAYVLMVDFQPVPSWCECAIYLWLFSLVCEEMRQLFYDPDECGLMKKAALYFSDFWNKLDVGAILLFVAGLTCRLIPATLYPGRVILSLDFILFCLRLMHIFTISKTLGPKIIIVKRMMKDVFFFLFLLAVWVVSFGVAKQAILIHNERRVDWLFRGAVYHSYLTIFGQIPGYIDGVNFNPEHCSPNGTDPYKPKCPESDATQQRPAFPEWLTVLLLCLYLLFTNILLLNLLIAMFNYTFQQVQEHTDQIWKFQRHDLIEEYHGRPAAPPPFILLSHLQLFIKRVVLKTPAKRHKQLKNKLEKNEEAALLSWEIYLKENYLQNRQFQQKQRPEQKIEDISNKVDAMVDLLDLDPLKRSGSMEQRLASLEEQVAQTAQALHWIVRTLRASGFSSEADVPTLASQKAAEEPDAEPGGRKKTEEPGDSYHVNARHLLYPNCPVTRFPVPNEKVPWETEFLIYDPPFYTAERKDAAAMDPMGENPMGRTGLRGRGSLSCFGPNHTLYPMVTRWRRNEDGAICRKSIKKMLEVLVVKLPLSEHWALPGGSREPGEMLPRKLKRILRQEHWPSFENLLKCGMEVYKGYMDDPRNTDNAWIETVAVSVHFQDQNDVELNRLNSNLHACDSGASIRWQVVDRRIPLYANHKTLLQKAAAEFGAHY

SEQ ID NO: 295753 - protein, 247 aa, Artificial Sequence [sequence omitted]

SEQ ID NO: 295754 - DNA, 4350 bp, Artificial Sequence
  derived and/or modified sequence
atggagcccagcgccctgagaaaggccggcagcgagcaggaggagggcttcgagggcctgcccagaagagtgaccgacctgggcatggtgagcaacctgagaagaagcaacagcagcctgttcaagagctggagactgcagtgccccttcggcaacaacgacaagcaggagagcctgagcagctggatccccgagaacatcaagaagaaggagtgcgtgtacttcgtggagagcagcaagctgagcgacgccggcaaggtggtgtgccagtgcggctacacccacgagcagcacctggaggaggccaccaagccccacaccttccagggcacccagtgggaccccaagaagcacgtgcaggagatgcccaccgacgccttcggcgacatcgtgttcaccggcctgagccagaaggtgaagaagtacgtgagagtgagccaggacacccccagcagcgtgatctaccacctgatgacccagcactggggcctggacgtgcccaacctgctgatcagcgtgaccggcggcgccaagaacttcaacatgaagcccagactgaagagcatcttcagaagaggcctggtgaaggtggcccagaccaccggcgcctggatcatcaccggcggcagccacaccggcgtgatgaagcaggtgggcgaggccgtgagagacttcagcctgagcagcagctacaaggagggcgagctgatcaccatcggcgtggccacctggggcaccgtgcacagaagagagggcctgatccaccccaccggcagcttccccgccgagtacatcctggacgaggacggccagggcaacctgacctgcctggacagcaaccacagccacttcatcctggtggacgacggcacccacggccagtacggcgtggagatccccctgagaaccagactggagaagttcatcagcgagcagaccaaggagagaggcggcgtggccatcaagatccccatcgtgtgcgtggtgctggagggcggccccggcaccctgcacaccatcgacaacgccaccaccaacggcaccccctgcgtggtggtggagggcagcggcagagtggccgacgtgatcgcccaggtggccaacctgcccgtgagcgacatcaccatcagcctgatccagcagaagctgagcgtgttcttccaggagatgttcgagaccttcaccgagagcagaatcgtggagtggaccaagaagatccaggacatcgtgagaagaagacagctgctgaccgtgttcagagagggcaaggacggccagcaggacgtggacgtggccatcctgcaggccctgctgaaggccagcagaagccaggaccacttcggccacgagaactgggaccaccagctgaagctggccgtggcctggaacagagtggacatcgccagaagcgagatcttcatggacgagtggcagtggaagcccagcgacctgcaccccaccatgaccgccgccctgatcagcaacaagcccgagttcgtgaagctgttcctggagaacggcgtgcagctgaaggagttcgtgacctgggacaccctgctgtacctgtacgagaacctggaccccagctgcctgttccacagcaagctgcagatgcaccacgtggcccaggtgctgagagagctgctgggcgacttcacccagcccctgtaccccagacccagacacaacgacagactgagactgctgctgcccgtgccccacgtgaagctgaacgtgcagggcgtgagcctgagaagcctgtacaagagaagcagcggccacgtgaccttcaccatggaccccatcagagacctgctgatctgggccatcgtgcagaacagaagagagctggccggcatcatctgggcccagagccaggactgcatcgccgccgccctggcctgcagcaagatcctgaaggagctgagcaaggaggaggaggacaccgacagcagcgaggagatgctggccctggccgaggagtacgagcacagagccatcggcgtgttcaccgagtgctacagaaaggacgaggagagagcccagaagctgctgaccagagtgagcgaggcctggggcaagaccacctgcctgcagctggccctggaggccaaggacatgaagttcgtgagccacggcggcatccaggccttcctgaccaaggtgtggtggggccagctgagcgtggacaacggcctgtggagagtgaccctgtgcatgctggccttccccctgctgctgaccggcctgatcagcttcagagagaagagactgcaggacgtgggcacccccgccgccagagccagagccttcttcaccgcccccgtggtggtgttccacctgaacatcctgagctacttcgccttcctgtgcctgttcgcctacgtgctgatggtggacttccagcccgtgcccagctggtgcgagtgcgccatctacctgtggctgttcagcctggtgtgcgaggagatgagacagctgttctacgaccccgacgagtgcggcctgatgaagaaggccgccctgtacttcagcgacttctggaacaagctggacgtgggcgccatcctgctgttcgtggccggcctgacctgcagactgatccccgccaccctgtaccccggcagagtgatcctgagcctggacttcatcctgttctgcctgagactgatgcacatcttcaccatcagcaagaccctgggccccaagatcatcatcgtgaagagaatgatgaaggacgtgttcttcttcctgttcctgctggccgtgtgggtggtgagcttcggcgtggccaagcaggccatcctgatccacaacgagagaagagtggactggctgttcagaggcgccgtgtaccacagctacctgaccatcttcggccagatccccggctacatcgacggcgtgaacttcaaccccgagcactgcagccccaacggcaccgacccctacaagcccaagtgccccgagagcgacgccacccagcagagacccgccttccccgagtggctgaccgtgctgctgctgtgcctgtacctgctgttcaccaacatcctgctgctgaacctgctgatcgccatgttcaactacaccttccagcaggtgcaggagcacaccgaccagatctggaagttccagagacacgacctgatcgaggagtaccacggcagacccgccgcccccccccccttcatcctgctgagccacctgcagctgttcatcaagagagtggtgctgaagacccccgccaagagacacaagcagctgaagaacaagctggagaagaacgaggaggccgccctgctgagctgggagatctacctgaaggagaactacctgcagaacagacagttccagcagaagcagagacccgagcagaagatcgaggacatcagcaacaaggtggacgccatggtggacctgctggacctggaccccctgaagagaagcggcagcatggagcagagactggccagcctggaggagcaggtggcccagaccgcccaggccctgcactggatcgtgagaaccctgagagccagcggcttcagcagcgaggccgacgtgcccaccctggccagccagaaggccgccgaggagcccgacgccgagcccggcggcagaaagaagaccgaggagcccggcgacagctaccacgtgaacgccagacacctgctgtaccccaactgccccgtgaccagattccccgtgcccaacgagaaggtgccctgggagaccgagttcctgatctacgacccccccttctacaccgccgagagaaaggacgccgccgccatggaccccatgggcgagaaccccatgggcagaaccggcctgagaggcagaggcagcctgagctgcttcggccccaaccacaccctgtaccccatggtgaccagatggagaagaaacgaggacggcgccatctgcagaaagagcatcaagaagatgctggaggtgctggtggtgaagctgcccctgagcgagcactgggccctgcccggcggcagcagagagcccggcgagatgctgcccagaaagctgaagagaatcctgagacaggagcactggcccagcttcgagaacctgctgaagtgcggcatggaggtgtacaagggctacatggacgaccccagaaacaccgacaacgcctggatcgagaccgtggccgtgagcgtgcacttccaggaccagaacgacgtggagctgaacagactgaacagcaacctgcacgcctgcgacagcggcgccagcatcagatggcaggtggtggacagaagaatccccctgtacgccaaccacaagaccctgctgcagaaggccgccgccgagttcggcgcccactactag

SEQ ID NO: 295755 - DNA, 435 bp, Artificial Sequence
  derived and/or modified sequence
atggagcccagcgccctgagaaaggccggcagcgagcaggaggagggcttcgagggcctgcccagaagagtgaccgacctgggcatggtgagcaacctgagaagaagcaacagcagcctgttcaagagctggagactgcagtgccccttcggcaacaacgacaagcaggagagcctgagcagctggatccccgagaacatcaagaagaaggagtgcgtgtacttcgtggagagcagcaagctgagcgacgccggcaaggtggtgtgccagtgcggctacacccacgagcagcacctggaggaggccaccaagccccacaccttccagggcacccagtgggaccccaagaagcacgtgcaggagatgcccaccgacgccttcggcgacatcgtgttcaccggcctgagccagaaggtgaagaagtacgtgagatag

SEQ ID NO: 295756 - DNA, 744 bp, Artificial Sequence
  derived and/or modified sequence
atgctgagcagagagcaggaggaggacggcggcgccggcagacagtaccacgtgaacgccagacacctgctgtaccccaactgccccgtgaccagattccccgtgcccaacgagaaggtgccctgggagaccgagttcctgatctacgacccccccttctacaccgccgagagaaaggacgccgccgccatggaccccatgggcgagaaccccatgggcagaaccggcctgagaggcagaggcagcctgagctgcttcggccccaaccacaccctgtaccccatggtgaccagatggagaagaaacgaggacggcgccatctgcagaaagagcatcaagaagatgctggaggtgctggtggtgaagctgcccctgagcgagcactgggccctgcccggcggcagcagagagcccggcgagatgctgcccagaaagctgaagagaatcctgagacaggagcactggcccagcttcgagaacctgctgaagtgcggcatggaggtgtacaagggctacatggacgaccccagaaacaccgacaacgcctggatcgagaccgtggccgtgagcgtgcacttccaggaccagaacgacgtggagctgaacagactgaacagcaacctgcacgcctgcgacagcggcgccagcatcagatggcaggtggtggacagaagaatccccctgtacgccaaccacaagaccctgctgcagaaggccgccgccgagttcggcgcccactactag

SEQ ID NO: 295757 - DNA, 4350 bp, Artificial Sequence
  derived and/or modified sequence
atggaacctagcgccctgcgaaaggccggatccgagcaagaagagggatttgagggcctccctagacgcgtaacagatctgggaatggtcagcaatctccgaagatcaaactctagcttatttaagtcctggagacttcagtgccccttcggcaacaatgacaagcaggaaagtttatcaagttggatcccagaaaatattaagaagaaggagtgtgtatatttcgttgaatccagtaagctctcagatgcaggtaaggtggtttgtcaatgtgggtacactcacgaacagcacctagaagaggccacaaaaccacacacgttccaggggactcagtgggatcccaaaaagcacgttcaagagatgccgaccgatgcattcggggatatcgtgtttacaggcctgtcccaaaaagtgaagaaatacgtgcgggtaagccaagacaccccttcgagcgtaatttatcacctgatgacgcagcactggggactggatgtgccaaacctgctgatttctgtcacgggaggcgccaagaactttaacatgaaacccagactgaagtctattttcaggaggggcctggtgaaagtcgcacaaaccacgggagcgtggattatcacgggggggtcccacaccggagtgatgaagcaagtgggcgaagcagtgcgggactttagtctgagttcatcctacaaggaaggggagctgattaccattggggttgcaacgtggggaacagtgcacaggagagagggcctcatccacccaacagggtcctttcccgccgaatatattttggatgaggacggtcagggcaaccttacttgcctggatagtaatcactctcattttatactggtggatgacggaacgcacggccagtacggagttgagatccccctgaggactaggttggaaaagttcataagcgaacagactaaggaaagggggggagtggctattaagattccaattgtctgtgttgtgcttgaaggcggcccaggaacccttcatacgatcgacaacgccaccacaaacggcaccccatgcgtcgttgtcgagggctcagggagagtggctgatgtcattgcacaagttgcaaatctgcctgtcagcgacattactatctcactgattcagcagaagttgtctgttttttttcaagaaatgttcgagacatttactgagagcaggatcgtagaatggactaagaaaatacaagacatcgtgcggcggaggcaacttctgaccgtatttcgggaaggtaaggacggacagcaagacgttgacgtagctatcctgcaagcactattaaaagctagcaggtcccaggatcacttcggccacgaaaattgggaccatcagctcaaactggctgttgcatggaacagagtcgatattgcccgaagcgaaatttttatggatgagtggcaatggaagcccagcgaccttcatcctacgatgacagcagcactgattagcaacaaaccagaatttgttaagttgtttctggagaacggcgtccagctcaaggaattcgttacatgggacacattactgtatctatacgagaatttggacccatcctgtctgtttcacagcaaactgcaaatgcaccacgtggcccaggtgctccgggaacttttaggggattttacccagcctctgtacccgcgtcctaggcataacgaccggctgcgcctgctcctcccggtgccccacgtgaagctgaacgtacagggtgtgtcactacgaagtctctacaagcggagctctggccatgtgacttttaccatggatccaattcgtgacctgcttatctgggcaattgtccagaatcgtagggagctggcgggtattatttgggctcagagccaggactgcattgccgccgcgttggcctgtagcaaaatcctgaaggagcttagcaaagaggaggaagataccgattcctctgaggagatgcttgcattagcggaagagtatgagcatcgggctattggagttttcaccgagtgttaccgaaaggacgaggagcgcgcccagaaactcctcacgcgcgtctctgaagcctgggggaagacaacttgcctgcagttagctctcgaggccaaagatatgaagttcgtgagtcatggcggcatccaggcattcctgacaaaggtgtggtggggacagttaagtgtggataacggcctctggagggtaaccctgtgcatgctggcatttcctctgctgctgaccggcctaattagctttcgcgagaagagactgcaggacgtgggaactcctgccgccagggctagggccttttttaccgcaccggtcgtcgtgttccacctcaacatactctcatactttgcgttcctgtgcctcttcgcttacgtcctgatggtggacttccagcccgtcccatcttggtgtgagtgcgctatttacttatggctcttctctctggtttgcgaggagatgcggcaacttttttatgatcccgatgagtgcggccttatgaagaaagccgccctgtacttcagcgatttctggaacaaacttgacgtgggggctatccttctattcgtggcaggactgacgtgtcgactgattcctgcgaccttatatccaggccgcgtgatcctttcgctggactttatactgttctgcctgcgtctcatgcacatcttcacaatctctaaaaccctcggtccaaagatcattatagtgaagcgcatgatgaaggacgtcttcttttttcttttcctgttggccgtgtgggtcgtgtccttcggtgtcgccaaacaagccatacttatacataacgaacgcagagtcgactggctctttagaggggccgtctatcattcttatctgaccatcttcggacagatccctggatacattgacggagtgaacttcaatcccgagcactgttcaccgaatggaacagacccctataaaccaaaatgtccagagagtgatgctacccagcagaggcccgctttccccgagtggttgactgtcctattgctttgcctctacctgctgtttacaaacatattgctgttgaatttactgatcgccatgttcaactatactttccagcaagttcaagagcatacagaccagatatggaaatttcagagacacgacctaattgaagagtaccatggaagacccgctgcgccccccccttttattctcctgagtcacctccaattatttatcaagcgggtcgtcttgaaaacaccagcaaaacgccacaagcagctgaagaacaagctggagaaaaacgaggaggccgccttgctgtcttgggaaatatatcttaaagaaaattatcttcagaacagacagtttcagcaaaagcaacggcccgagcagaaaatcgaagatatctccaataaggtggacgctatggtagatttgttagatttagatcccctgaagcggtccgggtctatggaacagcgattggcctccctggaggagcaggtggcacaaacagcacaggcccttcactggattgtaaggacactgagagctagcgggttttcatccgaagccgacgtgccgactctggccagccagaaagccgccgaagaacccgatgccgagcctggcggaaggaaaaaaaccgaagagcccggtgatagctatcacgtgaacgccagacatctcctttatcccaactgtcccgtgaccaggtttcctgtgcctaatgaaaaagtaccatgggagaccgagtttctgatttacgacccgccattctacacagctgaacggaaagatgctgccgcaatggaccctatgggcgagaatcctatgggaagaacgggattacggggtagagggtctctcagttgttttggtccaaaccataccctgtatcccatggtgacccgctggaggcggaacgaagatggcgcaatctgcaggaaatctattaagaagatgctggaggtgctggtggtgaaactccctttaagcgagcactgggctctcccaggcggcagtagagagccaggagagatgctgcccagaaagctgaagaggatcttgcgccaagagcactggcccagcttcgaaaacctgctgaagtgtggtatggaggtttataagggctacatggacgacccccggaacaccgacaatgcatggatagaaacagtggctgtgagcgtccactttcaggatcagaacgatgtggagctgaacagattaaattcaaatctgcatgcttgcgactctggggcatccatccggtggcaggtggtggacaggcgcatacctctgtatgctaaccataaaacgcttttgcagaaagcagccgccgaatttggtgcccactattag

SEQ ID NO: 295758 - DNA, 435 bp, Artificial Sequence
  derived and/or modified sequence
atggagccatcagcattacggaaggctggaagtgagcaggaagaagggtttgaaggtctgccaagacgagtgacggatctgggaatggtttcgaatctcaggcggtcaaacagtagtctttttaaaagctggcgcctacagtgtccgtttggcaataatgacaagcaggagtcactcagcagttggattccagaaaatattaaaaagaaggagtgtgtgtacttcgtcgaatcttctaagttgtcagacgccggcaaggtagtgtgtcaatgtggatacacccacgaacagcacttagaggaggccacaaagccgcacacattccagggcactcaatgggatccgaaaaaacacgttcaggagatgcccacagacgcctttggcgatatcgtgtttaccggcctttcccagaaggtcaagaaatacgtcagatag

SEQ ID NO: 295759 - DNA, 744 bp, Artificial Sequence
  derived and/or modified sequence
atgttgtccagggaacaggaagaggatggaggcgcagggaggcagtaccacgtaaacgctagacacctcttatacccaaactgccctgtcaccaggttccccgtcccaaacgagaaggtgccctgggagactgaattcctgatttatgacccaccattctatacagctgagcggaaagatgcggccgccatggaccccatgggtgagaatcctatggggcgcaccgggcttcgcggcaggggaagcctgtcctgtttcggtccaaatcacacgctgtatcccatggtcacacggtggagacgcaatgaggatggggccatttgtaggaaaagcatcaagaaaatgttggaagtgctggtcgtgaagctgccactgtccgagcactgggctttaccaggcggaagtagagaaccaggagagatgcttccacgcaaacttaagaggatactcagacaggagcattggccttcattcgagaatttgctgaagtgtggcatggaagtgtataagggctacatggatgaccctaggaataccgacaacgcttggatcgaaaccgttgcagtcagcgtgcatttccaggatcagaacgatgtcgagttgaaccgcttgaactctaatctgcatgcttgtgatagcggcgcctccatcagatggcaggtggtagacaggaggattcccctatacgctaatcacaaaaccctgctgcagaaggcagcggctgaattcggcgcccattattag

SEQ ID NO: 295760 - DNA, 4350 bp, Artificial Sequence
  derived and/or modified sequence
atggagcccagcgccctgaggaaggccggcagcgagcaggaggagggctttgagggcctgccccggcgggtgacagacctgggcatggtgagcaacctgcggcgcagcaacagcagcctcttcaagtcctggaggctgcagtgccccttcggcaacaatgacaagcaggagagcctgagctcctggatccctgagaacatcaagaagaaggaatgtgtgtactttgtggagagcagcaagctgagtgatgctgggaaggtggtgtgccagtgtggctacacccatgagcagcacctggaggaggccaccaagccccacaccttccagggcacccagtgggaccccaagaagcacgtgcaggagatgcccacagatgcctttggagacatcgtgttcaccggcctgagccagaaggtgaagaagtatgtgcgggtgtcccaggacacccccagcagcgtcatctaccacctgatgacccagcactggggcctggatgtgcccaacctgctgatctctgtgactggaggagccaagaacttcaacatgaagccccggctgaagagcatcttcagaagaggcctggtgaaggtggcccagaccactggagcctggatcatcactggaggcagccacactggagtgatgaagcaggtgggggaggccgtgcgggacttcagcctgagcagcagctacaaggagggggagctgatcaccatcggcgtggccacctggggcaccgtgcacagaagagagggcctcatccaccccaccggcagcttccctgctgagtacatcctggatgaagatggccagggcaacctgacctgcctggacagcaaccacagccacttcatcctggtggatgatggcacccacggccagtatggagtggagatccccctgcggacccggctggagaagttcatcagcgagcagaccaaggagcggggcggcgtggccatcaagatccccatcgtgtgtgtggtgctggagggcggccctggcaccctgcacaccatcgacaatgccaccaccaacggcaccccctgtgtggtggtggagggcagcggccgggtggctgatgtgattgcccaggtggccaacctgcctgtgtctgacatcaccatcagcctcatccagcagaagctgagcgtcttcttccaggagatgtttgagaccttcacagagagcagaattgtggagtggaccaagaagatccaggacatcgtgagaagacggcagctgctgactgtgttccgggagggcaaggatggccagcaggatgtggatgtggccatcctgcaggccctgctgaaggccagccgcagccaggaccactttggacatgagaactgggaccaccagctgaagctggccgtggcctggaacagagtggacatcgcccggtctgagatcttcatggatgagtggcagtggaagcccagcgacctgcaccccaccatgacagctgccctgatcagcaacaagccagagtttgtgaagctgttcctggagaatggagtgcagctgaaggagtttgtgacctgggacaccctgctgtacctgtatgagaacctggaccccagctgcctcttccacagcaagctgcagatgcaccacgtggcccaggtgctgcgggagctgctgggggacttcacccagcccctgtacccccggcccaggcacaatgaccggctgcggctgctgctgcctgtgccccacgtgaagctgaatgtgcagggcgtgtccctgcggagcctgtacaagaggagcagcggccacgtgaccttcaccatggaccccatccgggacctgctgatctgggccatcgtgcagaacagaagagagctggccggcatcatctgggcccagagccaggactgcatcgctgctgccctggcctgcagcaagatcctgaaggagctgagcaaggaggaggaggacacagacagcagcgaggagatgctggccctggccgaggagtatgagcaccgggccatcggggtcttcacagagtgctacaggaaggatgaggagcgggcccagaagctgctgaccagggtgtctgaggcctggggcaagaccacctgcctgcagctggccctggaggccaaggacatgaagtttgtgagccacggcggcatccaggccttcctgaccaaggtgtggtggggccagctgtctgtggacaatggcctgtggagggtgaccctgtgcatgctggccttccccctgctgctgaccggcctcatctccttccgggagaagaggctgcaggatgtgggcaccccagctgcccgggcccgggccttcttcaccgcccctgtggtggtgttccacctgaacatcctgagctactttgccttcctgtgcctgtttgcctacgtgctgatggtggacttccagcctgtgcccagctggtgtgaatgtgccatctacctgtggctgttcagcctggtgtgtgaggagatgaggcagctgttctatgaccctgatgaatgtggcctgatgaagaaggccgccctgtacttcagtgacttctggaacaagctggatgtgggcgccatcctgctgtttgtggccggcctgacctgccgcctcatcccagccaccctgtacccaggccgggtcatcctgagcctggacttcatcctcttctgcctgcggctgatgcacatcttcaccatcagcaagaccctgggccccaagatcatcatcgtgaagaggatgatgaaggatgtgttcttcttcctgttcctgctggccgtgtgggtggtgtcctttggagtggccaagcaggccatcctgatccacaatgaaagaagagtggactggctgttcagaggagctgtgtaccacagctacctgaccatcttcggccagatccctggctacattgatggagtgaacttcaaccctgagcactgcagccccaatggaacagacccctacaagcccaagtgcccagagagtgatgccacccagcagaggcctgccttccctgagtggctgactgtgctgctgctgtgcctgtacctgctcttcaccaacatcctgctgctgaacctgctgattgccatgttcaactacaccttccagcaggtgcaggagcacacagaccagatctggaagttccagagacatgacctgattgaggagtaccacggccggcctgctgcccccccacccttcatcctgctgagccacctgcagctgttcatcaagagggtggtgctgaagaccccagccaagaggcacaagcagctgaagaacaagctggagaagaatgaggaggccgccctgctgtcctgggagatctacctgaaggagaactacctgcagaaccggcagttccagcagaagcagaggcctgagcagaagattgaggacatcagcaacaaggtggatgccatggtggacctgctggacctggaccccctgaagaggagcggctccatggagcagaggctggccagcctggaggagcaggtggcccagacagcccaggccctgcactggatcgtgaggaccctgcgggccagcggcttcagcagcgaggctgatgtgcccaccctggccagccagaaggctgctgaggagccagatgctgagcccggcggcaggaagaagacagaggagcccggggacagctaccacgtgaatgcccggcacctgctgtaccccaactgccctgtgacccgcttccctgtgcccaatgagaaggtgccctgggagacagagttcctgatctatgacccccccttctacacagctgagaggaaggatgctgctgccatggaccccatgggagagaaccccatgggccgcacaggcctgcggggccggggcagcctgagctgcttcggccccaaccacaccctgtaccccatggtgacccgctggaggagaaatgaagatggagccatctgcaggaagagcatcaagaagatgctggaggtgctggtggtgaagctgcccctgtctgagcactgggccctgcccggcggcagccgggagcccggggagatgctgcccaggaagctgaagaggatcctgcggcaggagcactggcccagctttgagaacctgctgaagtgtggcatggaggtgtacaagggctacatggatgaccccaggaacacagacaatgcctggattgagaccgtggccgtgtctgtgcacttccaggaccagaatgatgtggagctgaaccggctgaacagcaacctgcacgcctgtgacagcggggccagcatccgctggcaggtggtggaccggcgcatccccctgtatgccaaccacaagaccctgctgcagaaggctgctgctgagtttggagcccactactag

SEQ ID NO: 295761 - DNA, 435 bp, Artificial Sequence
  derived and/or modified sequence
atggagcccagcgccctgaggaaggccggcagcgagcaggaggagggctttgagggcctgccccggcgggtgacagacctgggcatggtgagcaacctgcggcgcagcaacagcagcctcttcaagtcctggaggctgcagtgccccttcggcaacaatgacaagcaggagagcctgagctcctggatccctgagaacatcaagaagaaggaatgtgtgtactttgtggagagcagcaagctgagtgatgctgggaaggtggtgtgccagtgtggctacacccatgagcagcacctggaggaggccaccaagccccacaccttccagggcacccagtgggaccccaagaagcacgtgcaggagatgcccacagatgcctttggagacatcgtgttcaccggcctgagccagaaggtgaagaagtatgtgaggtag

SEQ ID NO: 295762 - DNA, 744 bp, Artificial Sequence
  derived and/or modified sequence
atgctgagccgggagcaggaggaggatggaggagctggccggcagtaccacgtgaatgcccggcacctgctgtaccccaactgccctgtgacccgcttccctgtgcccaatgagaaggtgccctgggagacagagttcctgatctatgacccccccttctacacagctgagaggaaggatgctgctgccatggaccccatgggagagaaccccatgggccgcacaggcctgcggggccggggcagcctgagctgcttcggccccaaccacaccctgtaccccatggtgacccgctggaggagaaatgaagatggagccatctgcaggaagagcatcaagaagatgctggaggtgctggtggtgaagctgcccctgtctgagcactgggccctgcccggcggcagccgggagcccggggagatgctgcccaggaagctgaagaggatcctgcggcaggagcactggcccagctttgagaacctgctgaagtgtggcatggaggtgtacaagggctacatggatgaccccaggaacacagacaatgcctggattgagaccgtggccgtgtctgtgcacttccaggaccagaatgatgtggagctgaaccggctgaacagcaacctgcacgcctgtgacagcggggccagcatccgctggcaggtggtggaccggcgcatccccctgtatgccaaccacaagaccctgctgcagaaggctgctgctgagtttggagcccactactag

SEQ ID NO: 295763 - DNA, 4350 bp, Artificial Sequence
  derived and/or modified sequence
atggagcccagcgccctgcggaaggccggcagcgagcaggaggagggcttcgaaggactacctagaagggttaccgacctcggtatggtatccaatctgcgtcgaagcaattcctctttgttcaaaagttggcgtctccaatgccctttcgggaacaatgacaagcaagaatccctctcgtcttggatcccagaaaatatcaagaagaaagagtgtgtttattttgttgagtctagtaagctgtccgatgctggaaaagtggtgtgccagtgtggttatactcacgaacagcatctggaggaggccaccaagccccataccttccagggaacccagtgggaccctaagaagcatgtgcaggaaatgcctaccgacgcatttggcgacatcgtctttactggactcagccagaaggtcaaaaagtacgtgagggtttcccaggacacaccttcaagcgtgatataccacttaatgacacaacattggggacttgacgtaccaaatctactcatctcagtgacaggtggtgcaaagaactttaacatgaagcccaggttgaaatctatttttcgacgaggtttggtgaaagtggcccagactaccggcgcctggatcattaccggggggagccacaccggcgtcatgaaacaagtcggcgaggcagtgagagatttttcactgtccagctcgtacaaagaaggagagttgatcacaattggggtcgccacctgggggacagtgcatagaagagaaggcctcatccaccccacaggatctttcccagctgagtatatcctcgatgaagatggccagggaaaccttacatgcttggatagtaatcacagtcacttcattctggtagacgacggtactcatgggcagtacggagtagagatcccactgaggacacgactggagaaattcatatccgaacagaccaaggagcgaggaggcgttgcgatcaagattcccatcgtctgtgtggtgctggaagggggtcccggcaccctgcacaccattgataatgctacaaccaatggtactccctgcgtcgtcgtggagggtagcgggcgcgtggccgatgtgattgcacaggtggcgaacctgcccgttagcgatatcactatctcactgatccagcagaagttgtctgtatttttccaagaaatgttcgagacttttactgagtcccgcattgttgagtggacaaaaaagatacaggacattgtgcgaagaagacagctgctgacagtatttagggagggaaaagatggccagcaggacgttgacgtagccattcttcaggccctgctcaaagcttccaggagtcaagaccacttcggccacgagaattgggaccaccagttaaagcttgccgtcgcctggaacagagtagacatagcccgcagcgaaatattcatggatgagtggcagtggaagccctcggacctgcatccaacaatgactgcggccctcatttccaacaagcctgaatttgtaaagttattcctggaaaatggtgtccagttgaaagagtttgtgacttgggatactttactctacctctacgagaacctggatcccagctgtctcttccatagcaaactccaaatgcatcacgtggcgcaggtcctaagggagctgctgggggatttcacacagccactttacccacgccccagacacaatgatcggctgcggttgctgctgcccgtcccccacgtgaaactcaatgtacagggcgtcagccttcgtagtctttacaaacggtcctcggggcacgtaaccttcaccatggacccgatacgcgatctcctgatttgggctatcgtgcagaaccgcagggagctggcaggtattatctgggcgcaaagccaggactgcattgccgcggctcttgcctgtagtaagatcctgaaagagctgagcaaagaggaggaagatacagacagctctgaggaaatgctggcactggctgaagaatatgagcaccgtgctatcggcgtgtttacagagtgctacaggaaggatgaggaacgtgcgcagaagctgctgacgagagtgtccgaagcctggggcaagaccacatgcctgcaacttgcgctcgaggcaaaagacatgaagttcgtgagtcatggaggaattcaggcctttttgacgaaggtgtggtggggacaactctcagtggataatggactatggcgggtcacgctttgcatgctggcgttccccctccttctgactggtctgatctctttccgcgagaaaagattacaagatgttggaactcccgcagcacgcgcacgggccttcttcactgcccctgtggtagtgttccatttgaatatcctgagttactttgcttttctttgcctgtttgcttatgtactgatggtggatttccagcccgttccaagctggtgcgagtgtgccatctacctgtggttgttttcactggtgtgtgaagaaatgcgccaattgttttacgaccctgacgaatgtggactcatgaagaaagcggccttgtatttctccgatttctggaataaattggacgttggcgccatcctcctgtttgtcgctggcctgacgtgtaggctaatccctgccacattatatcctggtcgcgtgatccttagcttggattttattttgttttgcctgcgcttgatgcatatctttacaataagtaagactctcggccccaaaatcatcattgtgaagagaatgatgaaggacgtctttttttttcttttccttctagcagtctgggtggtctcatttggtgtcgcaaaacaggctatcctgatccataatgagagacgcgttgattggctgttccgcggcgccgtgtatcacagttatctaacaatcttcggccagattcccgggtatatcgatggcgtgaacttcaatcctgaacattgtagccccaatggaacagatccgtataaacctaagtgtcctgaatctgatgcgacccaacagaggccggctttccctgagtggctcacagtgctgctcctttgtctgtatctgctgtttaccaacattcttctccttaatttactcattgcgatgtttaactacacttttcaacaggtgcaagagcacaccgaccagatatggaaatttcagcggcatgaccttatcgaggaataccatgggcgacccgctgcccccccccctttcattttactgtcacacctgcagttgttcataaaaagagtggtcctgaagacgcctgccaagaggcataagcagcttaagaacaagctggagaaaaacgaggaagccgcacttctgagttgggaaatttatctgaaggaaaattatctgcaaaacaggcaatttcagcagaagcagcgcccagaacaaaagatagaagatatttcaaataaggtcgacgctatggtagacctcctggatttggacccactgaagcggtcgggcagcatggaacagaggttggcatcactcgaggagcaggtcgcccagacagcccaggcacttcactggatagtcagaacacttcgggcatctggattcagctctgaagctgacgtgcccactctggccagccagaaggccgccgaggaacccgacgccgaaccaggaggtcgtaaaaagactgaggagccaggggacagttatcacgtcaacgccagacacctgttgtatcccaattgcccggtaactcgctttccagtccctaacgagaaagtgccctgggaaaccgagtttctgatttacgatccccccttttatacagctgagcgcaaggacgcagcagccatggacccaatgggcgagaaccctatgggtcggaccgggctcagaggccgaggatcgctgtcttgcttcgggccaaatcacactctttatccgatggtaactagatggagacgaaacgaggatggggccatatgcaggaagagcatcaaaaaaatgctggaagtgctggtggttaaattaccactgtcagaacattgggctctgcctggtgggagccgggagcccggggagatgttacccagaaaactcaaaagaatactccgccaggagcattggccatctttcgagaatctgctgaagtgcggcatggaggtgtataaaggctacatggacgacccacgtaacactgacaacgcatggatcgaaaccgtcgcggtgtctgtgcactttcaagaccaaaacgatgttgagcttaacagactgaactccaacttgcatgcctgcgattctggcgccagtatacggtggcaggtcgtggataggcgcatacctctgtacgccaaccataagacacttctccagaaagctgctgccgagtttggagcccattactag

SEQ ID NO: 295764 - DNA, 435 bp, Artificial Sequence
  derived and/or modified sequence
atggagcccagcgccctgcggaaggccggcagcgagcaggaggaggggtttgagggactcccaagacgggttacagatctcgggatggtgagcaacctgaggcgatccaacagttcactgtttaagtcctggagactccaatgcccctttgggaataatgataaacaggagtcactgagctcctggattcctgaaaatatcaagaagaaggagtgcgtgtacttcgtggaaagctctaagttaagcgacgccggcaaggtggtgtgtcaatgcggctacactcacgagcagcatctggaagaagccactaagccgcatacattccagggaacccagtgggatcccaaaaaacatgtccaggaaatgccgacagacgctttcggtgacattgttttcacagggctgtcccagaaagtgaaaaagtatgttagatag

SEQ ID NO: 295765 - DNA, 744 bp, Artificial Sequence
  derived and/or modified sequence
atgctgagccgggagcaggaggaggacggcggcgccggccggcagtaccacgtcaacgccaggcacttgctttatccaaattgcccagtaaccagattccccgttccaaacgagaaggtgccttgggaaacagagttcttgatctatgaccctccattctacaccgccgagcgcaaggatgctgccgcaatggacccgatgggcgaaaatccaatgggaagaaccggtttgagaggcagaggttccctcagttgcttcggacccaatcataccttatatcccatggtaacaaggtggcggcggaatgaggacggagctatttgtcgcaaaagcatcaaaaaaatgcttgaggtccttgtcgtgaaattgcctttgtccgaacactgggctctgcccggggggtctcgagagcccggagagatgttgccgcggaagctcaagaggatcctgcggcaggagcactggccatctttcgaaaacctgctcaagtgcgggatggaagtgtacaaaggatatatggatgatccccggaacacagacaacgcttggatcgaaactgtggcagtgagcgtgcatttccaagaccagaatgacgtggaactcaaccgacttaactctaatcttcatgcctgtgattctggcgcttcgataaggtggcaggtggtggacagacgaattcccctttacgccaatcacaaaacgttattacagaaggccgccgccgagtttggcgcccattactag

SEQ ID NO: 295766 - DNA, 4350 bp, Artificial Sequence
  derived and/or modified sequence
atggagccctccgctctgaggaaagctgggagtgaacaggaggaaggctttgaaggcctcccacgacgcgttaccgatttaggaatggtttccaatcttcggagatcgaattcctccctgtttaaaagctggagactgcaatgtccttttggcaataacgacaagcaggaatccctctcctcttggattcctgaaaacatcaagaaaaaggagtgcgtctattttgtggagagctcgaagctttctgatgctggtaaggtcgtctgtcagtgtggttacacacatgagcagcatttggaagaagcaaccaagccccacacttttcaaggaacccaatgggatccaaagaaacacgtgcaggaaatgcccaccgacgctttcggagacatcgtttttacaggactgtcacagaaagtaaagaaatacgtaagagtgagtcaggacactccatctagcgtcatctaccacctgatgactcagcactggggcctggatgtgccaaacttactcatatcagtcacaggcggtgccaagaactttaacatgaagcccagactcaaatcaatatttagaagagggttggtgaaggtagctcaaaccaccggtgcttggattataacaggagggtcacatacaggggttatgaaacaggtcggggaggcagttagggactttagccttagtagtagctacaaagagggagagctgattaccataggtgtcgccacgtggggcaccgtccaccgaagagaagggctcattcacccaaccggatctttccctgcggaatacatattggatgaggacggccaggggaatctaacatgcttagattctaatcactctcattttatcctcgtggatgatgggactcacgggcagtacggagtggagattccactgcgaacaagactagaaaagttcatctctgagcagaccaaagaaaggggcggtgtcgccattaagatccctatcgtatgcgtggtactggagggaggtcccggaacacttcatacgattgacaacgcaaccactaacggaacaccatgcgttgtcgtggaagggtctggtagagtggctgacgtcatcgcccaggtggccaatctacccgtgtccgatattaccatcagtctgatacagcaaaagctctccgtcttctttcaggagatgtttgagacgttcaccgagagccggatcgtcgaatggactaagaagattcaggacatcgtgcggaggaggcagctactcactgttttccgggaggggaaggatggccagcaagatgtcgacgtcgccattctccaagccctgctaaaggcatctcggtcccaggatcattttggccacgaaaattgggaccaccagctgaagcttgccgtagcttggaaccgggtggacatcgccaggagcgagatttttatggacgagtggcagtggaagccgtcagatctccaccctaccatgaccgccgctctcatctccaataaacctgaatttgtgaaattattcttggagaacggggtgcagctgaaggaatttgtaacttgggataccctactttacctttatgaaaatctggatcctagctgcctgttccacagtaagctgcagatgcatcatgtggcccaggtgctgcgggagctgcttggggatttcactcagcctctgtacccaagacctaggcacaatgacaggctgcgcctgctgctgccagtgccacatgttaaactgaatgtacaaggcgtgtcacttaggtctctgtacaagagaagctctggacatgtaacctttacaatggatccgatccgcgatctgcttatctgggccatcgtccaaaatcgtcgcgaattggctggaatcatttgggcccagagtcaggattgcatcgcggctgctctggcgtgcagcaagattttaaaagagctaagcaaagaggaagaggacaccgactcatcagaggagatgttagcactcgcggaggaatacgagcaccgcgcaataggagtgtttacggagtgttaccgcaaagacgaggaaagagctcaaaagcttcttacccgtgtctcagaagcttggggaaaaacaacctgtctccagttagccttagaggctaaggacatgaagttcgtttctcatggcggtatccaggcctttttgaccaaggtctggtggggccagttgagcgtggacaatggtctgtggcgcgtcacactctgcatgttggcatttcctctgctgctgactggactgatctcctttagagaaaagagacttcaagacgtcggcactccagcagcgagggccagagctttcttcacggcaccggtggtggtgtttcatctgaacatcctctcatacttcgcgttcctgtgtctttttgcgtacgtgctgatggttgactttcagcctgtgccatcatggtgcgagtgtgcaatatatctgtggctgttctctctcgtatgcgaggagatgaggcagctgttttatgacccagacgagtgtggtctcatgaagaaggctgccctctatttctccgacttctggaataagcttgatgtcggggctattctactgttcgtggccggactgacgtgccggctgattcccgctaccctgtaccccggacgcgtgattctgagcctggattttatacttttctgtctgaggttaatgcacatcttcaccattagcaagacgcttggtcccaagatcatcatagtgaagcgaatgatgaaagatgtgtttttcttcttattcttgcttgccgtgtgggtagtgtcattcggagtggcaaaacaggcgatactcattcacaacgaacggagagtggactggctgtttagaggggcagtgtatcacagctaccttactatcttcggccagatccccggatatattgacggagtgaatttcaatcccgagcattgctccccgaatggcactgacccctataagccgaagtgtccggaatctgatgccacccaacagcgccctgctttcccggagtggcttactgtgctgttactgtgtctgtacctgttattcacaaacattctactgcttaatctcctgatagcaatgttcaactacactttccaacaggttcaggagcatactgatcagatttggaaatttcaacgccacgacctgatcgaagagtatcatggcagaccagccgctccgccacctttcatcctcctgtcacatttgcagctttttatcaagagagtagtccttaagacccccgcaaagcggcacaaacagctgaagaacaaactggaaaaaaatgaggaggctgcccttctcagctgggagatttaccttaaggagaattatctgcagaaccggcagttccaacagaagcaacgcccagagcagaaaatcgaggatattagcaacaaggtggacgccatggtggacttactagacctggatcctctgaaaaggtcaggctctatggagcagcgcctcgcttccttggaggagcaggtagcacagaccgcccaggcacttcactggattgtcagaacactccgagcatctggattttccagtgaggcagacgtacccaccttagcctcacagaaagctgccgaggagccagatgccgagcccggaggaagaaagaagacagaggagcccggtgactcctatcatgtaaatgcgagacatctcctatatcccaattgtcccgttacacggtttccggttccaaatgagaaagtcccttgggaaacagaatttctcatctacgatccccctttttacacagctgagcgcaaagacgctgcagccatggatcccatgggagaaaaccctatgggtcggactggactgagagggcgtgggagtctatcttgctttggccctaaccacacactatacccgatggtcacccggtggcgcagaaatgaggacggagcaatctgcaggaagtcaattaaaaagatgcttgaggtgttagtagtgaagctacctctgagtgagcactgggcactcccgggtgggtccagagaaccaggtgagatgctcccccgaaaactgaagagaatcctgcggcaagagcactggccgagtttcgaaaatcttttaaaatgtgggatggaggtgtataaggggtacatggatgacccacgcaacacggataacgcttggatcgaaacggttgcagtctctgtccactttcaggaccaaaacgatgtggaactgaatcgtctgaactccaatctgcacgcttgtgactccggggctagcatccgctggcaggtggtcgatcgcagaatacctctttatgccaaccataaaactctcctgcaaaaagccgctgccgaatttggtgcccactactag

SEQ ID NO: 295767 - DNA, 435 bp, Artificial Sequence
  derived and/or modified sequence
atggagccttctgcactcagaaaagcgggatcagagcaagaggagggctttgaaggccttccacgtcgggtaaccgacctaggcatggtgtccaaccttcggcgatctaattcctccctgttcaagtcgtggagactgcagtgcccctttggcaacaacgacaaacaggagtccctgtcctcgtggatacctgaaaatatcaaaaagaaggaatgcgtctacttcgtggaaagcagcaaactctcagatgccggtaaggtcgtgtgtcaatgtgggtatacacacgaacagcacctggaagaagccacgaagcctcatacatttcagggaacccaatgggatccgaaaaagcacgtccaggaaatgcccaccgacgcatttggagacatcgttttcactggactgtcccagaaggtaaagaagtacgtgcgatag

SEQ ID NO: 295768 - DNA, 744 bp, Artificial Sequence
  derived and/or modified sequence
atgttatctagggaacaggaagaggacggcggagccggtcggcaatatcatgtgaacgctaggcatctgctgtatcctaactgcccagtaactcggttcccagtgccaaacgaaaaggtgccatgggagacggaatttctcatctatgatcctccattttacaccgcagaacgaaaagacgctgccgcaatggaccccatgggcgaaaaccccatgggacggactgggctccggggacgcggtagtctgtcttgctttggacccaaccacactttatacccaatggttactcgctggcggcgaaacgaagacggggctatttgtagaaagtcaatcaaaaagatgctggaagtcttggtggttaagctgccactatctgaacactgggcacttcccggaggcagccgggagcccggagagatgctgccgagaaagctgaaacgcattttacggcaggagcactggccctctttcgaaaacctcctgaagtgtgggatggaagtgtataaagggtatatggacgatcctagaaatacagataacgcctggattgagaccgtcgccgtctccgttcactttcaagatcagaacgatgtcgaactgaataggctgaacagtaaccttcacgcctgcgatagcggggcttctatcagatggcaggtcgttgacagaagaatccctctatacgccaatcacaagaccctcctgcagaaagctgccgctgagttcggcgcacactattag

SEQ ID NO: 295769 - DNA, 5627 bp, Artificial Sequence
  derived and/or modified sequence
tgggggtctcagaatggagccctcagccctgaggaaagctggctcggagcaggaggagggctttgaggggctgcccagaagggtcactgacctggggatggtctccaatctccggcgcagcaacagcagcctcttcaagagctggaggctacagtgccccttcggcaacaatgacaagcaagaaagcctcagttcgtggattcctgaaaacatcaagaagaaagaatgcgtgtattttgtggaaagttccaaactgtctgatgctgggaaggtggtgtgtcagtgtggctacacgcatgagcagcacttggaggaggctaccaagccccacaccttccagggcacacagtgggacccaaagaaacatgtccaggagatgccaaccgatgcctttggcgacatcgtcttcacgggcctgagccagaaggtgaaaaagtacgtccgagtctcccaggacacgccctccagcgtgatctaccacctcatgacccagcactgggggctggacgtccccaatctcttgatctcggtgaccgggggggccaagaacttcaacatgaagccgcggctgaagagcattttccgcagaggcctggtcaaggtggctcagaccacaggggcctggatcatcacaggggggtcccacaccggcgtcatgaagcaggtaggcgaggcggtgcgggacttcagcctgagcagcagctacaaggaaggcgagctcatcaccatcggagtcgccacctggggcactgtccaccgccgcgagggcctgatccatcccacgggcagcttccccgccgagtacatactggatgaggatggccaagggaacctgacctgcctagacagcaaccactctcacttcatcctcgtggacgacgggacccacggccagtacggggtggagattcctctgaggaccaggctggagaagttcatatcggagcagaccaaggaaagaggaggtgtggccatcaagatccccatcgtgtgcgtggtgctggagggcggcccgggcacgttgcacaccatcgacaacgccaccaccaacggcaccccctgtgtggttgtggagggctcgggccgcgtggccgacgtcattgcccaggtggccaacctgcctgtctcggacatcactatctccctgatccagcagaaactgagcgtgttcttccaggagatgtttgagaccttcacggaaagcaggattgtcgagtggaccaaaaagatccaagatatcgtccggaggcggcagctgctgactgtcttccgggaaggcaaggatggtcagcaggacgtggatgtggccatcttgcaggccttgctgaaagcctcacggagccaagaccactttggccacgagaactgggaccaccagctgaaactggcagtggcatggaatcgcgtggacattgcccgcagtgagatcttcatggatgagtggcagtggaagccttcagatctgcaccccacgatgacagctgcactcatctccaacaagcctgagtttgtgaagctcttcctggagaacggggtgcagctgaaggagtttgtcacctgggacaccttgctctacctgtacgagaacctggacccctcctgcctgttccacagcaagctgcagatgcaccacgtggcccaggtgctgcgggagctgctgggggacttcacgcagccgctttatccccggccccggcacaacgaccggctgcggctcctgctgcccgttccccacgtcaagctcaacgtgcagggagtgagcctccggtccctctacaagcgttcctcaggccatgtgaccttcaccatggaccccatccgtgaccttctcatttgggccattgtccagaaccgtcgggagctggcaggaatcatctgggctcagagccaggactgcatcgcagcggccttggcctgcagcaagatcctgaaggaactgtccaaggaggaggaggacacggacagctcggaggagatgctggcgctggcggaggagtatgagcacagagccatcggggtcttcaccgagtgctaccggaaggacgaagagagagcccagaaactgctcacccgcgtgtccgaggcctgggggaagaccacctgcctgcagctcgccctggaggccaaggacatgaagtttgtgtctcacgggggcatccaggccttcctgaccaaggtgtggtggggccagctctccgtggacaatgggctgtggcgtgtgaccctgtgcatgctggccttcccgctgctcctcaccggcctcatctccttcagggagaagaggctgcaggatgtgggcacccccgcggcccgcgcccgtgccttcttcaccgcacccgtggtggtcttccacctgaacatcctctcctacttcgccttcctctgcctgttcgcctacgtgctcatggtggacttccagcctgtgccctcctggtgcgagtgtgccatctacctctggctcttctccttggtgtgcgaggagatgcggcagctcttctatgaccctgacgagtgcgggctgatgaagaaggcagccttgtacttcagtgacttctggaataagctggacgtcggcgcaatcttgctcttcgtggcagggctgacctgcaggctcatcccggcgacgctgtaccccgggcgcgtcatcctctctctggacttcatcctgttctgcctccggctcatgcacatttttaccatcagtaagacgctggggcccaagatcatcattgtgaagcggatgatgaaggacgtcttcttcttcctcttcctgctggctgtgtgggtggtgtccttcggggtggccaagcaggccatcctcatccacaacgagcgccgggtggactggctgttccgaggggccgtctaccactcctacctcaccatcttcgggcagatcccgggctacatcgacggtgtgaacttcaacccggagcactgcagccccaatggcaccgacccctacaagcctaagtgccccgagagcgacgcgacgcagcagaggccggccttccctgagtggctgacggtcctcctactctgcctctacctgctcttcaccaacatcctgctgctcaacctcctcatcgccatgttcaactacaccttccagcaggtgcaggagcacacggaccagatttggaagttccagcgccatgacctgatcgaggagtaccacggccgccccgccgcgccgccccccttcatcctcctcagccacctgcagctcttcatcaagagggtggtcctgaagactccggccaagaggcacaagcagctcaagaacaagctggagaagaacgaggaggcggccctgctatcctgggagatctacctgaaggagaactacctccagaaccgacagttccagcaaaagcagcggcccgagcagaagatcgaggacatcagcaataaggttgacgccatggtggacctgctggacctggacccactgaagaggtcgggctccatggagcagaggttggcctccctggaggagcaggtggcccagacagcccaagccctgcactggatcgtgaggacgctgcgggccagcggcttcagctcggaggcggacgtccccactctggcctcccagaaggccgcggaggagccggatgctgagccgggaggcaggaagaagacggaggagccgggcgacagctaccacgtgaatgcccggcacctcctctaccccaactgccctgtcacgcgcttccccgtgcccaacgagaaggtgccctgggagacggagttcctgatctatgacccacccttttacacggcagagaggaaggacgcggccgccatggaccccatgggagagaaccccatgggccgcacaggactgcgtgggcgcgggagcctcagctgcttcggacccaaccacacgctgtaccccatggtcacgcggtggaggcggaacgaggatggagccatctgcaggaagagcataaagaagatgctggaagtgctggtggtgaagctccctctctccgagcactgggccctgcctgggggctcccgggagccaggggagatgctacctcggaagctgaagcggatcctccggcaggagcactggccgtcttttgaaaacttgctgaagtgcggcatggaggtgtacaaaggctacatggatgacccgaggaacacggacaatgcctggatcgagacggtggccgtcagcgtccacttccaggaccagaatgacgtggagctgaacaggctgaactctaacctgcacgcctgcgactcgggggcctccatccgatggcaggtggtggacaggcgcatcccactctatgcgaaccacaagaccctcctccagaaggcagccgctgagttcggggctcactactgactgtgccctcaggctgggcggctccagtccatagacgttccccccagaaaccagggcttctctctcctgagcctggccaggactcaggctgttcctgggccctgcacatgatggggtttggtggacccagtgcccctcacggctgccgcaagtctgctgcagatgacctcatgaactggaaggggtcaaggtgacccgggaggagagctcaagacagggcacaggctactcagagctgaggggcccctgggacccttggccatcaggcgaggggctgggcctgtgcagctgggcccttggccagagtccactcccttcctggctgtgtcaccccgagcagctcatccaccatggaggtcattggcctgaggcaagttccccggagagtcggggtcccctgtggccccctcaggcctatgtctgtgaggaaggggccctgccactctccccaagagggcctccatgtttcgaggtgcctcaacatggagccttgcctggcctgggctaggggcactgtctgaactcctgactgtcaggataaactccgtgggggtacaggagcccagacaaagcccaggcctgtcaagagacgcagagggcccctgccagggttggccccagggaccctgggacgaggctgcagaagctctccctccctactccctgggagccacgtgctggccatgtggccagggacggcatgagcaggaggcggggacgtgggggccttctggtttggtgtcaacagctcacaggagcgtgaaccatgagggccctcaggaggggaacgtggtaaaacccaagacattaaatctgccatctcaggcctggctggctcttctgtgctttccacaaataaagttcctgacacgtccagggccaggggctgtgtgacggctgcctgaagttctcctcgatcccccggtgagcttcctgcagcctgtggatgtcctgcagcccctcagccctacccccaagtttctcctctgacccatcagctccctgtcttcattttcctaaacctgggctccagcatcgtccccaagcccaccaggccaggatgcaggcatccacatgccctcctccttggcttcccctgcgtggtggtgccaatgtgccctggcacccctgcagaggctccggatggagcctggggctgcctggccactgagcactggccgaggtgatgcccacccttccctggacaggcctctgtcttccacctgacccaaagctctctagccacccccttgtccccaggtat

SEQ ID NO: 295770 - DNA, 582 bp, Artificial Sequence
  derived and/or modified sequence
gcgcgagcccgggtgcggggactgaggcggccgtcccgggagcttgtgaagcaaccaccccatgtgtctctagaaccccagtgtagcgagctggagagaggactgtcctgagggcagcaggcctggttgcagctggcgtgggggtctcagaatggagccctcagccctgaggaaagctggctcggagcaggaggagggctttgaggggctgcccagaagggtcactgacctggggatggtctccaatctccggcgcagcaacagcagcctcttcaagagctggaggctacagtgccccttcggcaacaatgacaagcaagaaagcctcagttcgtggattcctgaaaacatcaagaagaaagaatgcgtgtattttgtggaaagttccaaactgtctgatgctgggaaggtggtgtgtcagtgtggctacacgcatgagcagcacttggaggaggctaccaagccccacaccttccagggcacacagtgggacccaaagaaacatgtccaggagatgccaaccgatgcctttggcgacatcgtcttcacgggcctgagccagaaggtgaaaaagtacgtccg

SEQ ID NO: 295771 - DNA, 1669 bp, Artificial Sequence
  derived and/or modified sequence
agccctgcactggatcgtgaggacgctgcgggccagcggcttcagctcggaggcggacgtccccactctggcctcccagaaggccgcggaggagccggatgctgagccgggagcaggaagaagacggaggagccgggcgacagtaccacgtgaatgcccggcacctcctctaccccaactgccctgtcacgcgcttccccgtgcccaacgagaaggtgccctgggagacggagttcctgatctatgacccacccttttacacggcagagaggaaggacgcggccgccatggaccccatgggagagaaccccatgggccgcacaggactgcgtgggcgcgggagcctcagctgcttcggacccaaccacacgctgtaccccatggtcacgcggtggaggcggaacgaggatggagccatctgcaggaagagcataaagaagatgctggaagtgctggtggtgaagctccctctctccgagcactgggccctgcctgggggctcccgggagccaggggagatgctacctcggaagctgaagcggatcctccggcaggagcactggccgtcttttgaaaacttgctgaagtgcggcatggaggtgtacaaaggctacatggatgacccgaggaacacggacaatgcctggatcgagacggtggccgtcagcgtccacttccaggaccagaatgacgtggagctgaacaggctgaactctaacctgcacgcctgcgactcgggggcctccatccgatggcaggtggtggacaggcgcatcccactctatgcgaaccacaagaccctcctccagaaggcagccgctgagttcggggctcactactgactgtgccctcaggctgggcggctccagtccatagacgttccccccagaaaccagggcttctctctcctgagcctggccaggactcaggctgttcctgggccctgcacatgatggggtttggtggacccagtgcccctcacggctgccgcaagtctgctgcagatgacctcatgaactggaaggggtcaaggtgacccgggaggagagctcaagacagggcacaggctactcagagctgaggggcccctgggacccttggccatcaggcgaggggctgggcctgtgcagctgggcccttggccagagtccactcccttcctggctgtgtcaccccgagcagctcatccaccatggaggtcattggcctgaggcaagttccccggagagtcggggtcccctgtggccccctcaggcctatgtctgtgaggaaggggccctgccactctccccaagagggcctccatgtttcgaggtgcctcaacatggagccttgcctggcctgggctaggggcactgtctgaactcctgactgtcaggataaactccgtgggggtacaggagcccagacaaagcccaggcctgtcaagagacgcagagggcccctgccagggttggccccagggaccctgggacgaggctgcagaagctctccctccctactccctgggagccacgtgctggccatgtggccagggacggcatgagcaggaggcggggacgtgggggccttctggtttggtgtcaacagctcacaggagcgtgaaccatgagggccctcaggaggggaacgtggtaaaacccaagacattaaatctgccatctcaggc

SEQ ID NO: 295772 - protein, 1980 aa, Artificial Sequence
  derived and/or modified sequence
MNPTNPFSGQQPSAFSASSSNVGTLPSKPPFRFGQPSLFGQNSTLSGKSSGFSQVSSFPASSGVSHSSSVQTLGFTQTSSVGPFSGLEHTSTFVATSGPSSSSVLGNTGFSFKSPTSVGAFPSTSAFGQEAGEIVNSGFGKTEFSFKPLENAVFKPILGAESEPEKTQSQIASGFFTFSHPISSAPGGLAPFSFPQVTSSSATTSNFTFSKPVSSNNSLSAFTPALSNQNVEEEKRGPKSIFGSSNNSFSSFPVSSAVLGEPFQASKAGVRQGCEEAVSQVEPLPSLMKGLKRKEDQDRSPRRHGHEPAEDSDPLSRGDHPPDKRPVRLNRPRGGTLFGRTIQDVFKSNKEVGRLGNKEAKKETGFVESAESDHMAIPGGNQSVLAPSRIPGVNKEEETESREKKEDSLRGTPARQSNRSESTDSLGGLSPSEVTAIQCKNIPDYLNDRTILENHFGKIAKVQRIFTRRSKKLAVVHFFDHASAALARKKGKSLHKDMAIFWHRKKISPNKKPFSLKEKKPGDGEVSPSTEDAPFQHSPLGKAAGRTGASSLLNKSSPVKKPSLLKAHQFEGDSFDSASEGSEGLGPCVLSLSTLIGTVAETSKEKYRLLDQRDRIMRQARVKRTDLDKARTFVGTCLDMCPEKERYMRETRSQLSVFEVVPGTDQVDHAAAVKEYSRSSADQEEPLPHELRPLPVLSRTMDYLVTQIMDQKEGSLRDWYDFVWNRTRGIRKDITQQHLCDPLTVSLIEKCTRFHIHCAHFMCEEPMSSFDAKINNENMTKCLQSLKEMYQDLRNKGVFCASEAEFQGYNVLLSLNKGDILREVQQFHPAVRNSSEVKFAVQAFAALNSNNFVRFFKLVQSASYLNACLLHCYFSQIRKDALRALNFAYTVSTQRSTIFPLDGVVRMLLFRDCEEATDFLTCHGLTVSDGCVELNRSAFLEPEGLSKTRKSVFITRKLTVSVGEIVNGGPLPPVPRHTPVCSFNSQNKYIGESLAAELPVSTQRPGSDTVGGGRGEECGVEPDAPLSSLPQSLPAPAPSPVPLPPVLALTPSVAPSLFQLSVQPEPPPPEPVPMYSDEDLAQVVDELIQEALQRDCEEVGSAGAAYAAAALGVSNAAMEDLLTAATTGILRHIAAEEVSKERERREQERQRAEEERLKQERELVLSELSQGLAVELMERVMMEFVRETCSQELKNAVETDQRVRVARCCEDVCAHLVDLFLVEEIFQTAKETLQELQCFCKYLQRWREAVTARKKLRRQMRAFPAAPCCVDVSDRLRALAPSAECPIAEENLARGLLDLGHAGRLGISCTRLRRLRNKTAHQMKVQHFYQQLLSDVAWASLDLPSLVAEHLPGRQEHVFWKLVLVLPDVEEQSPESCGRILANWLKVKFMGDEGSVDDTSSDAGGIQTLSLFNSLSSKGDQMISVNVCIKVAHGALSDGAIDAVETQKDLLGASGLMLLLPPKMKSEDMAEEDVYWLSALLQLKQLLQAKPFQPALPLVVLVPSPGGDAVEKEVEDGLMLQDLVSAKLISDYTVTEIPDTINDLQGSTKVLQAVQWLVSHCPHSLDLCCQTLIQYVEDGIGHEFSGRFFHDRRERRLGGLASQEPGAIIELFNSVLQFLASVVSSEQLCDLSWPVTEFAEAGGSRLLPHLHWNAPEHLAWLKQAVLGFQLPQMDLPPLGAPWLPVCSMVVQYASQIPSSRQTQPVLQSQVENLLHRTYCRWKSKSPSPVHGAGPSVMEIPWDDLIALCINHKLRDWTPPRLPVTSEALSEDGQICVYFFKNDLKKYDVPLSWEQARLQTQKELQLREGRLAIKPFHPSANNFPIPLLHMHRNWKRSTECAQEGRIPSTEDLMRGASAEELLAQCLSSSLLLEKEENKRFEDQLQQWLSEDSGAFTDLTSLPLYLPQTLVSLSHTIEPVMKTSVTTSPQSDMMREQLQLSEATGTCLGERLKHLERLIRSSREEEVASELHLSALLDMVDI

SEQ ID NO: 295773 - protein, 94 aa, Artificial Sequence
  derived and/or modified sequence
MNPTNPFSGQQPSAFSASSSNVGTLPSKPPFRFGQPSLFGQNSTLSGKSSGFSQVSSFPASSGVSHSSSVQTLGFTQTSSVGPFSGLEHTSTFV

SEQ ID NO: 295774 - protein, 475 aa, Artificial Sequence
  derived and/or modified sequence
MQVTFIYVCLKGLMLQDLVSAKLISDYTVTEIPDTINDLQGSTKVLQAVQWLVSHCPHSLDLCCQTLIQYVEDGIGHEFSGRFFHDRRERRLGGLASQEPGAIIELFNSVLQFLASVVSSEQLCDLSWPVTEFAEAGGSRLLPHLHWNAPEHLAWLKQAVLGFQLPQMDLPPLGAPWLPVCSMVVQYASQIPSSRQTQPVLQSQVENLLHRTYCRWKSKSPSPVHGAGPSVMEIPWDDLIALCINHKLRDWTPPRLPVTSEALSEDGQICVYFFKNDLKKYDVPLSWEQARLQTQKELQLREGRLAIKPFHPSANNFPIPLLHMHRNWKRSTECAQEGRIPSTEDLMRGASAEELLAQCLSSSLLLEKEENKRFEDQLQQWLSEDSGAFTDLTSLPLYLPQTLVSLSHTIEPVMKTSVTTSPQSDMMREQLQLSEATGTCLGERLKHLERLIRSSREEEVASELHLSALLDMVDI

SEQ ID NO: 295775 - DNA, 285 bp, Artificial Sequence
  derived and/or modified sequence
atgaaccccaccaaccccttcagcggccagcagcccagcgccttcagcgccagcagcagcaacgtgggcaccctgcccagcaagccccccttcagattcggccagcccagcctgttcggccagaacagcaccctgagcggcaagagcagcggcttcagccaggtgagcagcttccccgccagcagcggcgtgagccacagcagcagcgtgcagaccctgggcttcacccagaccagcagcgtgggccccttcagcggcctggagcacaccagcaccttcgtgtag

SEQ ID NO: 295776 - DNA, 1428 bp, Artificial Sequence
  derived and/or modified sequence
atgcaggtgaccttcatctacgtgtgcctgaagggcctgatgctgcaggacctggtgagcgccaagctgatcagcgactacaccgtgaccgagatccccgacaccatcaacgacctgcagggcagcaccaaggtgctgcaggccgtgcagtggctggtgagccactgcccccacagcctggacctgtgctgccagaccctgatccagtacgtggaggacggcatcggccacgagttcagcggcagattcttccacgacagaagagagagaagactgggcggcctggccagccaggagcccggcgccatcatcgagctgttcaacagcgtgctgcagttcctggccagcgtggtgagcagcgagcagctgtgcgacctgagctggcccgtgaccgagttcgccgaggccggcggcagcagactgctgccccacctgcactggaacgcccccgagcacctggcctggctgaagcaggccgtgctgggcttccagctgccccagatggacctgccccccctgggcgccccctggctgcccgtgtgcagcatggtggtgcagtacgccagccagatccccagcagcagacagacccagcccgtgctgcagagccaggtggagaacctgctgcacagaacctactgcagatggaagagcaagagccccagccccgtgcacggcgccggccccagcgtgatggagatcccctgggacgacctgatcgccctgtgcatcaaccacaagctgagagactggaccccccccagactgcccgtgaccagcgaggccctgagcgaggacggccagatctgcgtgtacttcttcaagaacgacctgaagaagtacgacgtgcccctgagctgggagcaggccagactgcagacccagaaggagctgcagctgagagagggcagactggccatcaagcccttccaccccagcgccaacaacttccccatccccctgctgcacatgcacagaaactggaagagaagcaccgagtgcgcccaggagggcagaatccccagcaccgaggacctgatgagaggcgccagcgccgaggagctgctggcccagtgcctgagcagcagcctgctgctggagaaggaggagaacaagagattcgaggaccagctgcagcagtggctgagcgaggacagcggcgccttcaccgacctgaccagcctgcccctgtacctgccccagaccctggtgagcctgagccacaccatcgagcccgtgatgaagaccagcgtgaccaccagcccccagagcgacatgatgagagagcagctgcagctgagcgaggccaccggcacctgcctgggcgagagactgaagcacctggagagactgatcagaagcagcagagaggaggaggtggccagcgagctgcacctgagcgccctgctggacatggtggacatctag

SEQ ID NO: 295777 - DNA, 5943 bp, Artificial Sequence
  derived and/or modified sequence
atgaaccccaccaacccgttttccggacaacagccctcggcatttagcgccagttcgtcaaacgtgggaacgctgccttccaagccaccgtttcggtttggccagccaagcctgtttgggcagaactctacacttagtgggaagagctccggattcagtcaggtcagtagcttcccggcgagcagcggggttagccactcctcaagtgtgcaaacgctcggttttacccagactagctccgtcgggccattcagcggcctagaacatacctccacctttgttgctaccagcgggccctcttctagctccgtcctgggcaacaccggattctcctttaaaagccctacctcagtcggggctttcccctccacttccgccttcggacaggaggccggagaaatcgtaaattctggctttggaaagactgagttctcctttaaacctctggaaaacgccgtatttaagcccatactcggggccgagtctgagcccgaaaaaacccaatcacagatcgcatcaggatttttcacattcagccacccaatcagcagcgctcctggtggtctggcacctttcagttttcctcaggtgacaagctccagtgccacaacatccaatttcacgttttctaagcctgtttcctcaaacaactccctctctgcgttcactcctgccttgtcaaaccaaaacgttgaggaggagaagcgcgggcccaagagcatcttcggctcaagtaacaatagtttctcttccttccccgtgtcctcagcggtcttgggagaacccttccaagctagtaaagcaggcgtgcgacagggttgcgaagaagccgtgagccaagtcgagcccctgccttccctcatgaaaggattaaagcgcaaagaagaccaggaccgaagtccacgacgccacggccacgaacctgcagaagacagcgatccgcttagccgtggtgaccatcctccggataaaagaccagttcgtctgaataggccacgaggcgggaccctattcgggagaaccatccaagacgtttttaagtctaataaagaggtcggtcggctagggaacaaagaagctaaaaaagagacaggtttcgtcgaatcagcagagagcgaccacatggccattcctggtggtaaccagtcggtcctcgctccaagtagaatacctggagtgaacaaagaggaggagacagagtcacgggaaaagaaagaagactctttacgcggaactccagcacgccaatcaaaccggagcgaatccactgacagtcttggaggcctgtctccaagcgaggtgactgcgatccagtgcaagaacattcctgactatctgaacgaccgtacaatactggagaaccactttggaaagatcgcaaaggtccaacggatattcacgaggcggtccaaaaaactggccgtggtgcatttcttcgaccatgctagcgcagccttggccagaaaaaaagggaagtccctgcacaaagacatggccatcttttggcaccggaaaaaaataagccctaacaagaagcccttctctctcaaggagaagaagcccggcgacggcgaggtatctcctagtaccgaggatgctccattccagcatagcccacttggaaaggcagccggtaggaccggagcatcaagcctgttaaataagagttctcctgtgaagaagccctccctattaaaggcccaccagtttgagggtgattcgttcgattcagcgtccgaaggctctgaaggacttggaccctgcgtattaagcctgtctacactcattgggacagtcgcagaaacaagtaaggagaaataccgccttcttgaccaaagggaccggatcatgagacaggcccgggttaagaggaccgatctggacaaagcccggacctttgtaggaacatgtttggacatgtgtccagaaaaagagaggtacatgcgagagactcgatcccagttatccgttttcgaggtcgtaccgggcactgatcaggtcgaccatgccgctgcagtgaaggagtactcacgtagctccgctgaccaggaggagcccctgccacacgagctgagaccactcccggtccttagcagaactatggattacctggtaactcaaattatggaccaaaaagaaggctccctacgggattggtacgatttcgtttggaatagaacccgcgggatacggaaagacattactcaacaacatctgtgcgatccgctgaccgtgagcctgatcgaaaagtgcaccaggtttcatatccattgcgctcacttcatgtgcgaggagcctatgagcagtttcgatgcaaaaattaataatgaaaatatgactaaatgtctacagtccctcaaggaaatgtaccaggacctgaggaataagggagtgttctgcgctagcgaagctgagttccagggatataacgtcctcctgagcctgaataagggcgatattttgagggaggtccaacagttccatcccgcggtgaggaactcctctgaggtgaaattcgccgtgcaggcattcgcggcacttaactctaataactttgtgaggtttttcaagctggtgcaatcagcctcctacctgaatgcatgcttactacattgctattttagccagattcgaaaggacgctttacgggcacttaatttcgcgtacactgtatctacacagagaagcactatttttccactcgacggtgtggtgcgtatgctgctctttagggactgcgaggaggcaactgactttcttacgtgccatggcttaacagtaagcgatggctgtgtagagctaaacaggagtgccttcctcgagcctgaaggtttgtctaaaaccagaaaatcagtcttcattaccagaaagctaactgtgtccgtgggagagattgtgaacggaggacccctgcctcccgtccctcgccacacacccgtgtgctcattcaatagccagaataagtatatcggggagagtctcgctgctgagttgcccgtgtcaacacagcgcccgggtagcgatactgtgggaggcggtcggggggaagagtgcggagtagagcccgacgcccccttgtccagtctgccccagagcctgcccgcccccgcgcctagcccggtgcctctacctcctgtcttagccctgacgcctagcgtggcaccttctctgtttcagctgtctgtgcagcctgaacccccacccccagaaccagtcccaatgtactcagacgaagatctggcccaagttgtagacgagctcatacaagaggccttacaacgtgactgcgaggaagtagggagcgctggggcagcctacgctgccgcagcactgggagtgtcaaatgctgcaatggaggacctgctcactgccgcaacaacaggaatcctccgacatatcgcggcggaagaggtatccaaagagagggaacgacgcgaacaagaaaggcagagagccgaagaagagcgcctcaagcaggagagggaactggttctgtctgagttatcccaaggcctagctgtagagctgatggagagggtgatgatggaatttgtgcgcgagacatgcagccaggaattaaagaacgctgttgaaaccgatcagcgcgtacgcgtagccagatgctgtgaagacgtgtgcgcccacttagtggatctctttctggtggaggagatcttccagaccgcgaaggagaccctccaggagctccagtgcttctgcaaatatctgcagcgatggagggaagcagtgacggctcgaaaaaagctccggcgacagatgagggccttcccggccgccccctgctgcgtggatgtcagtgatagactgcgggccctggccccatcagccgagtgtcctatagcagaggaaaatctggcccgcggcctgttggatcttgggcatgctgggcgactggggattagctgtacgcgcttgagaagactgcgcaataaaaccgctcatcagatgaaagtccagcatttttatcaacagctcctgagcgacgttgcctgggccagtttagacttacccagtctggtggccgagcatctccccggtcgccaggaacacgtcttttggaagctggtgctggtcctccccgacgttgaggagcagagccctgagtcatgcgggcgaatcctggccaactggcttaaagtgaagttcatgggtgacgaggggtcagtagacgataccagctcagacgcaggcgggattcagacactatccctttttaatagcctctcttcaaagggggaccaaatgatatctgtcaatgtctgcatcaaagtggctcatggagccctgtcagacggagctatagacgccgttgaaacccagaaagacctgctgggggcaagtggtttaatgcttctgctacctcctaagatgaaaagtgaagacatggccgaagaagatgtgtactggctgtcggcactcctgcagcttaagcagctcctgcaggccaagcctttccagcccgcgctgcctttagtggtactggtaccctcgcctggaggagacgctgtggaaaaagaggtagaggatgggctgatgctccaggacctggtgagcgcaaaactgataagcgactataccgtgacagaaattcctgataccattaacgatctccagggctccaccaaggtgctgcaagccgttcaatggctggtgtcccactgtcctcattccttggacctatgctgccagactctcatacagtacgtggaagatggcatcggccacgagttttccgggaggttcttccatgaccgacgggaaaggcgccttggcggcctcgcgtcccaggagcccggggcgatcatcgaacttttcaattcagtcctgcaattcttagcctctgtcgtgtcctccgaacagctgtgtgacttgtcctggccagtgaccgagttcgctgaagcaggtgggtcaagacttttgccccacctgcattggaatgcgcctgagcatctcgcctggctcaaacaagccgtcctcgggttccagctgccacagatggacctgcccccactgggggctccctggttacctgtttgtagtatggtagtacagtacgcttctcagattcctagttcaaggcagacccagcctgtactacagagccaagtggagaacttgcttcacaggacttactgcaggtggaaaagcaagtccccatcacccgtgcacggtgctggcccctccgtcatggagatcccgtgggatgacttgatagcgctgtgcattaaccataagctgagggattggacccctcccagattgcccgtcacgtctgaagcgctctccgaagacgggcagatctgtgtttatttcttcaagaacgatctgaaaaaatacgatgtgccactgagttgggaacaagcacgcctccagacccagaaagagcttcagctgcgagaaggtcggctggccattaagccctttcatccaagcgcaaacaatttcccaatccccctgctgcatatgcatagaaattggaaaaggtccaccgaatgcgctcaggaggggagaatccctagtacggaagatctcatgcggggagctagcgctgaagagctactggcccagtgcctgtccagcagcttgctgcttgagaaggaagaaaataagaggttcgaagatcaactccagcagtggctgtccgaggattcaggcgcattcacggaccttacttcacttccactctacctgccacaaacattggtgtctctcagccacaccatcgaacccgtcatgaagacaagcgttacaacatccccccagtcggatatgatgcgggagcagctgcagctgtctgaggccacaggtacctgcttaggagagcgcctgaaacatctcgaaagactgattcgttcatctagggaagaagaagttgcaagtgagctgcacctctcagccctgctggatatggtcgacatctag

SEQ ID NO: 295778 - DNA, 5943 bp, Artificial Sequence
  derived and/or modified sequence
atgaatccaaccaatcccttctcaggccagcagcccagcgccttctccgcctcttcctcaaacgtgggaacactgccaagcaagccccctttccggtttggtcagccctctctgttcggccaaaattctaccctttctggaaagtccagcggcttctcgcaggtaagctcgtttccagcgtcgagcggcgtatctcacagtagctcagtgcagactcttggctttactcagacctctagtgtgggaccattttcagggctggaacatacttccacatttgtcgctacttcaggtcccagctcctctagtgtcctggggaacactggattctcctttaaaagccctacatcagttggtgccttcccttctactagcgcgttcggccaggaagccggggaaattgttaactctggattcggcaaaactgagttctccttcaagccactcgagaacgccgtgttcaaaccaatcctcggtgccgaatctgagccagaaaaaacgcagagccagatcgcaagcggctttttcacctttagtcaccccatcagtagtgcgccaggcggcctggcccctttcagcttcccacaagtcacttcttcttccgccactacaagcaactttacattttctaaacctgtgagttcaaacaactcattatccgccttcacccccgccctttccaaccaaaacgtagaggaagagaaacgaggacctaagagcatcttcggcagttcaaacaacagtttttcaagctttcctgtgagctccgctgtgctaggtgaaccctttcaggcttcgaaggctggtgtgagacagggctgcgaggaggcagtgagccaggtggaacccctaccctctctcatgaaaggcctcaaaagaaaagaagatcaggacagaagtccacgacggcacgggcatgaacccgccgaggactccgaccccctgtcccgaggtgaccatccccctgacaaacgaccggtgcgtttgaatagaccccgcggtggaacattattcggaaggaccatccaagacgtgtttaaaagcaacaaggaagtcggtagactcggcaacaaggaggcaaaaaaggagacgggcttcgtggagagcgcagaatctgaccatatggccattcctggcggaaatcaaagcgtgttagcccccagtaggataccaggagtcaacaaggaggaggagaccgaatccagggagaaaaaagaggactccctacgggggactcccgcccgccaatccaacagatctgagtctacagattccctcggaggactctctccaagcgaagtaacagctattcagtgcaaaaacatcccagattacctaaacgaccgcaccattcttgagaaccatttcggcaagatagcaaaggttcagcgtatcttcacaaggcgtagcaagaaattggctgtggtgcatttttttgatcatgcatcagccgcactggcaaggaaaaagggaaaatctctgcacaaagacatggccattttttggcacaggaagaagataagcccaaataagaaaccattttcattaaaagagaagaagcctggagacggagaggtctcaccaagtactgaggatgcgcctttccagcactctccgctgggaaaagctgcaggccgcacaggggcgagctccttgctgaacaagagctctcccgtgaagaagccgtcactgctgaaagcccaccaattcgagggtgactcattcgacagcgcctctgaaggatccgaggggctcgggccttgtgtgctctccctttccacactgattgggaccgtggctgaaacatctaaggaaaagtacaggttattagaccagcgggacaggatcatgcgacaggctagagtgaaacgcacagacctggataaagcgaggacttttgtaggcacctgcctagacatgtgcccagagaaggagcgttacatgcgcgagacacggtctcagttgtcagttttcgaggtggtaccgggcaccgatcaggttgaccatgccgccgctgtgaaggagtatagccggtcatcagctgaccaagaggagccactgccacatgagctcaggcctctgcccgtgctctcgaggaccatggactatctggtgacccagattatggatcagaaggagggatcattaagagactggtatgacttcgtctggaatcggacacgcggcattaggaaagacataacccagcagcacttatgcgatcccctcacagtatccttgatcgaaaagtgtaccaggtttcacatacattgtgcacattttatgtgtgaagagcccatgagctccttcgatgccaaaatcaacaacgaaaatatgacaaaatgcctgcagagtctgaaagagatgtatcaggacctcagaaataagggcgtgttctgcgcatccgaagctgaattccagggttataatgtccttctgagcctaaacaagggcgatattctgcgtgaagttcaacagttccatccagctgtgaggaatagttcggaagtaaagttcgccgtccaggcctttgccgccctgaactcaaacaacttcgttcgctttttcaaactcgtgcagtcagcctcctaccttaacgcctgccttctacactgctattttagccagatccggaaggatgccctaagggcactaaacttcgcatacaccgtgtcaacccagcggtccaccatatttccgctcgacggagtggtgaggatgctcttgttccgagattgtgaagaggcgacagacttcttgacttgccatggactgactgtgagcgatggatgcgtcgagcttaacaggtccgcatttctcgagcctgagggtctctccaaaactaggaagtccgtgttcatcaccagaaagctgaccgtgagcgtcggagaaattgtcaatggcggccctttaccccctgtgcctagacacactccagtatgctcctttaattcacagaacaaatacatcggcgagtcccttgccgctgaactgcccgtgagtacacaaaggcctgggtctgataccgtaggtgggggacggggggaggagtgcggggtggaacctgatgccccactgtctagcctgcctcagtccttgcctgcccccgccccgagcccagttcctctccccccggtccttgctctgacccctagcgtagctccatctctgttccagctttctgtgcagcctgaacctcccccgcccgaacccgttcccatgtacagtgatgaggatctggctcaggttgttgacgagctcatccaggaagccctccagagagattgtgaagaggttggttcagctggggcagcttacgctgctgcagcattaggcgtgtctaacgccgccatggaagatctgttgacagcggcaactaccggcattttgagacacatcgccgccgaagaagtgtctaaggagcgggaaaggagggaacaggagcgccagagggcagaggaggagaggctaaaacaggagagggagttggtgctttcagagcttagccagggcttggctgtggaactaatggaacgcgtcatgatggagtttgtacgcgagacatgtagtcaagaattgaaaaatgcagtggagacagatcagagagtccgagtagcgaggtgttgtgaagacgtgtgcgcccatcttgtggatctcttcctggttgaggagatctttcagaccgctaaggagacccttcaggaattgcagtgcttctgcaaatacttacagaggtggcgtgaggccgtaacagccaggaagaagttgcgaagacagatgcgtgcctttcccgctgctccctgctgcgtcgatgtcagtgataggctccgggcgctggccccctctgctgagtgtccgatcgccgaggagaatctggcccgcggactgctagacttggggcacgccggcagactggggatctcttgcactaggcttagacggctgaggaataagaccgcccaccaaatgaaagttcagcatttctatcagcaattgctgagcgatgtggcctgggctagtctggacctcccctctcttgtggctgagcacctccctggtcgacaggagcacgttttctggaagctggtactagtgttgcccgacgtcgaggaacagtccccggagagctgtggtcgcatactggcaaactggttgaaggtgaagttcatgggagacgaggggtctgtagatgacacttcctcggatgctgggggcatacagaccctgagcctgtttaattccctgtccagcaagggtgatcagatgatcagtgttaacgtgtgtattaaagttgcacacggcgcactcagcgatggggccatcgatgcagttgagacccaaaaagatctcctgggtgcatcagggctcatgcttctcctgcctccaaaaatgaaatccgaagacatggctgaggaagatgtttactggctgtcagctctgctgcagcttaagcagttactgcaggcgaagcccttccagcccgcattgccattagtcgtgctcgttccaagcccagggggagacgccgtagagaaagaagtggaagatggactcatgttgcaagatctggtgtccgccaagctgatcagcgactacacagttaccgagatcccagacaccatcaatgatttgcagggaagcactaaggttctacaggccgtacagtggttagtgtctcattgccctcactctcttgacttgtgctgtcagacccttatacagtatgtggaagatggtattggtcacgaattctccgggagatttttccatgaccgacgcgaacgcaggcttgggggcctggcctcgcaggagcccggggctattatcgagttattcaatagcgttctgcagtttctggcttctgtggtctctagcgaacagctctgcgacttatcttggcctgtgacagagtttgcggaggccggcggttcacgcctgttgcctcacctgcactggaacgcgccagaacatctggcatggctgaaacaggcagtgctgggcttccagctgccccagatggacttgcccccgctgggcgcaccatggttgcccgtatgttctatggtggtgcagtatgcttcacagattccttctagtaggcagacacaacccgttctgcaatctcaggtggagaatctgttgcaccggacttattgtcggtggaaatctaagtcccctagccctgtacacggagccgggccgtccgtgatggagatcccgtgggacgatcttattgccctgtgcattaaccacaaactccgcgattggacccccccccgattacccgtcacttcagaggccctcagtgaggatggccagatctgtgtctacttctttaagaacgacctcaagaaatatgatgtgccactaagttgggagcaggccagactgcagacacagaaggagctgcagttacgggagggccggctcgccattaagccattccacccgtcagctaataattttcccattccgctcttgcacatgcacaggaattggaaacgatccactgagtgtgctcaggaggggcgcatcccaagcacagaggatctcatgcgtggcgctagcgccgaggagctactagcacaatgtttgtcctcatcactcctgctggaaaaagaggaaaacaagcgcttcgaagatcagctgcagcagtggctgtctgaagattccggcgcttttaccgatctgacatccctgcccctatacctccctcagacgctcgtgtccctaagccatacaatagagcctgtgatgaaaacaagtgtgaccactagtccccaatcagacatgatgcgagaacagctgcagttgtctgaggccaccggaacctgcttaggtgaacgcctcaagcacctagagcggttgatccgaagctccagagaggaggaggtggccagtgaattacatctctccgccctgttggacatggtggatatttag

SEQ ID NO: 295779 - DNA, 285 bp, Artificial Sequence
  derived and/or modified sequence
atgaaccctacaaatcccttttcaggacagcagccatccgctttctctgcaagtagcagtaacgttggcaccctgccttctaagcctccatttcgtttcggacaaccatccttgttcggtcagaactcgactctgagcgggaagtcaagtggtttctcccaggtgtcctcttttccggcatcttctggagtctcccactcaagttctgtccagacgctcggatttacacagacgagcagcgtcgggccattctccggcttggagcatacatctaccttcgtctag

SEQ ID NO: 295780 - DNA, 1428 bp, Artificial Sequence
  derived and/or modified sequence
atgcaggtaaccttcatatacgtgtgcctcaagggactgatgcttcaggacttggtaagcgccaagctgatcagcgattacactgtgaccgaaatccctgatacgatcaatgatttgcaggggtctactaaggtcctgcaggccgtgcagtggctagtgtctcactgcccccacagtcttgacctgtgctgtcagactctgattcagtacgtggaagatggaatagggcatgagttctcagggcggtttttccatgatcgtagagagcggagattggggggccttgcgtcccaggaaccaggagcaattatcgaactgttcaacagcgtgctgcaattcctggcgtccgtggtgtccagtgagcagctgtgtgacctgagttggccagtgaccgagtttgccgaggcaggtggatccaggttactgccccacctccattggaacgctcctgaacacctggcttggctgaagcaagccgtgctggggtttcagctgcctcagatggacctgccacccctcggcgctccttggctgcccgtgtgcagcatggtggtgcaatacgccagccagatcccaagctccagacagacgcaacccgtactgcagtcgcaagtggagaatctactgcatcggacatattgtcgctggaagtcgaagagtccctccccagtccatggtgcaggtccctccgtgatggaaattccgtgggatgacctgattgcgctgtgtattaaccataagctgagggattggacccctccacggcttccagtgacaagcgaggcgctgagcgaagatgggcaaatctgtgtttacttttttaaaaatgatcttaagaagtacgacgtccctctgagttgggagcaggcacggctccaaacacagaaagaacttcagttgcgcgaaggccgattggcaattaagccatttcacccctcagcgaataatttccccattcctctccttcatatgcatagaaattggaagcgttctactgagtgtgctcaggagggacgaattccttccaccgaggatctcatgagaggggcaagtgccgaggaactactggcacaatgcctctcgtcttcgctcctgctggagaaggaggagaataagcgcttcgaggatcagctgcagcagtggctctccgaagactcgggcgctttcacagacctcacctccctgccgctgtatctccctcagaccctggtctcactgtcccacacgattgagcctgtgatgaaaacaagtgttaccactagcccccagtccgatatgatgagagaacaactccagctgagcgaagcaactggcacttgcttgggcgaaaggctgaagcatttggaacgcctcatacgaagttctagagaagaggaagtggcttcggagctccatctttctgctttgttagatatggttgatatctag

SEQ ID NO: 295781 - DNA, 5943 bp, Artificial Sequence
  derived and/or modified sequence
atgaaccccaccaaccccttcagcggccagcagcccagcgccttcagcgccagcagcagcaatgtgggcaccctgcccagcaagccacccttccgcttcggccagcccagcctgtttggccagaacagcaccctgagcggcaagagcagcggcttcagccaggtgtcctccttccctgccagcagcggcgtgagccacagcagctctgtgcagaccctgggcttcacccagaccagctctgtgggccccttcagcggcctggagcacaccagcacctttgtggccaccagcggccccagcagcagctctgtgctgggcaacacaggcttctccttcaagagccccacctctgtgggcgccttccccagcaccagcgccttcggccaggaggccggggagatcgtgaacagcggctttgggaagacagagttctccttcaagcccctggagaatgctgtgttcaagcccatcctgggcgctgagagcgagcctgagaagacccagagccagatcgccagcggcttcttcaccttcagccaccccatcagcagcgcccctgggggcctggcccccttctccttcccccaggtgaccagcagcagcgccaccaccagcaacttcaccttcagcaagcctgtgagcagcaacaacagcctgagcgccttcaccccagccctgagcaaccagaatgtggaggaggagaagaggggccccaagagcatcttcggcagcagcaacaacagcttcagcagcttccctgtgagcagcgctgtgctgggggagcccttccaggccagcaaggccggcgtgcggcagggctgtgaggaggccgtgtcccaggtggagcccctgcccagcctgatgaagggcctgaagaggaaagaagaccaggacaggagcccccggcggcacggccacgagcctgctgaggacagcgaccccctgagcagaggagaccaccccccagacaagaggcctgtgcggctgaaccggccccggggcggcaccctgtttggccgcaccatccaggatgtgttcaagagcaacaaggaggtgggccgcctgggcaacaaggaggccaagaaggagaccggctttgtggagagcgctgagagtgaccacatggccatccctgggggcaaccagagcgtgctggcccccagccgcatccctggggtgaacaaggaggaggagacagagagccgggagaagaaggaggacagcctgcggggcaccccagcccggcagagcaacagaagtgagagcacagacagcctgggcggcctgagccccagcgaggtgacagccatccagtgcaagaacatcccagactacctgaatgacaggaccatcctggagaaccactttgggaagatcgccaaggtgcagaggatcttcacccggcgcagcaagaagctggccgtggtgcacttctttgaccacgccagcgctgccctggccaggaagaagggcaagagcctgcacaaggacatggccatcttctggcacaggaagaagatcagccccaacaagaagcccttcagcctgaaggagaagaagccaggagatggagaggtgagccccagcacagaagatgcccccttccagcacagccccctgggcaaggccgccggccgcactggagccagcagcctgctgaacaagagcagccctgtgaagaagcccagcctgctgaaggcccaccagtttgaaggagacagctttgattctgccagcgagggcagcgagggcctgggcccctgtgtgctgagcctgagcaccctcatcggcaccgtggccgagaccagcaaggagaagtaccgcctgctggaccagagggaccgcatcatgaggcaggcccgggtgaagaggacagacctggacaaggcccggacctttgtgggcacctgcctggacatgtgcccagagaaggagcgctacatgagggagaccaggagccagctgtctgtgtttgaggtggtgcccggcacagaccaggtggaccacgccgctgctgtgaaggagtacagccgcagcagcgctgaccaggaggagcccctgccccatgagctgcggcccctgcctgtgctgagcaggaccatggactacctggtgacccagatcatggaccagaaggagggcagcctgcgggactggtatgactttgtgtggaacagaacccggggcatcaggaaggacatcacccagcagcacctgtgtgaccccctgactgtgtccctcatcgagaagtgcacccgcttccacatccactgtgcccacttcatgtgtgaggagcccatgagcagctttgatgccaagatcaacaatgaaaacatgaccaagtgcctgcagagcctgaaggagatgtaccaggacctgaggaacaagggcgtcttctgtgccagcgaggccgagttccagggctacaacgtgctgctgagcctgaacaagggggacatcctgcgggaggtgcagcagttccaccctgctgtgaggaacagcagcgaggtgaagtttgctgtgcaggcctttgctgccctgaacagcaacaactttgtgcgcttcttcaagctggtgcagagcgccagctacctgaatgcctgcctgctgcactgctacttcagccagatcaggaaggatgccctgcgggccctgaactttgcctacacagtgtccacccagaggagcaccatcttccccctggatggagtggtgaggatgctgctcttccgggactgtgaggaggccacagacttcctgacctgccacggcctgactgtgtctgatggctgtgtggagctgaacagaagtgccttcctggagcctgagggcctgagcaagaccaggaagtctgtgttcatcaccaggaagctgactgtgtctgtgggggagatcgtgaatggaggccccctgccccctgtgcccaggcacacccctgtgtgcagcttcaacagccagaacaagtacatcggggagagcctggccgctgagctgcctgtgtccacccagaggcctggcagtgacacagtgggcggcggccgcggggaggagtgtggggtggagccagatgcccccctgagcagcctgccccagagcctgcctgccccagcccccagccctgtgcccctgccccctgtgctggccctgacccccagcgtggcccccagcctcttccagctgtctgtgcagcctgagcccccacctcctgagcctgtgcccatgtacagtgatgaggacctggcccaggtggtggatgagctgatccaggaggccctgcagagggactgtgaggaggtgggcagcgctggggccgcctatgctgctgctgccctgggcgtgtccaatgctgccatggaggacctgctgacagctgccaccaccggcatcctgcggcacatcgctgctgaggaggtgtccaaggagcgggagcggcgggagcaggagcggcagagagctgaggaggagcggctgaagcaggagcgggagctggtgctgtctgagctgagccagggcctggccgtggagctgatggagcgggtgatgatggagtttgtgcgggagacctgcagccaggagctgaagaatgctgtggagacagaccagagggtgcgggtggcccgctgctgtgaagatgtgtgtgcccacctggtggacctcttcctggtggaggagatcttccagacagccaaggagaccctgcaggagctgcagtgcttctgcaagtacctgcagcgctggagggaggccgtgacagccaggaagaagctgcggcggcagatgagggccttccctgctgccccctgctgcgtggatgtgtctgaccggctgcgggccctggcccccagcgctgagtgccccatcgccgaggagaacctggcccggggcctgctggacctgggccacgccggccgcctgggcatcagctgcacccggctgcggcggctgaggaacaagacagcccaccagatgaaggtgcagcacttctaccagcagctgctgagtgatgtggcctgggccagcctggacctgcccagcctggtggccgagcacctgcccggccggcaggagcacgtgttctggaagctggtgctggtgctgcctgatgtggaggagcagagccctgagagctgtggccgcatcctggccaactggctgaaggtgaagttcatgggagatgagggctctgtggatgacaccagcagtgatgctgggggcatccagaccctgagcctcttcaacagcctgagcagcaagggggaccagatgatctctgtgaatgtgtgcatcaaggtggcccatggagccctgagtgatggagccattgatgctgtggagacccagaaggacctgctgggcgccagcggcctgatgctgctgctgccccccaagatgaagtctgaggacatggccgaggaggatgtgtactggctgagcgccctgctgcagctgaagcagctgctgcaggccaagcccttccagcctgccctgcccctggtggtgctggtgcccagccctggaggagatgctgtggagaaggaggtggaggatggcctgatgctgcaggacctggtgtctgccaagctgatcagtgactacacagtgacagagatcccagacaccatcaatgacctgcagggcagcaccaaggtgctgcaggccgtgcagtggctggtgagccactgcccccacagcctggacctgtgctgccagaccctcatccagtatgtggaggatggcatcggccacgagttcagcggccgcttcttccatgaccggcgggagcggcggctgggcggcctggccagccaggagcccggggccatcatcgagctgttcaacagcgtgctgcagttcctggcctctgtggtgtcctctgagcagctgtgtgacctgtcctggcctgtgacagaatttgctgaggccggcggcagccggctgctgccccacctgcactggaatgcccctgagcacctggcctggctgaagcaggccgtgctgggcttccagctgccccagatggacctgccccccctgggcgccccctggctgcctgtgtgcagcatggtggtgcagtatgccagccagatccccagcagccggcagacccagcctgtgctgcagagccaggtggagaacctgctgcacaggacctactgccgctggaagagcaagagccccagccctgtgcacggggccggccccagcgtgatggagatcccctgggatgacctgattgccctgtgcatcaaccacaagctgcgggactggaccccaccccggctgcctgtgaccagcgaggccctgtctgaagatggccagatctgtgtgtacttcttcaagaatgacctgaagaagtatgatgtgcccctgtcctgggagcaggcccggctgcagacccagaaggagctgcagctgcgggagggccgcctggccatcaagcccttccaccccagcgccaacaacttccccatccccctgctgcacatgcacaggaactggaagaggagcacagaatgtgcccaggagggccgcatccccagcacagaggacctgatgagaggagccagcgctgaggagctgctggcccagtgcctgagcagcagcctgctgctggagaaggaggagaacaagagatttgaggaccagctgcagcagtggctgtctgaagattctggggccttcacagacctgaccagcctgcccctgtacctgccccagaccctggtgtccctgagccacaccatcgagcctgtgatgaagacctctgtgaccaccagcccccagagcgacatgatgagggagcagctgcagctgtctgaggccaccggcacctgcctgggggagcggctgaagcacctggagcggctcatccgcagcagccgggaggaggaggtggccagcgagctgcacctgagcgccctgctggacatggtggacatctag

SEQ ID NO: 295782 - DNA, 285 bp, Artificial Sequence
  derived and/or modified sequence
atgaaccccaccaaccccttcagcggccagcagcccagcgccttcagcgccagcagcagcaatgtgggcaccctgcccagcaagccacccttccgcttcggccagcccagcctgtttggccagaacagcaccctgagcggcaagagcagcggcttcagccaggtgtcctccttccctgccagcagcggcgtgagccacagcagctctgtgcagaccctgggcttcacccagaccagctctgtgggccccttcagcggcctggagcacaccagcacctttgtgtag

SEQ ID NO: 295783 - DNA, 1428 bp, Artificial Sequence
  derived and/or modified sequence
atgcaggtgaccttcatctacgtgtgcctgaagggcctgatgctgcaggacctggtgtctgccaagctgatcagtgactacacagtgacagagatcccagacaccatcaatgacctgcagggcagcaccaaggtgctgcaggccgtgcagtggctggtgagccactgcccccacagcctggacctgtgctgccagaccctcatccagtatgtggaggatggcattggacatgagttcagcggccgcttcttccatgacagaagagagcggcggctgggcggcctggccagccaggagcccggggccatcatcgagctgttcaacagcgtgctgcagttcctggcctctgtggtgagcagcgagcagctgtgtgacctgtcctggcctgtgacagaatttgctgaggccggcggcagccggctgctgccccacctgcactggaatgcccctgagcacctggcctggctgaagcaggccgtgctgggcttccagctgccccagatggacctgccccccctgggcgccccctggctgcctgtgtgcagcatggtggtgcagtatgccagccagatccccagcagccggcagacccagcctgtgctgcagagccaggtggagaacctgctgcacaggacctactgccgctggaagagcaagagccccagccctgtgcatggagctggccccagcgtgatggagatcccctgggatgacctgattgccctgtgcatcaaccacaagctgcgggactggaccccaccccggctgcctgtgaccagcgaggccctgtctgaagatggccagatctgtgtgtacttcttcaagaatgacctgaagaagtatgatgtgcccctgtcctgggagcaggcccggctgcagacccagaaggagctgcagctgcgggagggccgcctggccatcaagcccttccaccccagcgccaacaacttccccatccccctgctgcacatgcacaggaactggaagaggagcacagaatgtgcccaggagggccgcatccccagcacagaggacctgatgagaggagccagcgctgaggagctgctggcccagtgcctgagcagcagcctgctgctggagaaggaggagaacaagagatttgaggaccagctgcagcagtggctgtctgaggacagcggggccttcacagacctgaccagcctgcccctgtacctgccccagaccctggtgtccctgagccacaccatcgagcctgtgatgaagacctctgtgaccaccagcccccagagcgacatgatgagggagcagctgcagctgtctgaggccaccggcacctgcctgggggagcggctgaagcacctggagcggctcatccgcagcagccgggaggaggaggtggccagcgagctgcacctgagcgccctgctggacatggtggacatctag

SEQ ID NO: 295784 - DNA, 5943 bp, Artificial Sequence
  derived and/or modified sequence
atgaaccccaccaaccccttcagcggccagcagcccagcgccttcagcgcgtcaagctccaacgttggaaccctgccttctaaaccacccttcaggttcggtcagccctcactgttcggacaaaactctacactgtctggcaaaagctcagggttttcgcaagtgagctcctttccagccagtagtggtgtctcacactccagctctgtccagacgcttggatttactcagacatcctcagtgggccctttctccggattagagcacactagcaccttcgtggccacctccggcccaagtagctcatctgtgctgggaaacacagggtttagcttcaaatcccccaccagcgtcggggccttcccatctaccagcgcgtttgggcaggaagccggggagattgttaattcgggattcgggaaaaccgaatttagttttaagcccctggaaaacgccgtcttcaagcctatactgggtgccgagagcgaacctgaaaaaacccaatcccaaattgcaagtggcttttttaccttcagtcaccccattagtagcgccccggggggactcgccccgttctcctttcctcaggtcacctctagttcagccactacatccaatttcactttcagcaagcctgtctcatctaacaattctctgtcagccttcaccccagccctctctaaccagaacgtggaagaggagaaacgtggtcctaagagcatctttggctcatctaataactcattcagctcctttccagtgtcttccgcagtgctgggagagcccttccaagcaagcaaggctggtgtgcggcaagggtgcgaggaagcagtgagtcaagtggagccgttgccatccctaatgaagggcttgaagagaaaggaggatcaggaccgaagtccccgtaggcatggacacgagcccgcagaagatagtgatccgctgagcagaggcgatcaccctcctgacaagcgtcccgtaaggctcaaccggccacgcggtggaactctgtttggacgcaccattcaagacgtcttcaagtccaataaggaagttgggcgcctgggaaacaaggaggctaaaaaggaaactggtttcgtcgagtcagctgagtctgaccacatggcaataccaggggggaatcagtccgttctggctccgtcccggatccctggagtgaacaaagaggaggaaacagaatcccgcgagaagaaagaggactcccttcgaggaactcccgcacggcagtctaatagaagtgagtcaactgattcactgggcgggctgtcaccctccgaagtcacggccattcagtgtaagaatatccccgattatttaaatgaccgtaccattcttgaaaatcacttcgggaaaatagccaaggtacagagaatctttacgagacggagtaagaagctcgccgtggtgcatttctttgaccacgcgtctgctgctctagcacggaaaaaaggaaagagcctccataaggacatggccatattctggcaccggaaaaagatcagtcctaacaagaagcccttctctctcaaagagaaaaagcccggcgacggagaggtctccccgtcgaccgaagatgctcccttccagcatagccccttgggaaaggccgcaggacgcactggagcaagctccctactgaacaaatcgagtccagtgaaaaagcccagcctgctgaaagcccatcagttcgagggtgattcctttgattcagccagcgaggggagtgagggtctaggcccttgcgtgctctcacttagcaccctcattggcacagtggcagagacttctaaggaaaaataccgccttctggaccaacgcgatcgcataatgcgtcaggctcgcgtcaagcgtactgaccttgataaggcccgcacttttgtggggacttgcctggacatgtgccctgagaaggagcgctacatgagagagactagaagtcaattgagcgtgttcgaagtggtgcccgggaccgatcaggtggaccatgctgctgccgtgaaagagtattcgcgctccagcgccgatcaggaagagccactccctcatgaactcaggccccttcctgtgctgagtaggaccatggattaccttgtcacgcagatcatggatcagaaggaaggatctttgcgggattggtatgacttcgtgtggaatcgaactcggggtattcgcaaggacatcactcaacaacatctgtgcgatccactgaccgtttccctgattgagaagtgtactcggttccacatacattgcgctcattttatgtgcgaagaaccaatgtcaagtttcgacgcaaagatcaacaatgaaaacatgacgaagtgcctccagtccttaaaagagatgtaccaggatttgaggaataaaggcgtcttctgcgcatctgaggctgagtttcaggggtataatgtgctgctgagtctcaacaagggggacatccttcgtgaggtgcagcagttccatcccgcggttagaaatagctcagaagtcaaatttgccgtgcaagcgtttgctgccctcaattccaacaacttcgtcaggttctttaagcttgtgcagtccgcttcctacctgaatgcttgtctgcttcactgttatttttcccaaatacggaaagacgcactgagggctcttaattttgcctatactgtgtccacccagagatcaactatttttcctctggatggtgtagtgcgtatgcttctattccgggactgcgaggaagcgactgattttctgacatgccacggacttaccgtttctgacggatgcgtggagctcaatcgctcagcctttctggaaccagagggcctctctaagaccaggaagtccgtctttattaccaggaagctcaccgtgagtgtgggtgaaatcgtgaacgggggcccactgcctccagttcccagacatacccctgtgtgctcatttaattcacagaataagtacatcggggaatccctggcagccgagctccctgtatctactcagagacctggatctgacacagtaggagggggtaggggtgaagaatgcggagttgagccagacgcgcccttgtctagccttccccagtcattacctgcgcctgcccccagccctgtcccgttgcctcccgtgctcgcactgacgccgagcgtggctccatcattatttcaactgtctgttcagccagagcccccacctccggagcccgttccgatgtactctgacgaggacttggcccaggtggtagacgaattgatccaggaagccctgcagcgagactgcgaggaagtcgggtccgcaggggccgcctacgcagccgctgccttgggcgtgagcaacgccgcgatggaggacctgctaaccgctgctacaaccggcatcctcaggcacattgctgccgaggaggtgagcaaagagagagaacgcagagaacaggagcggcagcgtgcggaggaagaacggttgaaacaggagagagaacttgttctttctgaactgtcccagggtctggccgtcgaactgatggagcgggttatgatggagtttgtgcgcgaaacttgttctcaggaactgaagaacgctgtggaaacggatcaaagagtccgggtagctcggtgttgcgaggacgtttgtgctcacctggttgatctgtttctggtagaggagatcttccaaactgccaaagagaccctgcaggaactccagtgtttctgcaaatacctgcaacggtggagagaggccgtgacagctcggaagaagctgcggcggcaaatgcgcgcgttccctgctgccccctgctgtgtggacgtgagcgatcgccttcgcgccctggccccaagcgccgagtgccccattgccgaggaaaacctggcccgtgggctattggatctgggacatgcgggcaggctggggatttcctgcacaaggctgagacgcctgaggaataaaacagctcaccagatgaaggtgcaacatttttaccagcagctgctcagcgatgtcgcatgggcgagcctcgatctgccttctctcgtagcagaacacctgcctgggaggcaggagcacgtgttttggaagttggtgctggtgctcccagatgtagaggaacagagtcccgagtcctgtggtaggattctcgccaattggcttaaggttaaatttatgggagacgagggatccgtggatgacacgagcagtgacgctggcggtatccaaacactgtctttatttaattcattaagtagcaaaggtgaccagatgattagcgttaacgtttgtatcaaggtggcccatggggccctgagcgacggtgcaatcgacgccgtggagacgcagaaggacttgctgggggcttccggactgatgctgctcctgcctcctaagatgaagagtgaggacatggcggaggaagacgtgtactggctgtccgccctgcttcagctgaaacaacttctccaggcgaagcccttccagccagcactccccctagtcgtactggtgccatcacctggaggagatgcggtggagaaagaggtggaagatgggctgatgctgcaggatcttgtcagcgccaagctcatcagcgactacacagttactgaaatccctgatacaattaatgacttgcaaggtagcacaaaagttctgcaggccgtccagtggctggtcagccattgtccccacagcctggacctgtgttgtcagaccctgatacagtatgtcgaagatggaattgggcacgagttttcagggcggtttttccacgacagacgagagcggcggctgggcggcctggcatctcaggagccgggcgcaatcattgagttgttcaacagcgtgctacaattccttgcatccgtggtctcctcagagcagttgtgtgacctcagttggcccgttaccgaattcgctgaggccgggggctcacgactgctcccccatctccattggaatgctcctgagcacctggcttggctgaagcaggccgtgctgggcttccagctccctcagatggacttaccccccctcggagccccctggctgcctgtctgctccatggtggtgcaatacgccagtcagatcccttcctccagacaaacacagcctgttctacagagccaggttgagaatcttcttcatcgtacctactgccggtggaaatcaaaaagcccatcgccagtgcatggcgccggaccatccgtgatggagatcccctgggacgacctcatcgcgttgtgtattaaccacaagctacgggattggacgcctccaagactacctgttacatccgaagccctgtccgaggacggccagatctgcgtctactttttcaagaatgacttaaagaaatatgatgttccactcagctgggagcaggcaaggctccaaactcaaaaagaactccaactgcgggagggaaggctggccataaagccttttcatccctcagccaacaacttccctattccgctattgcacatgcaccgcaattggaagcgttctaccgagtgcgcccaagaagggcgaattcccagcacagaggacctgatgaggggagcgtcggctgaggaattgctggcacagtgtttgtcgagtagcttactgctggaaaaagaggaaaacaagcggttcgaggatcagctgcagcagtggttgtccgaagatagtggggcctttaccgacctcacttcactgcctctgtaccttccccagacgcttgtgagcttgtctcatacaatcgagccggtcatgaaaacctccgtcaccacaagtccgcagtcggatatgatgagggagcagctgcaactttccgaggccactgggacatgcctgggagagcgcctcaaacacctagaacggctcattcggtccagtcgggaggaagaagttgcatcggagctgcacctgtccgccctactcgacatggtcgatatctag

SEQ ID NO: 295785 - DNA, 6333 bp, Artificial Sequence
  derived and/or modified sequence
agtgctgagcgaaccggaagtcggtccgcggcgttttctgcccgcggtgcgcagcgctgagtgtcgcggcagcagcctgtgcttgcgcctcaagtctttccgaggggccagtgggcagcgcgggcctcggggtcctggggcgagacgcttgttctaaagacgaaggggaactccctagtgctacaggctgtttcaggaagccaattaattttgtacacataatacttaattaccttctaataattggagcagaagatgaacccaactaatcctttcagtgggcagcagcctagtgctttttcggcgtcttctagtaatgtaggaacacttccatctaagccgccatttcgatttggtcaaccttctctttttggacaaaacagtaccttatctgggaagagctcgggattttcacaggtatccagctttccagcgtcttctggagtaagtcattcctcttcagtgcaaacattagggttcacccaaacctcaagtgttggacccttttctggacttgagcacacttccacctttgtggctacctctgggccttcaagttcatctgtgctgggaaacacaggatttagttttaaatcacccaccagtgttggggctttcccaagcacttctgcttttggacaagaagctggagaaatagtgaactctggttttgggaaaacagaattcagctttaaacctctggaaaatgcagtgttcaaaccaatactgggggctgaatctgagccagagaaaacccagagccaaattgcttctgggttttttacattttcccacccaattagtagtgcacctggaggcctggcccctttctcttttcctcaagtaacaagtagttcagctaccacttcaaattttaccttttcaaaacctgttagtagtaataattcattatctgcctttacccctgctttgtcaaaccaaaatgtagaggaagagaagagaggacctaagtcaatatttggaagttctaataatagcttcagtagcttccctgtatcatctgcggttttgggcgaacctttccaggctagcaaagcaggtgtcaggcaggggtgtgaagaagctgtttcccaggtggaaccacttcccagcctaatgaaaggactgaaaaggaaggaggaccaggatcgctccccaaggagacatggccacgagccagcagaagattcggatcctctgtcccggggcgatcatcctccagacaaacgacctgtccgcctgaatcgaccccggggaggtactttatttggtcggacgatacaggatgttttcaaaagcaataaggaagtaggtcgtctgggcaacaaggaggccaaaaaggaaactggctttgttgagtctgcagaaagtgaccacatggctatcccaggagggaatcagtctgtcctggcaccttcccggattccaggtgtgaataaagaggaagaaactgaaagtagagagaagaaagaagattctctaagaggaactccggcgcgtcagagtaacagaagcgagagcacagacagtcttgggggcttgtctccctctgaagtcacagccatccagtgcaagaacatccctgactacctcaacgacaggaccattctggagaaccattttggcaaaattgctaaagtgcagcgcatctttaccaggcgcagcaaaaagcttgcagtggtacatttctttgatcatgcatctgcagccctggctagaaagaaggggaaaagtttgcataaagacatggctatcttttggcacaggaagaaaataagccccaataagaaacccttttccctgaaggagaagaaaccaggtgacggtgaagtcagcccgagcacagaggatgcaccctttcagcactctcctcttggcaaggccgcagggaggactggtgctagcagcctcctgaataaaagctctccagtgaagaagccaagtcttctaaaggcccaccaattcgagggagactcttttgactcagcctccgagggctccgagggcctcgggccatgtgtgctctccctcagtaccctgataggcactgtggctgagacatccaaggagaagtaccgcctgcttgaccagagagacaggatcatgcggcaagctcgggtgaagagaaccgatctggacaaagcgaggacttttgttggcacctgcctggatatgtgtcctgagaaggagaggtacatgcgggagacccgtagccagctgagcgtgttcgaagtggtcccagggactgaccaggtggaccacgcagcagctgtgaaagagtacagtcggtcctcggcggatcaggaggagcccctgccccacgagctgcggcccttgccagtgctcagcaggaccatggactacctggtgacccagatcatggaccagaaggagggcagcctgcgggattggtatgacttcgtgtggaaccgcacgcgtggcatacggaaggatatcacgcagcagcacctctgtgaccccctgacggtgtccctgattgagaagtgcacccggtttcacatccactgtgcccacttcatgtgtgaggagcccatgtcctcctttgatgccaagatcaataatgagaacatgaccaagtgcctgcagagcctgaaggagatgtaccaggacctgagaaacaagggtgtcttctgtgccagcgaagcggagttccagggctacaatgttctgctcagtctcaacaagggagacatcctaagagaagtacaacagttccatcctgctgttagaaactcatctgaggtgaaatttgctgttcaggcttttgctgcattgaacagtaataattttgtgagatttttcaaactggtccagtcagcttcttacctgaacgcttgtcttttacactgttacttcagtcagatccgcaaggatgctctccgggcgctcaactttgcgtacacggtgagcacacagcgatctaccatctttcccctggatggtgtggtgcgcatgctgctgttcagagactgtgaagaggccaccgacttcctcacctgccacggcctcaccgtttccgacggctgtgtggagctgaaccggtctgcattcctggaaccagagggattatccaagaccaggaagtcggtgtttattactaggaagctgacggtgtcagtcggggaaattgtgaacggagggccattgccccccgtccctcgtcatacccctgtgtgcagcttcaactcccagaacaagtacatcggggagagcctggccgcggagctgcccgtcagcacccagagacccggctccgacacagtgggcggagggagaggagaggagtgtggtgtagagccggatgcacccctgtccagtctcccacagtctctaccagcccctgcgccctcaccagtgcctctgcctcctgtcctggcactgaccccgtctgtggcgcccagcctcttccagctgtctgtgcagcctgaaccaccgcctccagagcccgtgcccatgtactctgacgaggacctggcgcaggtggtggacgagctcatccaggaggccctgcagagggactgtgaggaagttggctctgcgggtgctgcctacgcagctgccgccctgggtgtttctaatgctgctatggaggatttgttaacagctgcaaccacgggcattttgaggcacattgcagctgaagaagtgtctaaggaaagagagcgaagggagcaggagaggcagcgggctgaagaggaaaggttgaaacaagagagagagctggtgttaagtgagctgagccagggcctggccgtggagctgatggaacgcgtgatgatggagtttgtgagggaaacctgctcccaggagttgaagaatgcagtagagacagaccagagggtccgtgtggcccgttgctgtgaggatgtctgtgcccacttagtggacttgtttctcgtggaggaaatcttccagactgcaaaggagaccctccaggagcttcagtgcttctgcaagtatctacagcggtggagggaagctgtcacagcccgcaagaaactgaggcgccaaatgcgggctttccctgctgcgccctgctgcgtggacgtgagcgaccggctgagggcgctggcgcccagcgcagagtgccccattgctgaagagaacctggccaggggcctcctggacctgggccatgcagggagattgggcatctcctgcaccaggttaaggcggctcagaaacaagacagctcaccagatgaaggttcagcacttctaccagcagctgctgagtgatgtggcatgggcgtctctggacctgccatccctcgtggctgagcacctccctgggaggcaggagcatgtgttttggaagctggtgctggtgttgccggatgtagaggagcagtccccagagagttgtggcagaattctagcaaattggttaaaagtcaagttcatgggagatgaaggctcagtggatgacacatccagcgatgctggtgggattcagacgctttcgcttttcaactcacttagcagcaaaggggatcagatgatttctgttaacgtgtgtataaaggtggcccatggcgccctcagtgatggtgccattgatgctgtggagacacagaaggacctcctgggagccagtgggctcatgctgctgcttccccccaaaatgaagagtgaggacatggcagaggaggacgtgtactggctgtcggccttgctgcagctcaagcagctcctgcaggctaagcccttccagcctgcgcttcctctggtggttcttgtgcctagcccaggaggggacgccgttgagaaggaagtagaagatggtctgatgctacaggacttggtttcagctaagctgatttcagattacactgttaccgagatccctgataccattaatgatctacaaggttcaactaaggttttgcaagcagtgcagtggctggtttcccactgcccccattcccttgacctctgctgccagactctcattcagtacgtcgaagacgggattggccatgagtttagtggccgctttttccatgacagaagagagaggcgtctgggcggtcttgcttctcaggagcctggcgccatcattgagctgtttaacagtgtgctgcagttcctggcttctgtggtgtcctctgaacagctgtgtgacctgtcctggcctgtcactgagtttgctgaggcagggggcagccggctgcttcctcacctgcactggaatgccccagagcacctggcctggctgaagcaggctgtgctcgggttccagcttccgcagatggaccttccacccctgggggccccctggctccccgtgtgctccatggttgtccagtacgcctcccagatccccagctcacgccagacacagcctgtcctccagtcccaggtggagaacctgctccacagaacctactgtaggtggaagagcaagagtccctccccagtccatggggcaggcccctcggtcatggagatcccatgggatgatcttatcgccttgtgtatcaaccacaagctgagagactggacgcccccccggcttcctgttacatcagaggcgctgagtgaagatggtcagatatgtgtgtatttttttaaaaacgatttgaaaaaatatgatgttcctttgtcgtgggaacaagccaggttgcagacgcagaaggagctacagctgagagagggacgtttggcaataaagccttttcatccttctgcaaacaattttcccataccattgcttcacatgcaccgtaactggaagaggagcacagagtgtgctcaagaggggaggattcccagcacagaggatctgatgcgaggagcttctgctgaggagctcttggcgcagtgtttgtcgagcagtctgctgctggagaaagaagagaacaagaggtttgaagatcagcttcagcaatggttgtctgaagactcaggagcatttacggatttaacttcccttcccctctatcttcctcagactctagtgtctctttctcacactattgaacctgtgatgaaaacatctgtaactactagcccacagagtgacatgatgagggagcaactgcagctgtcagaggcgacaggaacgtgtctaggcgaacgactaaagcacctggaaaggctgatccggagttcaagggaagaggaagttgcctctgagctccatctctctgcgctgctagacatggtggacatttgagcagcctgacctgtggggagggggtctctcccgaagagtttctgtttttactcaaaataatgttattctcagatgcttgatgcactgttggaaatgtgattaatttaatcatgcagataaaccatttaaatgtca

SEQ ID NO: 295786 - DNA, 5943 bp, Artificial Sequence
  derived and/or modified sequence
atgaaccccaccaaccccttcagcggccagcagcccagcgccttctcagcatcctcctctaatgtgggtacactacccagcaagccccccttccggttcggtcagccaagtttgttcggacaaaattccacactatctggcaagagctctggtttcagccaagtgagttcattcccagccagctctggtgtaagccactcctctagcgtccaaacgttgggctttacacaaaccagctccgtgggacctttttctgggttggagcacacatccacattcgtggctacgtcaggtccatcatcatcaagcgttctgggcaacaccggatttagtttcaaaagccccacttctgtaggagcgttcccttctactagtgcgttcggccaggaggcaggggaaattgtgaactcaggcttcggcaagaccgagttctcttttaaaccgctggagaatgccgtctttaagccaatcctgggagctgaaagtgagcccgagaagacgcagtctcaaattgcctcgggcttcttcaccttttcccatcctatttcaagcgctccaggaggcctagcaccattttcatttccgcaagtaactagttcgtcagccaccacctctaactttacattctccaagccggtctcttccaacaacagtctttcagcctttacccctgcactgtcgaaccagaacgttgaggaagagaaacgtggcccgaaaagtatcttcggcagcagcaataattcctttagctcattccccgttagtagcgctgttctgggagaaccttttcaagcctccaaagccggcgtaaggcagggatgcgaggaggccgtgagccaggttgagccactcccatctctcatgaaaggcttgaagcgaaaagaagatcaggatcgatcccctcggcggcatgggcatgaaccagcagaagatagtgatccgctcagtagaggagatcacccgcctgacaaacgacccgtgcggctaaacagaccaagaggtggtacactgttcggacgcacaatacaagatgtctttaagagcaacaaggaagtgggccggttgggcaataaagaggctaaaaaggaaacgggcttcgtggaaagcgccgaatcagaccatatggccattccaggtggcaaccagtcggtgctagccccttcacggattcctggcgtgaataaagaggaggagaccgagagcagagagaaaaaggaagatagtctgcgaggcacccccgcgagacagtccaaccggagtgaaagtaccgacagcctgggtggacttagcccgagcgaagttaccgctatacagtgtaagaatatacccgattatctcaatgaccgcactattctggagaaccattttggtaagatcgccaaggtgcaacggatcttcacacgacggtctaagaagttggcggtcgtccacttttttgaccatgcctccgccgccctggcacgtaaaaagggcaaatctcttcacaaggatatggctatattctggcacagaaaaaaaatttcacctaacaagaaacctttttctctgaaagaaaagaagccaggcgatggagaagtatcacccagcacagaggacgcaccttttcaacattctccattgggaaaggccgctggccgcacgggggcgtcttcactgttaaataagtcttctccagtgaaaaagccctctctgctcaaggcacatcagtttgagggagacagcttcgactccgcttctgagggcagcgaaggccttgggccgtgcgtgctgtccctttccaccctcattggaactgtcgctgagaccagcaaggagaaatatcgccttttggaccagagagacaggatcatgcgacaggcgcgggtgaagaggactgatctggataaggctcgtacatttgtgggaacgtgcctcgacatgtgccccgaaaaagaacgttacatgagagagactcggtcacagctgtccgtgttcgaggtagtgcctggcacagatcaggtggaccatgcggcggccgtgaaggagtattcacgtagttctgcagaccaagaggagcccctgccacacgaactcagacccctgcccgtcctgtcccgcaccatggactacctggtcacccagatcatggatcaaaaagaaggatccctgcgtgactggtacgattttgtatggaacaggactcggggtatccgaaaggacattacacagcaacacctgtgcgaccctttgacagtatctttgattgaaaagtgcacccggtttcatatccattgtgcccatttcatgtgcgaagagcctatgtcctcgttcgatgcgaagataaataatgaaaacatgaccaaatgtcttcagagccttaaggaaatgtatcaggacctgcgcaacaagggggtcttctgtgcgagcgaggcggaattccagggttataatgttctgctgagtctcaacaaaggtgatattctgagagaggtgcagcaatttcatcccgcggtgcgaaatagctccgaggtgaagtttgccgtgcaggcctttgctgccctaaactccaacaactttgttcgcttctttaagttggtacagagcgcttcctacctgaatgcgtgtctattacattgctatttctctcagatcagaaaagatgccctgagagcactgaattttgcatatactgtgtcgacccagcgctccacaatctttcccttagatggagtggtgcgcatgctgctatttcgagactgcgaagaggctacagacttcttaacatgccacgggttgacggtatcagatggttgtgtggagctcaacaggtctgctttcttggaacctgaggggctgtccaaaacacgaaagtcagtgtttataactcgaaagcttaccgttagcgtgggcgagatcgtgaacggtggacctttgccgcccgtgcccagacacactcctgtctgctcgtttaatagccagaataagtacataggcgagtcgttagccgctgaacttcccgttagtacccagcgtccaggatcagacacagtagggggcgggaggggggaagaatgtggagtcgaaccagacgcccccctgagctccctgccacaatccttgcctgcacccgctccaagccccgtgcctctccctcctgtgctggcccttacccctagcgtagccccatctttattccagcttagcgttcagccagagccaccaccccccgagccagtccctatgtactctgacgaagatttagctcaagtcgtggacgagctgatacaggaggctctgcaacgggactgtgaagaggttggcagcgccggggcagcctacgcggcagccgctttgggcgtgtctaacgctgccatggaagaccttctcacggccgctactacaggaatcctgcgccacattgctgctgaagaagtctcgaaagaaagagagcgcagggagcaggaacgtcagagggccgaggaagaacgcctgaaacaggaacgcgaactcgttctgagcgaactgtcgcagggccttgctgtggaactcatggaacgtgtgatgatggagttcgtgagggagacttgctcccaggagctcaagaatgctgtggaaactgaccaacgtgtgagagtagctaggtgttgtgaggacgtctgcgcacatctggtcgacctgtttttagtggaagaaatcttccagactgctaaggaaacactgcaggaactgcagtgcttttgtaaatacctgcagcgatggcgcgaagctgtgacagcccgcaagaagctccgacgtcaaatgagagcctttcccgcggctccgtgttgtgttgatgtctcggatcgtctgagggctctggcaccttctgctgagtgtccgatcgccgaagagaaccttgccagggggctcctggacctaggtcatgcaggccgtctcggcatctcatgcaccaggctccgcaggctgagaaacaagacagctcatcagatgaaagtgcagcacttttaccagcaactgctctccgacgtggcctgggcgagtctggatctgcccagcctagtggccgaacatctcccaggcaggcaggagcacgtcttctggaaactcgtgctcgttttaccggatgttgaggaacagagtcctgagagttgcggcagaatactggccaattggctcaaagtcaagttcatgggcgacgagggatccgtcgatgacacctcctcagacgcaggggggattcagaccctttcgctgtttaatagcttgagctccaaaggtgaccaaatgatcagcgttaatgtttgcattaaggtcgcccacggtgccctttctgatggggccatagatgccgtggagacccagaaagacttgttaggcgccagcggcctgatgctgcttttacctcccaagatgaagtccgaagacatggccgaagaggacgtgtactggctctccgcgcttctgcagctcaagcagctcttgcaggctaagcctttccagccagccttgcctctggtggtccttgtcccatcacctggcggagacgccgtcgagaaagaagtagaggacggattaatgcttcaggacctggtgtcagccaagctgatctccgactataccgtcacagaaatccccgatacaatcaacgacctgcaggggagcactaaggtcctgcaggctgttcagtggctggtgtcgcactgtccgcactccctagatttgtgctgtcagaccctcattcaatacgttgaagacggtattggacacgaattcagcgggcggtttttccatgaccggcgcgaaagacgccttggaggtcttgcttctcaagagcctggagcaattattgagctctttaactccgtgcttcagttccttgccagcgtcgtctcctccgagcagctttgtgacctgtcttggcccgtgacagaatttgccgaagcaggcggcagcaggttactaccacacctacactggaatgcccccgagcaccttgcctggcttaaacaggccgtcctgggcttccagttgccccagatggacctgccccccctgggtgccccatggttaccagtgtgcagtatggtcgtccagtacgcaagccagatcccttcttcacgccagactcagccagtgctccaatctcaggtggagaacttgctccaccggacatattgcaggtggaagtctaaatctccttcaccagtacatggagctggacccagcgtgatggaaataccttgggacgacttgatcgcgttgtgtataaaccataaactccgcgattggacccctcctcgactgcctgtaacttccgaagccctttccgaggacgggcagatctgcgtttattttttcaagaacgacctcaagaaatacgatgtccccttgagctgggaacaagcccgcctccaaacccagaaggagctgcaactgcgagaggggcgtctggctatcaaaccatttcatccgtcggctaacaatttcccaatcccactcttgcacatgcaccgcaactggaagcgtagtactgaatgtgcccaggagggcagaataccgtctacagaagatctgatgcgcggggcctccgcggaggagctgctggcacagtgtctttcttccagtctcctcctagaaaaagaagagaataaacggtttgaagatcagctgcaacagtggctcagcgaggattctggcgcctttactgacttaaccagcctgcctttgtaccttccacagaccctggtgtccctgtcccatacaattgagcccgtgatgaaaacctcggttaccacaagcccccagtccgatatgatgagggaacagctgcagttgtccgaggcaactggcacgtgcctcggcgagcgcctcaaacacctggagagactcatccggagttccagggaagaggaggtagcaagcgagcttcatctgtctgccctgctggacatggtggatatttag

SEQ ID NO: 295787 - DNA, 285 bp, Artificial Sequence
  derived and/or modified sequence
atgaaccccaccaaccccttcagcggccagcagcccagcgccttctcggctagctctagcaatgtcggtaccctgccatctaagccacccttcagatttggacagccgtccttattcggtcagaattccaccctgtcagggaaatcctctggcttctctcaggtgagcagcttccctgctagcagcggcgtttcgcatagcagctctgtccagactctgggctttactcagactagctcggtggggcctttcagtggcctggagcatacatctactttcgtgtag

SEQ ID NO: 295788 - DNA, 1428 bp, Artificial Sequence
  derived and/or modified sequence
atgcaggtgaccttcatctacgtgtgcctgaagggcctgatgctgcaggacctcgtgtccgcgaaattgattagtgactacacagttacagaaatacctgatacgattaacgatctacagggatccaccaaagtgctgcaggccgttcagtggctcgtctcgcactgtccgcactctctcgacctgtgctgccagacgctgatccaatacgtggaggatggtatcgggcacgagtttagcggtcggttcttccatgaccgccgcgagagacggctcggcgggcttgcatctcaggaacccggtgcaattatcgagctttttaactccgtgttgcagttcctagcaagcgtagtctctagtgaacagttgtgcgacctcagttggccagttaccgaattcgccgaggccggcggtagccgtttactcccgcaccttcattggaacgcgccggagcacctcgcctggctcaagcaggctgtgctaggatttcagttgccacagatggatttacctccactcggcgcgccttggctccccgtctgctcaatggtggttcagtacgcctcacaaattccctcaagtagacagacgcagcctgtgctccaaagccaggttgagaacttgctccatcgcacgtactgccgatggaaatccaaaagcccctccccagtgcacggagcgggaccctccgtaatggagatcccttgggatgatctgattgccctgtgcatcaatcataagctccgggactggacacccccgaggctgcccgtcacatccgaggctttgagcgaggatggccagatttgcgtatattttttcaagaacgatttaaagaagtatgatgtgcccttgtcctgggaacaagcacggctgcagacacaaaaggagttgcagctgagggaaggaaggctggctatcaagcccttccaccctagtgctaacaactttcctattccactgttgcatatgcatcggaactggaagaggtccacggagtgcgcgcaggaagggagaatcccatctacggaggatctcatgcggggagcttcagctgaagaactgctagcccaatgcctgtcgagctcactgctgctggaaaaagaggagaataaacgttttgaagaccagttgcaacagtggctgtccgaggattcaggagcctttactgatctgacgtctctgcctttgtacctgcctcagaccctggtcagccttagccatactatagaacctgttatgaagacttctgtcacgacctccccccaatctgatatgatgagggagcaactgcagcttagcgaagccacgggcacttgcctaggggagcgattaaaacacctcgagaggttgataagaagttctcgggaggaggaagttgcctcagagcttcatctctccgctttacttgatatggtcgacatatag

SEQ ID NO: 295789 - DNA, 5943 bp, Artificial Sequence
  derived and/or modified sequence
atgaaccccactaacccgtttagcggccaacagccctccgctttctcggcgagctcaagcaacgttgggacgctgccctcgaagcccccattccgtttcgggcagccctccttgttcgggcagaattccaccctgagcggcaagtcttccgggttttcccaagtgtcctcgttccctgcaagcagcggcgtctcccacagtagctctgtccagacactaggctttacacagacctcaagcgttggccctttttcaggacttgagcatacttctacttttgtcgctacgtctggtccaagttcctccagcgtgctcggaaataccggcttcagcttcaagagtcccacctccgtgggcgcattccctagcacttctgccttcgggcaagaggcaggggagatcgtgaattcgggctttgggaagaccgagttctcatttaaaccgctggagaacgctgtgtttaagcctattctgggagccgaaagcgaaccagaaaagacccaatcacagatcgcctctggctttttcactttctcacacccgatctcgagcgccccagggggacttgcgcctttctcttttcctcaagtcacatctagctccgccaccacaagcaacttcacattttcaaagcctgtgtcaagcaataacagcctgtccgcttttaccccagcactgagtaaccagaacgttgaagaggaaaaacggggtcctaagagcatcttcgggtcttcgaataattcattcagcagtttccccgtcagcagtgctgtcctcggcgaaccttttcaagcgtcaaaagctggtgtgcgccaaggttgtgaggaggccgtcagccaggtggagcctctcccctccttaatgaagggacttaaaaggaaggaggatcaggaccgaagcccccgtaggcacggccatgaacctgcagaggactctgacccactgtcacgtggtgatcatccacctgataagcgacccgtgaggctgaatcggcctcgcggtggaaccctattcggtagaacgatccaggatgtgttcaagtcaaataaagaggtcggccgtctgggcaataaagaggcgaagaaagagactggctttgtggagtctgcggagagcgaccacatggccatccccggaggcaaccaatcagtgctggcaccaagccggatccctggggtgaacaaagaggaagagacagaatcacgtgaaaagaaggaagacagcttacgcggaacacctgctcgccagtcaaataggtcagaatccacagattctctcggcggtctgtcgccttctgaagtcacagctatccagtgcaagaacatcccggattatctgaacgatagaacgatcctggagaaccactttggcaagatcgccaaggtgcagagaatatttaccagaaggtctaaaaaacttgcggtagttcatttcttcgaccatgcctcggcagcgctggcgcgtaagaaaggaaaaagcctacacaaagacatggctatattctggcatagaaagaagattagccccaataaaaaaccattttcgctgaaggaaaagaaacctggagatggcgaggtcagtccgagtacagaggacgcccctttccagcacagtcccctggggaaagcagcgggtcgaaccggcgcaagctccctcctgaataaatcctccccagtcaagaagccttcactcctgaaggctcatcaattcgaaggtgattcatttgattctgcttctgaaggcagtgaaggcctgggaccatgtgtcctaagcctctctaccctgattggcaccgttgccgaaaccagtaaagagaagtatcggctcctggaccagagggaccgtattatgcggcaggccagagtgaagcgcaccgatcttgacaaggctcgcactttcgttggcacttgtctggatatgtgcccagagaaggagagatacatgcgcgaaactcgctcccagctttctgtcttcgaggtcgtccccggtactgaccaagtagatcatgccgcagccgtcaaggaatatagtcgctccagcgccgaccaggaggagcccctgccacacgaactgcgtcccttgcctgttctgtctaggactatggattatctggtgacacagattatggatcagaaggaggggagcttgagagactggtacgactttgtgtggaatcgaacccggggtataagaaaggacatcacgcaacagcatctgtgtgaccctctcactgtatcactgattgaaaagtgcacgcggtttcatatccactgtgcccactttatgtgcgaggagcccatgtcctcgttcgacgctaaaattaataacgagaatatgaccaagtgcctccaaagcctcaaagagatgtaccaggatctgcggaataagggggtgttttgtgcatccgaggctgaatttcaaggctacaatgtcctgttaagtctgaataagggcgacattttaagagaagtgcagcaattccatccagccgtccggaacagcagcgaagtgaaatttgccgtgcaagccttcgcggctctgaactcaaataattttgtgagattctttaagcttgtccagagcgcctcttacttgaacgcctgcttgctgcactgttatttctctcagatacgcaaagatgcactcagggcgcttaactttgcatatacggtgtcaacccaacgcagcacaattttccccctcgacggcgttgtgcgaatgcttttattccgggattgtgaggaggctactgatttcctcacttgtcacggactcacagtttcagatgggtgtgtcgaattgaatcggtccgcattcttagagccagagggcctgtctaaaacacgcaagagcgtgttcatcacgaggaagctgaccgtgagcgtgggtgagatcgtgaacgggggtcccttgccccctgtgcccaggcacacacctgtgtgtagcttcaattcacagaacaagtatatcggcgaaagtctggcagccgagctgcctgtgtctactcagaggcccggtagcgacacagtcgggggaggaagaggcgaagagtgcggggtcgagccagacgctcctctttcttccctcccacagtcattaccagcccctgcgccttcacctgtcccgctccctccagtgttggccttaacaccttccgttgcccctagtcttttccaactgagcgtgcagcccgaacctccaccccctgagccagtgcctatgtacagtgacgaagaccttgcgcaggtcgtagatgaactcatccaggaagctctccagcgggactgcgaagaagtgggatctgccggagccgcatacgctgctgcagcacttggtgtgtcaaatgcagctatggaggatctgctgaccgccgctactaccggaatcctgcgacatatcgccgcagaggaggtgtcaaaagagagagagcggagggagcaggaacgacaacgggctgaagaggaaagactgaagcaggaaagagagctcgtgttgtcagaactttcccagggcctggccgtggagctgatggaaagggtcatgatggagtttgtcagggagacatgctcacaagaactgaagaacgccgtggagactgaccagagggtgagggtggcacgctgttgtgaagacgtgtgtgcccacttggtagacctgtttctcgtagaagagattttccagacggcaaaagaaacccttcaagaactccagtgtttttgcaagtacttgcagcggtggcgggaagccgttactgcccgtaagaaacttaggcggcagatgcgcgctttccctgccgctccgtgctgtgtagacgtgagtgatcgcttgagggccctggctccatccgcggagtgtcctattgccgaggagaacctggctcgaggcttgctagatctggggcatgccggaaggcttggcattagctgcacccgcttgcgcaggcttcgtaacaaaaccgcacaccagatgaaggttcaacacttttaccaacaattgctctctgatgttgcttgggcctccctcgatctgccatcactggtggccgagcacttgcccggacggcaggaacacgtgttctggaagctggtgctggtcttacccgacgtggaggagcagagtccggagtcatgtggacgaatcttagcaaactggttgaaggtgaagtttatgggagatgaagggagcgtcgacgacacatccagtgacgccggaggaatacaaacgctctcactgtttaactcactctcatctaagggtgatcagatgatttcagtcaacgtatgtataaaggtggcccatggcgctctctctgacggagcaatagatgcagtggagacccagaaggatttgctgggcgcttccggcctgatgctgctgctaccaccaaaaatgaagtccgaggacatggctgaagaagatgtgtactggcttagtgcactgctgcaactcaaacagctgctgcaggctaagcctttccagcccgcattgcccctggtggttcttgtgccttctcccggaggtgatgccgtggagaaagaggtagaagacggactgatgctgcaagatctcgttagtgccaaattgatctccgattacacagttaccgaaattcctgatacaatcaatgatcttcagggatctaccaaggttctgcaggcagtgcagtggctcgtgtcgcactgtccacactctttagatttgtgttgccaaaccttaatccagtatgtagaagatggaatcggccatgaattttccggtagattttttcatgaccggagagaaagacggctaggtggacttgctagccaggagccaggcgcaattattgaactttttaatagtgtgctgcaatttttagcctcagtggtcagcagtgagcagctctgtgacctgtcctggcccgtgacagagttcgctgaggccggtgggagtcgtctcttaccacatctgcactggaacgctcctgagcacttggcctggctgaaacaagcggtcctggggtttcagctgccccagatggatctgcccccattaggtgccccttggctgccggtatgttctatggttgtacaatacgcgagtcaaatcccatcttctagacagacccagcctgtgctccagagccaggtggaaaatctcctgcatagaacgtactgccgatggaaatctaagtcacccagcccagtgcacggagcaggccctagcgtgatggagataccttgggatgatctgattgcgttgtgcatcaatcataagttaagagattggaccccgcctaggctgcccgtgactagtgaggctttatccgaggatggacaaatatgcgtgtactttttcaaaaacgacttaaagaaatacgatgtgcccctgtcttgggagcaagccaggctgcagacacagaaagaactgcagttgagggaggggcgacttgccataaaaccgttccatccatcagctaacaattttcccatccccctgctgcatatgcatcgtaactggaaacgctcgaccgagtgtgctcaggaaggaagaatcccctccacggaagacttaatgagaggggctagcgcagaagaattgctggcccagtgcttaagctcctccctcctacttgaaaaagaggaaaataagcgcttcgaagaccagctgcagcagtggctgtcagaggacagtggagcctttaccgacctgacatcactgcctctgtacctgccacagactctggtctccttgtctcacacaatagagcctgtgatgaaaacgtctgtgacgactagtcctcagtccgacatgatgcgcgaacagctccagctcagtgaggctaccggcacgtgtctcggggaacgcctcaaacacctggagagactcattcggagttccagagaggaggaggtggcgtcagagctacacttgtccgccctcctggatatggttgacatttac

SEQ ID NO: 295790 - DNA, 5942 bp, Artificial Sequence
  derived and/or modified sequence
atgaatccaaccaatcccttcagcggtcagcagccttcagcattttccgcatccagttctaatgtcggcaccctgccatccaagcccccatttcggttcggacagccttccctgttcgggcagaactccacgctgtcaggtaaatcttcgggatttagccaggtctccagctttcctgccagtagtggagtgtcacactcgagtagcgtgcagacgttgggcttcacccagactagtagcgtgggccctttcagcggcctagaacatacgtctacgtttgtcgccaccagtggcccatcctcgagcagtgtcttggggaataccggtttttcttttaagtccccaacctctgtgggggcattccccagcacatctgccttcggacaggaagccggagagatcgttaattccggctttggaaagaccgaattttccttcaaacctctagagaacgctgtcttcaagcctatcctgggggcagagtccgaaccagaaaagactcaatcccagatcgcttccgggttctttacctttagccacccaatcagttccgctcccggaggcctcgccccatttagctttccacaagtgaccagctccagtgctactacctctaactttaccttttctaagcccgtgagcagcaacaacagtctgagtgcgttcacccccgcattatcaaaccagaatgtggaggaggagaaaaggggacccaaaagcatcttcgggtcaagcaataattctttctcttcttttcctgtgtcatccgccgtgctgggagagccctttcaagcttcgaaagccggagtgcggcaaggctgtgaggaagctgtgagccaggtggagccgctcccatcgttgatgaagggcttaaagagaaaggaagatcaggaccgttcacctagaaggcacgggcacgaacctgccgaagacagtgaccctcttagcaggggggaccatccgcctgataagagacccgtgcgtcttaaccggccacggggagggacgctgtttggacggacaattcaggatgtattcaagagcaataaggaggtggggagactcggcaacaaggaggcaaagaaggaaactgggttcgtagagagcgctgagtcagaccacatggcaataccaggaggaaatcagtccgtgctcgccccatcgaggattcctggcgtgaataaggaggaggaaacagaatctcgggaaaagaaagaagattctctgcggggaacccctgcaaggcagagcaacaggtctgagtctacagattcactgggcggtctgagtccttcggaagttacagccattcagtgcaaaaatatccctgactacctcaatgatagaaccatactggaaaatcacttcggcaagattgcaaaagtgcaaaggatttttacacgcagatctaaaaagctggccgttgtccactttttcgatcacgcaagtgcggcactggctaggaaaaagggcaaaagcctgcacaaggatatggctatcttctggcaccgtaagaaaatctctcccaataaaaaaccattttctctgaaggagaaaaagcccggagatggagaggtcagcccctccacagaggatgcgcctttccagcactctccactggggaaggctgccggtagaactggcgcaagctctctgctgaacaaatccagccccgtcaagaagccatccctattaaaggctcaccagttcgagggagacagttttgacagcgcctctgagggctccgagggactcgggccatgtgttctgagtctgtcaactttaatcggcacagtcgctgaaacaagcaaggagaagtatcgactgctggaccaacgagacaggatcatgcgacaggccagggtgaagcgcactgatctagacaaagccaggacgtttgtcggcacttgcctggacatgtgcccagaaaaggagcgttacatgcgggaaacacggtcccagttgagcgtcttcgaggtagtaccaggaaccgaccaagtcgaccacgcagctgcagtgaaggaatactctcggtcctcagccgaccaagaggaaccacttccccacgagttaagacccctacccgtgctgtcaagaactatggactatctggttactcagattatggatcagaaggagggttcactgcgtgactggtatgacttcgtctggaatcggacacggggaattaggaaagacatcacacagcaacatttgtgtgacccactcacagtgtctctgattgaaaaatgcacaaggtttcacatccattgtgctcacttcatgtgcgaggagcccatgtctagtttcgatgctaagatcaataatgaaaatatgaccaaatgtctgcaatccctaaaggagatgtatcaagacctgagaaataaaggggtgttctgcgccagtgaggccgagttccagggatataacgtgctcctgagcctgaacaagggagacatcctgcgcgaggttcagcagttccaccctgccgtgcggaattcttctgaggtcaaattcgctgttcaggcgtttgcagctctgaacagcaacaatttcgtgagatttttcaagctggtgcaaagcgctagttatctcaatgcttgtctgcttcactgctattttagtcagatacgcaaagatgcattgcgggctctcaacttcgcatacaccgtttctacacagaggagcacaatatttcccctggacggggtggttcggatgttgctgttcagggactgcgaagaagcaacagatttcctgacgtgccatggactgactgtaagtgatggctgtgtcgaacttaatagaagtgcatttctggaacctgagggcctgagtaagacccgtaaatcagtgttcatcacgcgaaaactgactgtcagcgttggtgagattgtaaatggcggacctctccctccagttcctcgccacaccccagtatgttcattcaacagccagaacaaatatattggagaatcgttggccgctgaacttcctgtttctacccagcggccaggttccgatacagtagggggaggccgtggagaagagtgcggcgtggagccggatgcgccattgtcaagtctcccccagtctcttccagctcctgctcccagcccagtgccactgcctccggtgcttgcactgaccccatcagtcgcccctagtctgtttcaactctctgtccagccagagcccccaccgccagaacccgtgcctatgtacagcgacgaagacctcgcccaagtggtcgatgagttgatccaagaagctctccaaagggactgtgaggaggtgggcagcgccggtgcggcttatgccgcagccgctctgggcgtctccaatgccgctatggaggacctactgactgcggcaaccactggaatcctgaggcatatagcggctgaagaagtttccaaggagcgggagcggcgtgaacaggagcgccagagagccgaggaggaacggctaaaacaggaaagagagctggtgctgtccgagctcagccagggcctcgcagtggaactcatggaaagagttatgatggagtttgtgcgagaaacttgctctcaggaactgaaaaacgccgtagagacagatcagcgggtgcgagttgcacgctgctgcgaggacgtgtgcgcccatctggtggacctttttctcgtggaagaaattttccagacagcgaaagaaaccctccaagagctgcaatgcttctgcaagtatttgcaacgctggcgcgaggccgtgactgcaaggaaaaagctaaggaggcagatgagagcatttcctgccgcaccatgttgtgtggatgttagtgaccggcttcgcgctctggcaccatctgccgagtgccccatagccgaggagaatctggccagagggctgctcgacttgggccatgccggaagacttggcatttcctgtacgcgactgagacgcttgaggaacaagactgcccaccaaatgaaagtgcagcacttctatcagcaactgctctccgacgtagcatgggcttccttagacttgccttccctagtggcagagcacctacccggacggcaggaacacgttttttggaaactggtgcttgtgctgcctgacgtcgaggagcaaagccccgaatcctgcggccgaatcttagcaaattggctgaaggtgaagtttatgggtgacgaaggatcagtagacgacacttcctcagatgccggaggtatccagacactctcactgttcaactcactgagctctaagggggaccagatgatctcagtcaatgtctgcataaaggtagcacatggtgctctaagcgacggagctatcgacgccgtggagacccagaaggatcttcttggagcgtctgggcttatgctcctcttacccccaaagatgaaaagtgaagacatggctgaagaagacgtgtactggctctcagccctgctgcaactgaaacagctgctccaggctaagcccttccagccagccctcccactggtggttttggtgccctctccaggaggcgatgcagtggagaaggaggtggaagatgggttgatgctacaggacctggtttcggccaagctcataagtgactataccgttactgaaatacctgacaccattaatgacttgcagggcagcacgaaagtactgcaggcagtgcaatggctagtaagccactgtcctcacagtttagatttgtgttgtcaaacactgattcaatatgtcgaggacgggatcgggcatgagttcagtggacgtttttttcacgacagaagggagcgacgcctgggcggtctggcctctcaggagccaggtgcgattatcgaactgtttaattcagtattgcagttcctggcatccgtcgtctccagcgagcagttatgcgacctgagttggccagtcaccgagttcgcagaagctggcggatcacgtctgctgccgcatctgcattggaacgcccctgagcacctggcctggctgaaacaagcagtcctgggtttccaactcccgcaaatggacctgcccccactcggagctccatggctgccggtgtgcagtatggtcgtccagtacgcaagccagatcccgtcttctcggcagacccagcctgtgctgcagagccaggttgagaaccttcttcaccgtacatattgtcgctggaagagtaagtcaccatctccggtgcacggcgcaggacccagcgtgatggagataccctgggatgatctgatagccctttgcatcaaccataaactgcgggattggactcctcctaggcttcctgtgacttctgaggccctgagtgaggacggccaaatctgcgtgtacttttttaagaatgacctgaagaagtacgatgtgcccctgagttgggagcaggcaaggcttcaaacccagaaagagctccagttgcgagaaggtcggctggcaattaagcccttccacccctcggcaaataatttcccgattcctttactgcacatgcaccggaactggaaaaggagcacagagtgtgcccaagaagggagaatccccagcactgaagacctgatgaggggggcaagcgcagaagaactcttggctcagtgccttagtagcagcctcctgctcgagaaagaagagaacaagagatttgaagatcaacttcaacagtggcttagcgaggattcaggagcctttacagatttgactagcttgcctctctatctgccacagactctggtcagtctatcacataccatagaaccggtgatgaagacttcggtcaccacgagcccccaaagcgatatgatgcgcgaacagttacagcttagcgaggccaccgggacatgcttaggggagagacttaagcaccttgagcgcttgatcagatcgagtcgcgaggaggaggtggccagtgagctacacctctccgccctcctggatatggtcgacattta

SEQ ID NO: 295791 - DNA, 285 bp, Artificial Sequence
  derived and/or modified sequence
atgaatccaacaaatcctttctcagggcagcagcctagcgcgttttcagccagtagctctaatgtgggcactctgccttctaagcctccttttagattcggtcagcctagcctatttggacagaacagcaccctgtcaggaaagtcatccggcttctctcaggtgagttcattccccgcatctagcggggtctcccattcctccagcgtccaaactctgggcttcacccagactagttccgttgggcctttctcgggtctcgagcacacctccacgttcgtgtag

SEQ ID NO: 295792 - DNA, 876 bp, Artificial Sequence
  derived and/or modified sequence
ggcagcgcgggcctcggggtcctggggcgagacggtgagcgtgggggctgggccggcgccaggggcgccgtttccttcccccacgcagctccgcgcgcccgggcctccacatcgtcgctaacggagcgttgcggcgccggcgacccctggcgagcccggggcgggacagtggccaggccggcctgggcccagcgcgtggcctccgccgtttcgggctgtgctgggtggaagattaggctccccgggcacgccgtccccgccgagaggcctcagcttcgtggcagcgccctcgtccttccagcccgctcgagggtggccgccagggcgcgatgaaggaatgtgagaaagtgcttagcgctccagccgctccgagggaagccaggtgggaggagatcccgaaacgctaaggttttgacagcgttacagtgaattctccggctgtagagattggaggaagtcgggagaaattcgtctctaagttgtaagcttgttctaaagacgaaggggaactccctagtgctacaggctgtttcaggaagccaattaattttgtacacataatacttaattaccttctaataattggagcagaagatgaacccaactaatcctttcagtgggcagcagcctagtgctttttcggcgtcttctagtaatgtaggaacacttccatctaagccgccatttcgatttggtcaaccttctctttttggacaaaacagtaccttatctgggaagagctcgggattttcacaggtatccagctttccagcgtcttctggagtaagtcattcctcttcagtgcaaacattagggttcacccaaacctcaagtgttggacccttttctggacttgagcacacttccacctttgtg

SEQ ID NO: 295793 - DNA, 1428 bp, Artificial Sequence
  derived and/or modified sequence
atgcaggtcacctttatatatgtgtgtttgaagggcctcatgcttcaagatttagttagcgccaaattaatatccgattatacagtcactgagatccctgacactattaacgacctacaagggtctactaaggtgctccaggccgtccagtggttggtctcacactgccctcattcactggacctctgctgccaaactttgattcagtatgtggaagacggcatcggacacgagttctcggggaggttcttccacgatcggcgagaacggcgactgggcggactagcatcccaggagccgggtgccatcatcgagttgttcaactctgttttgcagttcctggcttccgtcgtgtcatccgagcagttatgtgacctgagttggccagttaccgaattcgccgaggctgggggtagcaggctgttgccccacctccactggaatgccccagaacaccttgcttggctgaaacaggcagtgttgggcttccagctgcctcagatggacttgcctcccttgggtgcaccatggttgcctgtctgttctatggtcgtgcaatacgccagtcagatccctagttcacggcaaacacaacccgtgctgcagtcccaggtcgagaacctgctccatcggacctattgccgatggaaatccaagagcccatcacctgttcatggagccggtccctctgtgatggagattccgtgggacgatttaatcgctctttgtattaatcacaaattacgagactggaccccaccacgacttcctgtaacttctgaggcattgagcgaggatggtcaaatctgtgtgtactttttcaagaacgatttgaagaaatacgacgttcccctgagttgggaacaagcccgtctgcagacacagaaggagctgcagctgcgagagggacgcttggccatcaagccgtttcacccaagcgccaataactttccaattcccctgctccacatgcaccgcaactggaaacgcagcactgaatgtgcccaggaaggacgaataccttctacagaggacctcatgagaggcgcttccgctgaggagttactcgcacaatgtttgagctcaagcctcttactcgaaaaggaggagaacaaaagattcgaagatcagctccagcaatggttgagtgaggacagtggcgcttttactgacctaacatcccttcccctctacctcccccagacattagtgagtctttcacacacaatcgagcccgtcatgaagacgagtgtaaccaccagcccgcagagtgatatgatgagggaacagctgcaactttcagaggccacaggaacctgtcttggagaacggctaaagcatcttgaacggctgattcgatcatcacgggaagaggaagtcgcgtccgagctgcacctctctgctttactggacatggtggacatctag

SEQ ID NO: 295794 - DNA, 3127 bp, Artificial Sequence
  derived and/or modified sequence
ccatatatattacttatttcctctttctttttatcatgactttttcatagcatcttattttttggatgcatcatcttatctttccaaggaaattagggtttttggggtctaagttttctttggttcacgtattatctggttcctcttttttttttttttcctctctgttactccagtttatctcttttatgttggaggccctcctcagatgccttacccaaggctatctgtctatatctgagtgaggccctaaaaggctagccaagaagttctgtgtttggggtggggtggatggtagctaaatggcaagccaggctttttggagggactcccaaatgtctggatctggatggctgttccctagactgttcagtttttctggaaaggacttgtgccatctgctttctggggagctgctggtattctcagggtagggttgggagtggtttggcgctgagtcccttccactgtgcctgaccatggccctgcatctggatcctctcaggactcctgttcaggggcccagggggactggttttgcatagaggttgcctgcagtggtgggtgccgccaatagggtcaggctctgaacttcacctttggctcctggtgtctgcagcgcctgggtatacagggcttttgcaggctcagtcaacctgactccttacacacccacatctgcagcctttaggtatggcatcctctgcttccctaacccagggattggtcacacctatttgctgctttctagaaatgtatcagaatccctcatctgctgctggcttgccttccctctttctattattatgggcttatatttttgtttatttttgtagagatggggcaacataataagacccccttctcaaaaaaaaaaaaaggttgaggggagtctttgctaacaattggatttagggaaagaggggccaggaattaaaataactacaggaagtaagataactacagggtatgcccagctgtgcccttggaggcctgtctggagtacagtcagtatttagtgcacggagagctttggctgcacttgctctggggcagatcagtcactgctgatgcgtcccatggtgcatctctcctgatgatcttgatgctgttgcaggtggcccatggcgccctcagtgatggtgccattgatgctgtggagacacagaaggacctcctgggagccagtgggctcatgctgctgcttccccccaaaatgaagagtgaggacatggcagaggaggacgtgtactggctgtcggccttgctgcagctcaagcagctcctgcaggctaagcccttccagcctgcgcttcctctggtggttcttgtgcctagcccaggaggggacgccgttgagaaggaagtagaagatggtttgtgaaggaagtctcgtttatgaagcagcattgtttaataaatgggtggaggccctgggtctgaggatggtccagtagtgttggggtcaggaatcactgagacagcaacccctgtggtgactgtccactgcaggactgggtggggtcagcacagtgagatatgttagcaggtgtgctgacagcagaatgcaagtgaccttcatctatgtctgtcttaaaggtctgatgctacaggacttggtttcagctaagctgatttcagattacactgttaccgagatccctgataccattaatgatctacaaggttcaactaaggttttgcaagcagtgcagtggctggtttcccactgcccccattcccttgacctctgctgccagactctcattcagtacgtcgaagacgggattggccatgagtttagtggccgctttttccatgacagaagagagaggcgtctgggcggtcttgcttctcaggagcctggcgccatcattgagctgtttaacagtgtgctgcagttcctggcttctgtggtgtcctctgaacagctgtgtgacctgtcctggcctgtcactgagtttgctgaggcagggggcagccggctgcttcctcacctgcactggaatgccccagagcacctggcctggctgaagcaggctgtgctcgggttccagcttccgcagatggaccttccacccctgggggccccctggctccccgtgtgctccatggttgtccagtacgcctcccagatccccagctcacgccagacacagcctgtcctccagtcccaggtggagaacctgctccacagaacctactgtaggtggaagagcaagagtccctccccagtccatggggcaggcccctcggtcatggagatcccatgggatgatcttatcgccttgtgtatcaaccacaagctgagagactggacgcccccccggcttcctgttacatcagaggcgctgagtgaagatggtcagatatgtgtgtatttttttaaaaacgatttgaaaaaatatgatgttcctttgtcgtgggaacaagccaggttgcagacgcagaaggagctacagctgagagagggacgtttggcaataaagccttttcatccttctgcaaacaattttcccataccattgcttcacatgcaccgtaactggaagaggagcacagagtgtgctcaagaggggaggattcccagcacagaggatctgatgcgaggagcttctgctgaggagctcttggcgcagtgtttgtcgagcagtctgctgctggagaaagaagagaacaagaggtttgaagatcagcttcagcaatggttgtctgaagactcaggagcatttacggatttaacttcccttcccctctatcttcctcagactctagtgtctctttctcacactattgaacctgtgatgaaaacatctgtaactactagcccacagagtgacatgatgagggagcaactgcagctgtcagaggcgacaggaacgtgtctaggcgaacgactaaagcacctggaaaggctgatccggagttcaagggaagaggaagttgcctctgagctccatctctctgcgctgctagacatggtggacatttgagcagcctgacctgtggggagggggtctctcccgaagagtttctgtttttactcaaaataatgttattctcagatgcttgatgcactgttggaaatgtgattaatttaatcatgcagataaaccatttaaatgtc

SEQ ID NO: 295795 - DNA, 6113 bp, Artificial Sequence
  derived and/or modified sequence
taatacttaattaccttctaataattggagcagaagatgaacccaactaatcctttcagtgggcagcagcctagtgctttttcggcgtcttctagtaatgtaggaacacttccatctaagccgccatttcgatttggtcaaccttctctttttggacaaaacagtaccttatctgggaagagctcgggattttcacaggtatccagctttccagcgtcttctggagtaagtcattcctcttcagtgcaaacattagggttcacccaaacctcaagtgttggacccttttctggacttgagcacacttccacctttgtggctacctctgggccttcaagttcatctgtgctgggaaacacaggatttagttttaaatcacccaccagtgttggggctttcccaagcacttctgcttttggacaagaagctggagaaatagtgaactctggttttgggaaaacagaattcagctttaaacctctggaaaatgcagtgttcaaaccaatactgggggctgaatctgagccagagaaaacccagagccaaattgcttctgggttttttacattttcccacccaattagtagtgcacctggaggcctggcccctttctcttttcctcaagtaacaagtagttcagctaccacttcaaattttaccttttcaaaacctgttagtagtaataattcattatctgcctttacccctgctttgtcaaaccaaaatgtagaggaagagaagagaggacctaagtcaatatttggaagttctaataatagcttcagtagcttccctgtatcatctgcggttttgggcgaacctttccaggctagcaaagcaggtgtcaggcaggggtgtgaagaagctgtttcccaggtggaaccacttcccagcctaatgaaaggactgaaaaggaaggaggaccaggatcgctccccaaggagacatggccacgagccagcagaagattcggatcctctgtcccggggcgatcatcctccagacaaacgacctgtccgcctgaatcgaccccggggaggtactttatttggtcggacgatacaggatgttttcaaaagcaataaggaagtaggtcgtctgggcaacaaggaggccaaaaaggaaactggctttgttgagtctgcagaaagtgaccacatggctatcccaggagggaatcagtctgtcctggcaccttcccggattccaggtgtgaataaagaggaagaaactgaaagtagagagaagaaagaagattctctaagaggaactccggcgcgtcagagtaacagaagcgagagcacagacagtcttgggggcttgtctccctctgaagtcacagccatccagtgcaagaacatccctgactacctcaacgacaggaccattctggagaaccattttggcaaaattgctaaagtgcagcgcatctttaccaggcgcagcaaaaagcttgcagtggtacatttctttgatcatgcatctgcagccctggctagaaagaaggggaaaagtttgcataaagacatggctatcttttggcacaggaagaaaataagccccaataagaaacccttttccctgaaggagaagaaaccaggtgacggtgaagtcagcccgagcacagaggatgcaccctttcagcactctcctcttggcaaggccgcagggaggactggtgctagcagcctcctgaataaaagctctccagtgaagaagccaagtcttctaaaggcccaccaattcgagggagactcttttgactcagcctccgagggctccgagggcctcgggccatgtgtgctctccctcagtaccctgataggcactgtggctgagacatccaaggagaagtaccgcctgcttgaccagagagacaggatcatgcggcaagctcgggtgaagagaaccgatctggacaaagcgaggacttttgttggcacctgcctggatatgtgtcctgagaaggagaggtacatgcgggagacccgtagccagctgagcgtgttcgaagtggtcccagggactgaccaggtggaccacgcagcagctgtgaaagagtacagtcggtcctcggcggatcaggaggagcccctgccccacgagctgcggcccttgccagtgctcagcaggaccatggactacctggtgacccagatcatggaccagaaggagggcagcctgcgggattggtatgacttcgtgtggaaccgcacgcgtggcatacggaaggatatcacgcagcagcacctctgtgaccccctgacggtgtccctgattgagaagtgcacccggtttcacatccactgtgcccacttcatgtgtgaggagcccatgtcctcctttgatgccaagatcaataatgagaacatgaccaagtgcctgcagagcctgaaggagatgtaccaggacctgagaaacaagggtgtcttctgtgccagcgaagcggagttccagggctacaatgttctgctcagtctcaacaagggagacatcctaagagaagtacaacagttccatcctgctgttagaaactcatctgaggtgaaatttgctgttcaggcttttgctgcattgaacagtaataattttgtgagatttttcaaactggtccagtcagcttcttacctgaacgcttgtcttttacactgttacttcagtcagatccgcaaggatgctctccgggcgctcaactttgcgtacacggtgagcacacagcgatctaccatctttcccctggatggtgtggtgcgcatgctgctgttcagagactgtgaagaggccaccgacttcctcacctgccacggcctcaccgtttccgacggctgtgtggagctgaaccggtctgcattcctggaaccagagggattatccaagaccaggaagtcggtgtttattactaggaagctgacggtgtcagtcggggaaattgtgaacggagggccattgccccccgtccctcgtcatacccctgtgtgcagcttcaactcccagaacaagtacatcggggagagcctggccgcggagctgcccgtcagcacccagagacccggctccgacacagtgggcggagggagaggagaggagtgtggtgtagagccggatgcacccctgtccagtctcccacagtctctaccagcccctgcgccctcaccagtgcctctgcctcctgtcctggcactgaccccgtctgtggcgcccagcctcttccagctgtctgtgcagcctgaaccaccgcctccagagcccgtgcccatgtactctgacgaggacctggcgcaggtggtggacgagctcatccaggaggccctgcagagggactgtgaggaagttggctctgcgggtgctgcctacgcagctgccgccctgggtgtttctaatgctgctatggaggatttgttaacagctgcaaccacgggcattttgaggcacattgcagctgaagaagtgtctaaggaaagagagcgaagggagcaggagaggcagcgggctgaagaggaaaggttgaaacaagagagagagctggtgttaagtgagctgagccagggcctggccgtggagctgatggaacgcgtgatgatggagtttgtgagggaaacctgctcccaggagttgaagaatgcagtagagacagaccagagggtccgtgtggcccgttgctgtgaggatgtctgtgcccacttagtggacttgtttctcgtggaggaaatcttccagactgcaaaggagaccctccaggagcttcagtgcttctgcaagtatctacagcggtggagggaagctgtcacagcccgcaagaaactgaggcgccaaatgcgggctttccctgctgcgccctgctgcgtggacgtgagcgaccggctgagggcgctggcgcccagcgcagagtgccccattgctgaagagaacctggccaggggcctcctggacctgggccatgcagggagattgggcatctcctgcaccaggttaaggcggctcagaaacaagacagctcaccagatgaaggttcagcacttctaccagcagctgctgagtgatgtggcatgggcgtctctggacctgccatccctcgtggctgagcacctccctgggaggcaggagcatgtgttttggaagctggtgctggtgttgccggatgtagaggagcagtccccagagagttgtggcagaattctagcaaattggttaaaagtcaagttcatgggagatgaaggctcagtggatgacacatccagcgatgctggtgggattcagacgctttcgcttttcaactcacttagcagcaaaggggatcagatgatttctgttaacgtgtgtataaaggtggcccatggcgccctcagtgatggtgccattgatgctgtggagacacagaaggacctcctgggagccagtgggctcatgctgctgcttccccccaaaatgaagagtgaggacatggcagaggaggacgtgtactggctgtcggccttgctgcagctcaagcagctcctgcaggctaagcccttccagcctgcgcttcctctggtggttcttgtgcctagcccaggaggggacgccgttgagaaggaagtagaagatggtctgatgctacaggacttggtttcagctaagctgatttcagattacactgttaccgagatccctgataccattaatgatctacaaggttcaactaaggttttgcaagcagtgcagtggctggtttcccactgcccccattcccttgacctctgctgccagactctcattcagtacgtcgaagacgggattggccatgagtttagtggccgctttttccatgacagaagagagaggcgtctgggcggtcttgcttctcaggagcctggcgccatcattgagctgtttaacagtgtgctgcagttcctggcttctgtggtgtcctctgaacagctgtgtgacctgtcctggcctgtcactgagtttgctgaggcagggggcagccggctgcttcctcacctgcactggaatgccccagagcacctggcctggctgaagcaggctgtgctcgggttccagcttccgcagatggaccttccacccctgggggccccctggctccccgtgtgctccatggttgtccagtacgcctcccagatccccagctcacgccagacacagcctgtcctccagtcccaggtggagaacctgctccacagaacctactgtaggtggaagagcaagagtccctccccagtccatggggcaggcccctcggtcatggagatcccatgggatgatcttatcgccttgtgtatcaaccacaagctgagagactggacgcccccccggcttcctgttacatcagaggcgctgagtgaagatggtcagatatgtgtgtatttttttaaaaacgatttgaaaaaatatgatgttcctttgtcgtgggaacaagccaggttgcagacgcagaaggagctacagctgagagagggacgtttggcaataaagccttttcatccttctgcaaacaattttcccataccattgcttcacatgcaccgtaactggaagaggagcacagagtgtgctcaagaggggaggattcccagcacagaggatctgatgcgaggagcttctgctgaggagctcttggcgcagtgtttgtcgagcagtctgctgctggagaaagaagagaacaagaggtttgaagatcagcttcagcaatggttgtctgaagactcaggagcatttacggatttaacttcccttcccctctatcttcctcagactctagtgtctctttctcacactattgaacctgtgatgaaaacatctgtaactactagcccacagagtgacatgatgagggagcaactgcagctgtcagaggcgacaggaacgtgtctaggcgaacgactaaagcacctggaaaggctgatccggagttcaagggaagaggaagttgcctctgagctccatctctctgcgctgctagacatggtggacatttgagcagcctgacctgtggggagggggtctctcccgaagagtttctgtttttactcaaaataatgttattctcagatgcttgatgcactgttggaaatgtgattaatttaatcatgcagataaaccatttaaatgtc

SEQ ID NO: 295796 - DNA, 5943 bp, Artificial Sequence
  derived and/or modified sequence
atgaaccccaccaaccccttcagcggccagcagcccagcgccttcagcgccagcagcagcaacgtgggcaccctgcccagcaagccccccttcagattcggccagcccagcctgttcggccagaacagcaccctgagcggcaagagcagcggcttcagccaggtgagcagcttccccgccagcagcggcgtgagccacagcagcagcgtgcagaccctgggcttcacccagaccagcagcgtgggccccttcagcggcctggagcacaccagcaccttcgtggccaccagcggccccagcagcagcagcgtgctgggcaacaccggcttcagcttcaagagccccaccagcgtgggcgccttccccagcaccagcgccttcggccaggaggccggcgagatcgtgaacagcggcttcggcaagaccgagttcagcttcaagcccctggagaacgccgtgttcaagcccatcctgggcgccgagagcgagcccgagaagacccagagccagatcgccagcggcttcttcaccttcagccaccccatcagcagcgcccccggcggcctggcccccttcagcttcccccaggtgaccagcagcagcgccaccaccagcaacttcaccttcagcaagcccgtgagcagcaacaacagcctgagcgccttcacccccgccctgagcaaccagaacgtggaggaggagaagagaggccccaagagcatcttcggcagcagcaacaacagcttcagcagcttccccgtgagcagcgccgtgctgggcgagcccttccaggccagcaaggccggcgtgagacagggctgcgaggaggccgtgagccaggtggagcccctgcccagcctgatgaagggcctgaagagaaaggaggaccaggacagaagccccagaagacacggccacgagcccgccgaggacagcgaccccctgagcagaggcgaccacccccccgacaagagacccgtgagactgaacagacccagaggcggcaccctgttcggcagaaccatccaggacgtgttcaagagcaacaaggaggtgggcagactgggcaacaaggaggccaagaaggagaccggcttcgtggagagcgccgagagcgaccacatggccatccccggcggcaaccagagcgtgctggcccccagcagaatccccggcgtgaacaaggaggaggagaccgagagcagagagaagaaggaggacagcctgagaggcacccccgccagacagagcaacagaagcgagagcaccgacagcctgggcggcctgagccccagcgaggtgaccgccatccagtgcaagaacatccccgactacctgaacgacagaaccatcctggagaaccacttcggcaagatcgccaaggtgcagagaatcttcaccagaagaagcaagaagctggccgtggtgcacttcttcgaccacgccagcgccgccctggccagaaagaagggcaagagcctgcacaaggacatggccatcttctggcacagaaagaagatcagccccaacaagaagcccttcagcctgaaggagaagaagcccggcgacggcgaggtgagccccagcaccgaggacgcccccttccagcacagccccctgggcaaggccgccggcagaaccggcgccagcagcctgctgaacaagagcagccccgtgaagaagcccagcctgctgaaggcccaccagttcgagggcgacagcttcgacagcgccagcgagggcagcgagggcctgggcccctgcgtgctgagcctgagcaccctgatcggcaccgtggccgagaccagcaaggagaagtacagactgctggaccagagagacagaatcatgagacaggccagagtgaagagaaccgacctggacaaggccagaaccttcgtgggcacctgcctggacatgtgccccgagaaggagagatacatgagagagaccagaagccagctgagcgtgttcgaggtggtgcccggcaccgaccaggtggaccacgccgccgccgtgaaggagtacagcagaagcagcgccgaccaggaggagcccctgccccacgagctgagacccctgcccgtgctgagcagaaccatggactacctggtgacccagatcatggaccagaaggagggcagcctgagagactggtacgacttcgtgtggaacagaaccagaggcatcagaaaggacatcacccagcagcacctgtgcgaccccctgaccgtgagcctgatcgagaagtgcaccagattccacatccactgcgcccacttcatgtgcgaggagcccatgagcagcttcgacgccaagatcaacaacgagaacatgaccaagtgcctgcagagcctgaaggagatgtaccaggacctgagaaacaagggcgtgttctgcgccagcgaggccgagttccagggctacaacgtgctgctgagcctgaacaagggcgacatcctgagagaggtgcagcagttccaccccgccgtgagaaacagcagcgaggtgaagttcgccgtgcaggccttcgccgccctgaacagcaacaacttcgtgagattcttcaagctggtgcagagcgccagctacctgaacgcctgcctgctgcactgctacttcagccagatcagaaaggacgccctgagagccctgaacttcgcctacaccgtgagcacccagagaagcaccatcttccccctggacggcgtggtgagaatgctgctgttcagagactgcgaggaggccaccgacttcctgacctgccacggcctgaccgtgagcgacggctgcgtggagctgaacagaagcgccttcctggagcccgagggcctgagcaagaccagaaagagcgtgttcatcaccagaaagctgaccgtgagcgtgggcgagatcgtgaacggcggccccctgccccccgtgcccagacacacccccgtgtgcagcttcaacagccagaacaagtacatcggcgagagcctggccgccgagctgcccgtgagcacccagagacccggcagcgacaccgtgggcggcggcagaggcgaggagtgcggcgtggagcccgacgcccccctgagcagcctgccccagagcctgcccgcccccgcccccagccccgtgcccctgccccccgtgctggccctgacccccagcgtggcccccagcctgttccagctgagcgtgcagcccgagccccccccccccgagcccgtgcccatgtacagcgacgaggacctggcccaggtggtggacgagctgatccaggaggccctgcagagagactgcgaggaggtgggcagcgccggcgccgcctacgccgccgccgccctgggcgtgagcaacgccgccatggaggacctgctgaccgccgccaccaccggcatcctgagacacatcgccgccgaggaggtgagcaaggagagagagagaagagagcaggagagacagagagccgaggaggagagactgaagcaggagagagagctggtgctgagcgagctgagccagggcctggccgtggagctgatggagagagtgatgatggagttcgtgagagagacctgcagccaggagctgaagaacgccgtggagaccgaccagagagtgagagtggccagatgctgcgaggacgtgtgcgcccacctggtggacctgttcctggtggaggagatcttccagaccgccaaggagaccctgcaggagctgcagtgcttctgcaagtacctgcagagatggagagaggccgtgaccgccagaaagaagctgagaagacagatgagagccttccccgccgccccctgctgcgtggacgtgagcgacagactgagagccctggcccccagcgccgagtgccccatcgccgaggagaacctggccagaggcctgctggacctgggccacgccggcagactgggcatcagctgcaccagactgagaagactgagaaacaagaccgcccaccagatgaaggtgcagcacttctaccagcagctgctgagcgacgtggcctgggccagcctggacctgcccagcctggtggccgagcacctgcccggcagacaggagcacgtgttctggaagctggtgctggtgctgcccgacgtggaggagcagagccccgagagctgcggcagaatcctggccaactggctgaaggtgaagttcatgggcgacgagggcagcgtggacgacaccagcagcgacgccggcggcatccagaccctgagcctgttcaacagcctgagcagcaagggcgaccagatgatcagcgtgaacgtgtgcatcaaggtggcccacggcgccctgagcgacggcgccatcgacgccgtggagacccagaaggacctgctgggcgccagcggcctgatgctgctgctgccccccaagatgaagagcgaggacatggccgaggaggacgtgtactggctgagcgccctgctgcagctgaagcagctgctgcaggccaagcccttccagcccgccctgcccctggtggtgctggtgcccagccccggcggcgacgccgtggagaaggaggtggaggacggcctgatgctgcaggacctggtgagcgccaagctgatcagcgactacaccgtgaccgagatccccgacaccatcaacgacctgcagggcagcaccaaggtgctgcaggccgtgcagtggctggtgagccactgcccccacagcctggacctgtgctgccagaccctgatccagtacgtggaggacggcatcggccacgagttcagcggcagattcttccacgacagaagagagagaagactgggcggcctggccagccaggagcccggcgccatcatcgagctgttcaacagcgtgctgcagttcctggccagcgtggtgagcagcgagcagctgtgcgacctgagctggcccgtgaccgagttcgccgaggccggcggcagcagactgctgccccacctgcactggaacgcccccgagcacctggcctggctgaagcaggccgtgctgggcttccagctgccccagatggacctgccccccctgggcgccccctggctgcccgtgtgcagcatggtggtgcagtacgccagccagatccccagcagcagacagacccagcccgtgctgcagagccaggtggagaacctgctgcacagaacctactgcagatggaagagcaagagccccagccccgtgcacggcgccggccccagcgtgatggagatcccctgggacgacctgatcgccctgtgcatcaaccacaagctgagagactggaccccccccagactgcccgtgaccagcgaggccctgagcgaggacggccagatctgcgtgtacttcttcaagaacgacctgaagaagtacgacgtgcccctgagctgggagcaggccagactgcagacccagaaggagctgcagctgagagagggcagactggccatcaagcccttccaccccagcgccaacaacttccccatccccctgctgcacatgcacagaaactggaagagaagcaccgagtgcgcccaggagggcagaatccccagcaccgaggacctgatgagaggcgccagcgccgaggagctgctggcccagtgcctgagcagcagcctgctgctggagaaggaggagaacaagagattcgaggaccagctgcagcagtggctgagcgaggacagcggcgccttcaccgacctgaccagcctgcccctgtacctgccccagaccctggtgagcctgagccacaccatcgagcccgtgatgaagaccagcgtgaccaccagcccccagagcgacatgatgagagagcagctgcagctgagcgaggccaccggcacctgcctgggcgagagactgaagcacctggagagactgatcagaagcagcagagaggaggaggtggccagcgagctgcacctgagcgccctgctggacatggtggacatctag

SEQ ID NO: 295797 - protein, 145 aa, Artificial Sequence
  derived and/or modified sequence
MDPEEQELLNDYRYRSYSSVIEKALRNFESSSEWADLISSLGKLNKALQSNLRYSLLPRRLLISKRLAQCLHPALPSGVHLKALETYEIIFKIVGTKWLAKDLFLYSCGLFPLLAHAAVSVRPVLLTLYEKYFLPLQKLLLPSLQ

SEQ ID NO: 295798 - protein, 2298 aa, Artificial Sequence
  derived and/or modified sequence
MDPEEQELLNDYRYRSYSSVIEKALRNFESSSEWADLISSLGKLNKALQSNLRYSLLPRRLLISKRLAQCLHPALPSGVHLKALETYEIIFKIVGTKWLAKDLFLYSCGLFPLLAHAAVSVRPVLLTLYEKYFLPLQKLLLPSLQAFIVGLLPGLEEGSEISDRTDALLLRLSLVVGKEVFYTALWGSVLASPSIRLPASVFVVGHINRDAPGREQKYMLGTNHQLTVKSLRASLLDSNVLVQRNNLEIVLFFFPFYTCLDSNERAIPLLRSDIVRILSAATQTLLRRDMSLNRRLYAWLLGSDIKGNTVVPESEISNSYEDQSSYFFEKYSKDLLVEGLAEILHQKFIDADVEERHHAYLKPFRVLISLLDKPEIGPQVVGNLFLEVIRAFYSYCRDALGSDLKLSYTQSGNSLISAIKENRNASEIVKTVNLLITSLSTDFLWDYMTRCFEECFRPVKQRYSVRNSVSPPPTVSELCALLVFLLDVIPLELYSEVQTQYLPQVLGCLVQPLAEDMEALSLPELTHALKTCFKVLSKVQMPPSYLDTESTSGTSSPVKGENGKIILETKAVIPGDEDASFPPLKSEDSGIGLSASSPELSEHLRVPRVSLERDDVWKKGGSMQRTFLCIQELIANFASKNIFGVQLTASGEESKSEEPAGKRDRDGTQSLAANDSSRKNSWEPKPITVPQFKQMLSDLFTARGSPFKTKSSESPSSSPSSPARKNGGEWDVEKVVIDLGGSREERREAFAAACHLLLDCATFPVYLSEEETEQLCATLFQLPGAGDSSFPSWLKSLMTICCCVTDCYLQNVAISTLLEVINHSQSLALVIEDKMKRYKSSGHNPFFGKLQMVTVPPIAPGILKVIAEKTDFYQRVARVLWNQLNKETREHHVTCVELFYRLHCLAPTANICEDIICHALLDPDKGTRLEALFRFSVIWHLTREIQGSRVTSHNRSFDRSLFVVLDSLACTDGAIGAAAQGWLVRALSLGDVARILEPVLLLLLQPKTQRTSIHCLKQENSADDLHRWFNRKKTSFREACAVPEPQESGSEEHLPLSQFTTVDREAIWAEVEKEPEKYPLRGELSEEELPYYVELPDRTAHGAPDSSEHTESADTSSCHTDSENTSSFSSPSHDLQELSNEENCCAPIPMGGRAYPKRSALLAAFQSESFKAGAKLSLVRVDSDKTQASESFSSDEEADLELQALTTSRLLKQQRERQEAVEALFKHILLYLQPYDSRRVLYAFSVLEAVLKTNPKEFIEAVSRTSMDTSSTAHLNLISNLLARHQEALIGQSFYGKLQTQVPNVCPHSLLLELLTYLCLSFLRSYYPCYLKVSHRDILGNRDVQVKSVEVLIRIMMQLVSVAKSSEGKNVEFIHSLLQRCKVQEFVLLSLSASMYTSQKRYGLATAHHGRALPEDSLFEESLINLGQDQIWSEHPLQIELLKLLQVLIVLEHHLGRAHEEAENQPDLSREWQRALNFQQAISALQYVQPHPLTSQGLLVSAVVRGLQPAYGYGMHPAWVSLVTHSLPYFGKSLGWTVTPFVVQICKNLDDLVKQYESESVKLSVSTTSKRENISPDYPLTLLEGLTTISHFCLLEQANQNKKTMAAGDPANLRNARNAILEELPRTVNTMALLWNVLRKEETQKRPVDLLGATKGSSSVYFKTTKTIRQKILDFLNPLTAHLGVQLTAAVAAVWSRKKAQRHSKMKIIPTASASQLTLVDLVCALSTLQTDTLLHLVKEVVKRPPQVKGGDEKSPLVDIPVLQFCYAFLQRLPVPALQENFSSLLGVLKESVQLNLAPPGYFLLLSMLNDFVTRTPNLENKKDQKDLQEITQKILEAVGNIAGSSLEQTSWLSRNLEVKAQPQASLEESDAEEDLYDAAAASAMVSSSAPSVYSVQALSLLAEVLASLLDMVYRSDEKEKAVPLISRLLYYVFPYLRNHSAYNAPSFRAGAQLLSSLSGYAYTKRAWRKEVLELFLDPAFFQMDTSCVHWKSIIDHLLTHEKTMFKDLMNMQSSSLKLFSSFEQKAMLLKRQAFAVFSGELDQYHLYLPLIQERLTDNLRVGQTSIVAAQMFLFFRVLLLRISPQHLTSLWPIMVSELIQTFTQLEEDLKDEDESLRSTNKVNRTKVSVPDANGPSVGEIPQSELILYLSACKFLDTALSFPPDKMPLFQIYRWAFIPEVDTEGPAFLSDVEENHQECKPHTVRILELLKLKFGEISSSDEITMKSEFPLLRQHSVSSIRQLMPFFMTLNGAFKTQRQLPADSPGTPFLDFPVTDSPRILKQLEECIEYDFLEHPEC

SEQ ID NO: 295799 - DNA, 438 bp, Artificial Sequence
  derived and/or modified sequence
atggatccggaggagcaggaactgctcaatgattaccggtatcggtcttacagctcagtgattgagaaggcactgagaaatttcgaatcatccagcgaatgggccgacctgatctccagcctgggcaaacttaacaaagcgctacaaagcaatttaagatacagcctgttgccgcggcggttgctcatctctaagcgcttggcacagtgcctgcaccccgctctgccctccggagtccatttgaaagctcttgagacctatgagattatcttcaagatcgttgggacaaaatggctcgccaaggacctgttcctttactcttgcggactgtttcctctgctggcccatgctgctgtctccgtaagacctgtcttactcactctctacgagaaatacttcctgccgctgcagaaactgctgctgccctcgttgcagtag

SEQ ID NO: 295800 - DNA, 6897 bp, Artificial Sequence
  derived and/or modified sequence
atggaccctgaagaacaggagctgttgaatgactatcgttaccgaagctacagcagcgtaatcgaaaaagcactgcgcaatttcgaatccagtagtgagtgggctgatctcatctcatctcttggaaaattgaataaagctcttcagtcaaacctgagatactcactccttcctaggcgcctgctgatttcgaagagattggcacagtgcctgcacccggccttaccatccggggttcatctgaaggccttggagacttatgagatcatcttcaaaatcgtgggaaccaaatggctggccaaggatctatttttgtactcgtgcggcctgttccccttactggcacatgcggctgtgtccgttaggcctgtgctgttaacattatacgaaaaatactttttaccactccagaagttgctcctgccgtctctccaggccttcatcgttgggctgctccccggcctcgaagaaggcagcgaaataagcgataggaccgacgctctacttttgagactctccctggtggtgggaaaagaagtcttttataccgccctctggggcagcgtgctggcctctccttctatccggcttccggccagcgtctttgtcgttggacacattaaccgcgacgccccaggtcgcgagcagaagtatatgctggggaccaatcatcagctgacagttaagtcactgagagcgtccctccttgactctaatgtccttgttcagcggaacaacctagaaattgtactgtttttttttccattctatacctgtctcgattccaacgagagagcaattccattgctgcgaagtgacattgtgaggattctgtcagccgcaactcagactctgctgcgacgcgatatgagcttgaaccgcaggctttatgcgtggttactgggctccgatatcaaaggcaatacagtggtgcctgaatccgaaataagcaactcttatgaagatcagtcctcctactttttcgagaaatacagcaaagatttattagttgaaggccttgccgagattctacatcagaaatttattgatgcggatgttgaggaacgccatcatgcgtatctgaagccatttagagtccttatttcccttctggataagcccgagattggaccacaagtggttggaaacctgtttctggaggtgatccgggctttttattcttactgcagagacgccttagggtctgatttgaagcttagctacactcaaagcggaaattcactgattagcgctattaaggagaataggaacgcttccgagatcgtaaagacagttaatttactgatcacatccctgagcacagacttcctgtgggactacatgactcggtgtttcgaggaatgctttcggcctgtgaaacagcgttattcggtgcggaattctgtgtcaccaccacctaccgtgtccgagctgtgcgcgctgttagtttttctcctggatgtgatacctctggagctctactcagaggtccaaacacagtacttaccacaggtcttgggatgtttggtgcagcctctggccgaggacatggaggctctgagcctcccagaactgacccacgcccttaagacttgctttaaggtcctcagtaaggtgcagatgcctccctcttaccttgacactgagtctaccagcgggactagctctcccgtgaagggtgagaacggcaagataatccttgaaaccaaggcagtgatcccaggggacgaagatgccagtttcccgcccctgaagtccgaggatagtggaattggcctgagcgcttcttccccagagttaagcgaacacctgcgtgtcccccgggtttcactggaacgcgacgatgtctggaaaaaaggcggttctatgcagcggacctttctatgcatccaggagttaattgccaacttcgcctccaaaaatattttcggcgtgcagctgactgcctctggtgaagaatcaaaatccgaggaacctgccggaaaacgagatcgcgatggaacccagtcactggctgctaatgactcatccaggaaaaacagctgggaaccaaagcctataaccgtaccacagtttaaacagatgctctcagacctgttcacggcccgaggatcacctttcaagaccaagtcaagcgaatccccaagctcaagtccctcttccccagcccggaagaacggcggcgagtgggatgtagagaaggtggtgatcgacctaggtggctctagggaggagaggcgagaggccttcgcagctgcatgtcacttgctgcttgattgtgcaactttccctgtttacctttcagaagaggagaccgagcagctttgtgcgaccttgttccaactaccaggcgcgggggactccagcttcccttcgtggcttaaatccctcatgaccatttgctgctgcgtaactgactgctatctgcagaacgtagctatctctaccttactcgaagtcatcaatcactcgcagtcactcgctctcgtgatcgaagataaaatgaaaaggtacaagtctagcggccacaatcccttcttcgggaaactccagatggtgacagtgccaccaattgcacctggcatattaaaagtgatcgctgaaaaaaccgatttttaccagagggtggcccgcgttctgtggaatcaactcaataaggagacgcgtgaacaccacgtcacctgtgtggagctgttttacaggctgcattgcctggccccgactgcaaacatctgcgaagacatcatctgccatgccctgctcgaccccgacaaaggcaccagacttgaagcgctattccgctttagtgttatatggcatctgaccagagagatacagggctcacgcgtgaccagccacaatcggtcattcgacaggtcactgttcgtggtgcttgactccttggcttgcaccgacggggctattggggctgccgcgcagggatggttagttagggccctgagcctcggggatgtggcccggattctggagcctgtccttttactgctgctgcagcccaagacccagcgtacaagcattcactgtctgaagcaggagaactctgcggatgatcttcataggtggttcaacaggaagaaaacatcattccgggaagcgtgcgcagtcccagaaccccaggaatcaggaagtgaggaacatctgcctctctcacagtttaccaccgttgacagggaagcaatttgggcagaagtcgagaaggagccagagaagtatcctctgcggggcgaattgtcagaggaggagctgccctattacgtagagctgcccgaccgcacggcccacggagcccccgactcttctgaacacactgagtcagccgatacaagcagctgccacactgactccgaaaacacctcatctttttcctccccgagccacgatttacaggaactcagcaatgaggaaaattgttgcgcacctattcctatgggcgggcgcgcttatccaaaacgatccgccttacttgccgcctttcagtcagagagctttaaggccggggccaagctctcactcgtcagggtcgactctgataagacacaggccagcgagtctttttctagtgacgaggaagccgatctggaactgcaggctctcacaacaagtagactgttaaagcaacagagggagcggcaggaggcggttgaggcactattcaagcatattctcctgtacctccaaccatacgattccaggcgcgtactatatgcctttagcgtactcgaagcggtgttaaaaaccaatcccaaggaattcatagaagccgtgagcaggaccagcatggacaccagcagtacagctcacctgaacttaattagcaacctccttgccagacatcaagaggctttaataggacagtctttttacggaaagctgcaaacacaagtgcctaacgtttgcccccactcactattactggaattgcttacgtatttgtgcttaagttttctgagaagttactacccctgttatctcaaggtaagccacagagatattctcgggaaccgcgatgttcaggtcaaatcagtcgaggttctgatcaggattatgatgcagctggtttctgtcgccaagagctcggagggcaaaaacgtggaatttattcactcgcttcttcagcgctgcaaagttcaggagtttgtcctgttgtcactgagcgcaagcatgtacacttcacaaaagcgctacggcctggcaacagcccatcatgggcgcgcccttccagaggatagcttgtttgaggagagcctgattaatttggggcaggaccaaatatggtctgaacatcccctccagattgaacttttaaagctcctgcaagtcctgatcgtcctcgagcatcatcttggccgggcacacgaggaggccgagaaccagccagacctcagtagggagtggcagagagctctcaacttccaacaggccatcagcgccctgcagtatgtgcaacctcacccactcacctcccagggcctgcttgtgagtgcagtcgttcggggtctgcagcccgcatacggttatggcatgcatccagcgtgggtatcactggttacacattctctgccctattttgggaaaagtctgggatggaccgtaactccttttgtggtgcaaatctgtaagaacctcgacgacttagttaaacagtacgaaagcgaaagcgtgaaactgagtgtttccaccacgagtaagcgggaaaacattagcccagattacccactgactctgctcgaagggcttactaccatcagtcatttctgcctcctggaacaggcaaaccagaacaagaagacaatggccgcaggcgatcctgccaacctgcgaaacgcacgcaatgccatacttgaagagcttccacgcacagtgaatacaatggcactcctatggaatgtgttgcggaaggaagagacccagaagaggccagtggacctgttgggtgcaacaaagggatccagcagcgtgtattttaaaaccactaaaacaatacgacaaaagatcctcgacttcttgaacccactgaccgcccatctgggcgtccaactcactgccgccgtggccgcagtgtggtctcgtaagaaagcccagcgacactccaagatgaaaatcatccccacggcaagtgccagccagctgacgctggtcgatctggtttgtgctctgtccactctccaaacggacactctcttgcatcttgttaaagaggtcgtcaaaaggccacctcaggtcaaggggggggatgaaaaatccccattagtcgacatcccagtgctgcaattctgctatgcctttcttcagcgactgccagtcccagcgctgcaggaaaactttagttcacttctgggtgtgttaaaggagagtgtgcagctcaacctggcccctccgggttactttctgctcctctcaatgttaaatgatttcgtaacccgcactccaaatctggaaaacaaaaaagaccagaaagatctccaggagattacccaaaaaatactggaggccgtgggaaatatcgccggatcatcactagaacagacaagctggcttagtcgtaacctcgaagtgaaggcccagccgcaggcaagtctcgaagaaagcgacgccgaggaggatctttatgatgcagcagccgcgtccgctatggttagttctagtgctccttccgtgtatagtgttcaagctctgtccctgctggcggaggtcctcgcctcacttcttgatatggtatatcgaagtgacgaaaaagaaaaagccgttcctctgatcagcaggctgctgtattacgttttcccgtacctgcgcaatcattccgcctataatgccccaagtttccgcgcaggggcacagctgcttagctcactgtccggctacgcctataccaagcgggcctggaggaaggaggtcttggagttgtttcttgatcccgctttctttcagatggatacatcctgcgtgcattggaaatctattatagaccacctgctcacgcacgaaaagaccatgttcaaggacctgatgaacatgcagagctcgtccctgaaattgtttagtagcttcgagcaaaaagcaatgctgcttaaacggcaagcctttgcagtcttttcaggggaactcgaccagtatcatctgtatctcccccttatacaggagcgtctgacggataatctgcgcgtgggccagaccagtatcgtggctgctcaaatgttcctattttttcgagtcctcctgcttagaatctccccccagcatcttacaagtctgtggcctatcatggtttcagagctaatccagacatttacccagttggaagaggatctgaaggacgaagatgagagtttgagatctaccaataaagtcaaccgaacaaaagtatctgtgcctgacgctaatgggccttcagtaggcgagattccccagagcgagctaattctgtacttaagcgcttgcaagttcctggatacagctctgagcttccctcctgacaagatgccacttttccagatttaccgatgggctttcatcccggaggtagatacggagggtccggcatttctctctgatgtagaggagaaccaccaggaatgtaaacctcacactgttaggatcctggaacttctaaagctgaaattcggtgagatcagcagtagtgacgaaatcacgatgaagtccgaattcccccttttacggcagcacagtgtgtcttctatccgccagctgatgcctttctttatgactcttaatggagcttttaaaactcagcgccaattgccggctgactccccgggcaccccatttctggacttccctgtcactgactcccccagaatcctcaagcaactggaagagtgcatcgagtacgactttttagagcaccctgagtgttag

SEQ ID NO: 295801 - DNA, 438 bp, Artificial Sequence
  derived and/or modified sequence
atggaccctgaggagcaggagctgctgaatgactaccgctaccgcagctacagctctgtgattgagaaggccctgaggaactttgagagcagcagcgagtgggccgacctgatcagcagcctgggcaagctgaacaaggccctgcagagcaacctgcgctacagcctgctgccccggcggctgctgatcagcaagaggctggcccagtgcctgcacccagccctgcccagcggcgtgcacctgaaggccctggagacctatgagatcatcttcaagatcgtgggcaccaagtggctggccaaggacctcttcctgtacagctgtggcctcttccccctgctggcccatgctgctgtgtctgtgcggcctgtgctgctgaccctgtatgagaagtacttcctgcccctgcagaagctgctgctgcccagcctgcagtag

SEQ ID NO: 295802 - DNA, 6897 bp, Artificial Sequence
  derived and/or modified sequence
atggaccctgaggagcaggagctgctgaatgactaccgctaccgcagctacagctctgtgattgagaaggccctgaggaactttgagagcagcagcgagtgggccgacctgatcagcagcctgggcaagctgaacaaggccctgcagagcaacctgcgctacagcctgctgccccggcggctgctgatcagcaagaggctggcccagtgcctgcacccagccctgcccagcggcgtgcacctgaaggccctggagacctatgagatcatcttcaagatcgtgggcaccaagtggctggccaaggacctcttcctgtacagctgtggcctcttccccctgctggcccatgctgctgtgtctgtgcggcctgtgctgctgaccctgtatgagaagtacttcctgcccctgcagaagctgctgctgcccagcctgcaggccttcatcgtgggcctgctgcccggcctggaggagggcagcgagatcagtgacagaacagatgccctgctgctgcggctgagcctggtggtgggcaaggaggtgttctacacagccctgtggggctctgtgctggccagccccagcatccggctgcctgcctctgtgtttgtggtgggccacatcaacagagatgcccctggccgggagcagaagtacatgctgggcaccaaccaccagctgactgtgaagagcctgcgggccagcctgctggacagcaatgtgctggtgcagaggaacaacctggagatcgtgctcttcttcttccccttctacacctgcctggacagcaatgaaagagccatccccctgctgcggagtgacatcgtgcgcatcctgtctgctgccacccagaccctgctgcggcgggacatgagcctgaacagaaggctgtatgcctggctgctgggcagtgacatcaagggcaacacagtggtgcctgagagcgagatcagcaacagctatgaggaccagagcagctacttctttgagaagtacagcaaggacctgctggtggagggcctggccgagatcctgcaccagaagttcattgatgctgatgtggaggagcggcaccacgcctacctgaagcccttccgggtgctgatcagcctgctggacaagccagagatcggcccccaggtggtgggcaacctcttcctggaggtgatccgggccttctacagctactgcagagatgccctgggcagtgacctgaagctgagctacacccagagcggcaacagcctcatcagcgccatcaaggaaaatagaaatgccagcgagatcgtgaagacagtgaacctgctgatcaccagcctgagcacagacttcctgtgggactacatgacccgctgctttgaggagtgcttccggcctgtgaagcagcgctacagcgtgaggaacagcgtgtccccaccacccaccgtgtctgagctgtgtgccctgctggtgttcctgctggatgtgatccccctggagctgtacagcgaggtgcagacccagtacctgccccaggtgctgggctgcctggtgcagcccctggccgaggacatggaggccctgagcctgcctgagctgacccacgccctgaagacctgcttcaaggtgctgagcaaggtgcagatgccacccagctacctggacacagagagcaccagcggcaccagcagccctgtgaagggagaaaatggcaagatcatcctggagaccaaggctgtgattcctggagatgaagatgccagcttcccccccctgaagtcagaagattctggaattggcctgagcgccagcagccctgagctgtctgagcacctgcgggtgccccgggtgtccctggagagagatgatgtgtggaagaagggcggctccatgcagaggaccttcctgtgcatccaggagctgattgccaactttgccagcaagaacatctttggagtgcagctgacagccagcggggaggagagcaagtctgaggagcctgctgggaagagggacagagatggcacccagagcctggccgccaatgacagcagcaggaagaacagctgggagcccaagcccatcaccgtgccccagttcaagcagatgctgagtgacctcttcaccgcccggggcagccccttcaagaccaagagcagcgagagccccagcagcagccccagcagccctgccaggaagaatggaggagagtgggatgtggagaaggtggtgattgacctgggcggcagccgggaggagcggcgggaggcctttgctgctgcctgccacctgctgctggactgtgccaccttccctgtgtacctgtctgaggaggagacagagcagctgtgtgccaccctcttccagctgcctggagctggggacagcagcttccccagctggctgaagagcctgatgaccatctgctgctgcgtgacagactgctacctgcagaatgtggccatcagcaccctgctggaggtgatcaaccacagccagagcctggccctggtgattgaggacaagatgaagcgctacaagagcagcggccacaaccccttcttcggcaagctgcagatggtgacagtgccccccatcgcccctggcatcctgaaggtgattgctgagaagacagacttctaccagagggtggcccgggtgctgtggaaccagctgaacaaggagacccgggagcaccacgtgacctgtgtggagctgttctaccgcctgcactgcctggcccccacagccaacatctgtgaggacatcatctgccacgccctgctggaccctgacaagggcacccggctggaggccctcttccgcttcagcgtcatctggcacctgacccgggagatccagggcagccgggtgaccagccacaacagaagctttgacaggagcctgtttgtggtgctggacagcctggcctgcacagatggagccatcggggccgccgcccagggctggctggtgcgggccctgagcctgggagatgtggcccgcatcctggagcctgtgctgctgctgctgctgcagcccaagacccagaggaccagcatccactgcctgaagcaggagaacagcgcagatgacctgcaccgctggttcaacaggaagaagaccagcttccgggaggcctgtgctgtgcctgagccccaggagagcggcagcgaggagcacctgcccctgagccagttcaccaccgtggaccgggaggccatctgggccgaggtggagaaggagcctgagaagtaccccctgcggggggagctgtctgaggaggagctgccctactacgtggagctgcctgacagaacagcccatggagccccagacagcagcgagcacacagagagcgctgacaccagcagctgccacacagacagcgagaacaccagcagcttcagcagccccagccatgacctgcaggagctgagcaatgaggagaactgctgtgcccccatccccatgggcggccgggcctaccccaagaggtctgccctgctggccgccttccagagcgagagcttcaaggccggggccaagctgagcctggtgcgggtggacagcgacaagacccaggccagcgagagcttcagcagtgatgaggaggccgacctggagctgcaggccctgaccaccagccggctgctgaagcagcagcgggagcggcaggaggccgtggaggccctcttcaagcacatcctgctgtacctgcagccctatgacagccggcgggtgctgtatgccttctctgtgctggaggccgtgctgaagaccaaccccaaggagttcattgaagctgtgtccaggacctccatggacaccagcagcacagcccacctgaacctgatcagcaacctgctggcccggcaccaggaggccctgattggccagagcttctacggcaagctgcagacccaggtgcccaacgtgtgcccccacagcctgctgctggagctgctgacctacctgtgcctgtccttcctgcggagctactacccctgctacctgaaggtgagccaccgggacatcctgggcaacagagatgtgcaggtgaagtctgtggaggtgctgatccgcatcatgatgcagctggtgtctgtggccaagagcagcgagggcaagaatgtggagttcatccacagcctgctgcagcgctgcaaggtgcaggagtttgtgctgctgagcctgagcgcctccatgtacaccagccagaagagatatggcctggccacagcccaccacggccgggccctgcctgaggacagcctgtttgaggagagcctcatcaacctgggccaggaccagatctggagcgagcaccccctgcagatcgagctgctgaagctgctgcaggtgctgattgtgctggagcaccacctgggccgggcccacgaggaggccgagaaccagcctgacctgagccgggagtggcagagggccctgaacttccagcaggccatcagcgccctgcagtatgtgcagccccaccccctgaccagccagggcctgctggtgtctgctgtggtgcggggcctgcagcctgcctacggctacggcatgcacccagcctgggtgtccctggtgacccacagcctgccctactttgggaagagcctgggctggacagtgaccccatttgtggtgcagatctgcaagaacctggatgacctggtgaagcagtatgagagcgagagcgtgaagctgtctgtgtccaccaccagcaagcgggagaacatcagcccagactaccccctgaccctgctggagggcctgaccaccatcagccacttctgcctgctggagcaggccaaccagaacaagaagaccatggctgctggggaccctgccaacctgagaaatgccagaaatgccatcctggaggagctgcccaggacagtgaacaccatggccctgctgtggaatgtgctgaggaaggaggagacccagaagaggcctgtggacctgctgggcgccaccaagggcagcagctctgtgtacttcaagaccaccaagaccatccggcagaagatcctggacttcctgaaccccctgacagcccacctgggcgtgcagctgacagctgctgtggccgctgtgtggagcaggaagaaggcccagaggcacagcaagatgaagatcatccccacagccagcgccagccagctgaccctggtggacctggtgtgtgccctgagcaccctgcagacagacaccctgctgcacctggtgaaggaggtggtgaagaggcctccccaggtgaagggaggagatgagaagagccccctggtggacatccctgtgctgcagttctgctacgccttcctgcagaggctgcctgtgcctgccctgcaggagaacttcagcagcctgctgggcgtgctgaaggagagcgtgcagctgaacctggcccctcctggctacttcctgctgctgtccatgctgaatgactttgtgaccaggacccccaacctggagaacaagaaggaccagaaggacctgcaggagatcacccagaagatcctggaggccgtgggcaacattgctggcagcagcctggagcagacctcctggctgagcaggaacctggaggtgaaggcccagccccaggccagcctggaggagagtgatgctgaggaggacctgtatgatgctgctgctgccagcgccatggtgagcagcagcgcccccagcgtgtacagcgtgcaggccctgagcctgctggccgaggtgctggccagcctgctggacatggtgtacagaagtgatgagaaggagaaggctgtgcccctcatcagccggctgctgtactacgtgttcccctacctgaggaaccacagcgcctacaatgcccccagcttccgggccggggcccagctgctgagcagcctgagcggctacgcctacaccaagagggcctggaggaaggaggtgctggagctgttcctggaccctgccttcttccagatggacaccagctgtgtgcactggaagagcatcatcgaccacctgctgacccatgagaagaccatgttcaaggacctgatgaacatgcagagcagcagcctgaagctgttcagcagctttgagcagaaggccatgctgctgaagaggcaggcctttgctgtgttttctggagagctggaccagtaccacctgtacctgcccctcatccaggagcggctgacagacaacctgcgggtgggccagaccagcatcgtggccgcccagatgttcctgttcttccgggtgctgctgctgcgcatcagcccccagcacctgaccagcctgtggcccatcatggtgtctgagctgatccagaccttcacccagctggaggaggacctgaaggatgaagatgagagcctgcggagcaccaacaaggtgaacagaaccaaggtgtctgtgcctgatgccaacggccccagcgtgggggagatcccccagagcgagctgatcctgtacctgagcgcctgcaagttcctggacacagccctgtccttccccccagacaagatgcccctcttccagatctaccgctgggccttcatccctgaggtggacacagagggccctgccttcctgagtgatgtggaggagaaccaccaggagtgcaagccccacacagtgcgcatcctggagctgctgaagctgaagtttggagagatcagcagcagtgatgagatcaccatgaagtctgagttccccctgctgcggcagcacagcgtgagcagcatccggcagctgatgcccttcttcatgaccctgaatggagccttcaagacccagaggcagctgcctgctgacagccctggcacccccttcctggacttccctgtgacagacagcccccgcatcctgaagcagctggaggagtgcatcgagtatgacttcctggagcacccagaatgttag

SEQ ID NO: 295803 - DNA, 438 bp, Artificial Sequence
  derived and/or modified sequence
atggaccccgaggagcaggagctgctgaacgactaccggtaccggagctactcttcagttatcgagaaggccctgcgtaatttcgagtccagcagcgagtgggctgacctaatctcgtccctgggaaagctcaataaggcgctccagtccaacctgcgctactcacttctgcctaggagactgctgatcagcaagagactcgcccagtgtctgcatccagctctgccgtcgggcgtacacctgaaggcgctggagacgtatgagataatctttaagatcgttggaaccaagtggctcgccaaggaccttttcttgtacagttgtggactgttccctctgctagcccacgccgctgtatccgtgagacccgtattactcacgctgtacgagaaatattttctaccacttcagaagcttctcctgccctctctgcaatag

SEQ ID NO: 295804 - DNA, 6897 bp, Artificial Sequence
  derived and/or modified sequence
atggaccccgaggagcaggagctgctgaacgactaccggtaccggtcatacagctctgttatcgaaaaagccctacggaattttgaaagctcctctgaatgggcagacctgatcagtagtcttggcaagctgaacaaggcgctccagtcgaatctgcgctactctcttcttcctcgcaggcttctgattagcaagcgattagcccaatgccttcatccagccctaccatcgggcgttcacctgaaagcccttgagacctacgagatcattttcaaaattgtgggaacaaagtggcttgccaaagacttgtttttgtactcttgtggcttgtttccactgctggcgcacgccgcagtgtctgtcagaccggttctgctgaccctgtacgaaaagtactttctgccccttcagaaactcttactgccaagcctgcaggcctttattgttggtctcctgccagggttagaagagggctcggaaatctcggatcggacagacgcactcctgctacggctaagtttggtagtagggaaggaggtattctacaccgcgctgtgggggtctgtactcgcatcgccgtccatcaggttgccggcatcagtctttgtggtaggacatattaacagagatgctcctgggagggaacagaagtatatgctaggtaccaaccatcagctgacagtgaagagtctccgggcaagtctgctggactccaacgtgctagtgcagcgcaataacctggaaatcgtcctgttcttctttcccttttatacatgtcttgattcaaatgagagggcaatccctttgctgagatcagacatcgtccgaatcctgagtgctgctacccaaactttgctgcggcgggacatgtccctgaatcgaagactgtatgcctggctgctcggctcagacattaagggcaacaccgtcgtgccggagtccgaaatcagcaatagctacgaggaccaaagctcttactttttcgagaagtattcgaaagatctccttgtcgagggactcgcggagattttgcatcagaagttcatcgacgctgacgtggaggagcgtcaccacgcatacttgaagcccttccgcgtgttgataagtcttctggataaacccgaaatcggacctcaggtcgtaggcaatttgtttcttgaagtgattagggcattttactcttattgccgggatgctttaggctcggacctcaaactgtcctatacacagtctggcaacagtcttatatcggcaatcaaggagaatcggaatgcatccgaaatcgtaaaaacagtgaatcttctcatcacaagcctgtcaactgattttctgtgggactatatgactcggtgcttcgaggagtgctttcgccccgtgaaacagcgatacagcgtcaggaactccgtgagcccacctcccacagtatccgagttatgtgcgttgctggtatttctcttagacgtcatacccctcgagctttacagtgaggttcagacacaatatctgccccaagttttgggctgcctcgtccagccgttggctgaagacatggaagctctgtctctgcctgagttgacccacgccctcaaaacttgctttaaagtgctctctaaggtccagatgccaccatcttatctggataccgaatccaccagtggcacctcaagtcccgtaaagggtgagaacggtaaaattatactggagacaaaggctgtgatacccggagacgaggacgctagtttcccgccactcaagtcagaggactcaggaatcgggctttcagcctctagccccgagttatctgagcatcttagagtacctcgtgtgtctttggagagggatgacgtgtggaagaagggagggagcatgcaacggactttcttgtgcattcaggagttaattgcaaatttcgccagcaaaaacatttttggagtccagttgacagccagcggtgaggagtccaaatcagaggagcccgcagggaaacgagacagggatggcactcagtccctggctgccaatgattccagtcgtaagaacagttgggaacctaaaccaatcaccgtgccccagtttaagcaaatgctctcagacctgtttacagcccgaggcagtccttttaagacaaaatcttcagaaagcccctcttcttctcctagttccccagcaaggaagaacggaggcgaatgggacgtggagaaggttgttatcgacctgggggggtcccgtgaggagaggcgggaagcatttgcggccgcttgtcacctgttgcttgattgtgccacattccccgtgtatctaagcgaggaagaaaccgagcagctttgcgcaaccctgttccagctgcccggggctggggacagctcgttcccctcctggctgaagtcattgatgaccatctgttgttgtgtaactgattgttaccttcagaatgttgctatctccactctcctggaagtaatcaaccactctcagagcctggccctagtcattgaggataaaatgaagaggtataagtcaagtggccataatccattctttggaaagctgcagatggtcactgtgccccccattgcacctggtatactcaaagtgattgctgaaaagaccgacttttaccagagagtcgctagagtgctgtggaaccaactgaacaaggaaactcgagaacaccatgtgacatgcgtcgagttattctatcggcttcattgcttagcacctactgctaatatttgcgaagacatcatttgccacgctctactggaccccgacaagggaacccgcctggaggcgctgttccgcttcagtgtaatttggcacctcactcgagaaatacagggcagtagggtcacatcccacaaccgttcctttgaccggagcctgtttgttgtgctggattccttagcgtgcaccgacggtgcaatcggggcggccgcccagggctggctagtgagagcgctttctcttggtgacgtggcccgcatcctggaacccgtgttgctgttgctgctgcagcccaaaacccagagaacctcaattcattgtctgaaacaggagaactccgccgatgacctgcaccgttggttcaacagaaagaaaacatctttccgcgaggcctgtgccgtgcccgagccgcaggagagcggcagcgaggagcatctgccattgagccaattcactacagtggatagggaagcaatttgggcagaagttgagaaagagcccgagaagtaccctctaagaggggagctttctgaggaagaacttccatactacgtggaacttccggatcgcacagcgcatggagccccggacagctccgagcatactgaatccgctgatacttcgagttgtcacaccgactcagagaacacatccagttttagcagcccctcacatgacctccaggagctgagcaatgaagagaactgttgcgcgcccattcctatgggaggccgagcatacccaaaaagatcggccctcctggccgcattccagagcgaaagctttaaggcaggcgccaagctgtcgctggtgcgggtcgacagcgacaaaactcaggcatctgaaagctttagcagtgacgaggaggccgacctggaactgcaggcacttacaacctctaggctcctgaagcaacaaagagagcgccaggaagctgtcgaggcacttttcaaacatattctattatatctgcagccttacgacagtcgaagagtgttgtatgcattttccgttctggaggcagtgcttaagaccaaccccaaagagtttatagaggccgtgagtagaacctccatggatacctccagtaccgctcacctcaacttaatatctaatcttctggccagacaccaggaagcattaattggtcagagtttttacgggaaactacagacccaagtgcctaacgtgtgcccccactccttgctacttgagttgttaacctatctgtgtctcagttttctgagatcctactacccttgttatcttaaagtatcccaccgcgacatcctgggcaatcgcgatgtgcaagtgaagagcgttgaggtactgatcagaattatgatgcaacttgtgagcgtagcaaagtcttccgagggcaagaacgtcgagttcatccatagtcttctacagcggtgtaaagtccaggaattcgtcctgctaagcctgagtgcatccatgtatacgtcccagaaacggtatggactggcgaccgctcaccacggtagggctctgcccgaggattccctgttcgaagagtccctgatcaatctgggccaggaccagatttggtctgaacatcctttgcagatcgaactgctcaagttactccaggtacttatcgtcttagagcatcatctgggaagagctcatgaggaggccgagaatcagcccgatctgtcacgggagtggcagcgagctctgaatttccagcaggccatctctgcacttcagtacgtccagccacaccctcttacctctcaaggactgctggtgtccgccgtggttaggggcttgcaacctgcttacgggtatggaatgcatcccgcctgggtttcattggtgacccactccctgccttacttcggtaaatccctgggttggaccgtcaccccttttgtggtgcagatctgcaagaatctagatgatctcgtaaaacagtatgaaagcgaatctgtcaaactgagtgtctccaccacgtccaaacgtgaaaatatcagtccagactatcctctgacgctcttagaggggctgacaaccattagccatttttgcctgctcgagcaggccaatcagaacaagaaaaccatggccgccggggacccagccaaccttcgaaacgccagaaacgccatccttgaagaattgccccggaccgtgaataccatggctctgctgtggaatgtacttaggaaagaagagacacagaagcggccggtggacctactgggcgcaacgaagggcagctcttcagtatatttcaagactaccaagaccattcggcagaagattttggatttcttgaacccacttactgctcatctcggggtgcagttaacggcggccgtggcagccgtgtggtctagaaaaaaagcccagagacactccaaaatgaagattatccccacggcatccgcaagtcagttgacattggtcgacctagtatgcgctctgtctacgctgcagacggacactctgctgcacctggtgaaagaagtggtgaagaggcctcctcaggtcaagggcggggacgagaagagtccactcgtggatatccccgtgctgcagttctgctatgcctttctccaacgcctccccgttcccgcattacaggagaacttttcttccctgctgggagttctgaaggagagcgtgcagctgaatcttgctccaccaggatactttttactcttgagcatgcttaatgattttgttaccagaacacctaatcttgaaaataagaaggatcagaaggacctccaggagattacgcagaaaatcttagaggccgtgggcaacatcgcagggagcagcttggagcagacatcctggttatctagaaaccttgaagttaaggcacagccgcaagcatccctggaggaatccgatgctgaagaggacctgtacgacgctgcagctgcaagtgccatggtctcaagtagtgctccgagcgtgtattcagtccaggctctcagcttattggccgaagtgctcgcctccttgctagacatggtttataggtcagatgaaaaggagaaagccgtacccctcatctcaaggctgctgtattacgttttcccttatctgcgtaatcactctgcctataacgccccgtcctttagggccggcgcacagttactgagtagcctgtcaggatacgcctacaccaagagggcttggcggaaggaagttctagagctctttctcgacccggccttctttcagatggacacaagctgtgttcactggaagtctatcattgaccaccttctcacccatgaaaagaccatgttcaaggatttaatgaacatgcaatcttcttcgcttaagctgttctcatctttcgagcagaaggctatgctgctgaaacggcaggcatttgcagtcttttcgggtgaactcgatcagtatcacctctacctgccacttatacaagaacgtctaaccgacaacctccgtgtcggccagacttcaatcgtcgcggctcaaatgtttctcttttttagagtgctgctattgaggatctccccgcaacacctgactagtctctggcccattatggtgtccgagctcatacagaccttcacccagttggaggaggatctaaaggacgaagatgaatcattgcgtagcactaataaagtgaaccggacgaaagtgagtgtgccagatgctaacggcccgtctgtgggagagatacctcagtccgaattgatactttacctgtctgcatgcaaatttcttgacaccgcactgtcctttcccccagataaaatgccgctatttcagatctacagatgggcattcattcccgaagtcgataccgagggaccagctttcctctctgatgtggaggagaaccatcaagaatgtaagcctcacaccgtgcggatcctcgagcttctgaagctcaaattcggcgagatcagtagcagtgatgaaatcaccatgaagagcgaatttcccctcctgaggcaacattccgtgagctccataagacaacttatgcccttctttatgaccttaaatggtgcctttaaaacccagcggcaactccctgctgatagccctggaactccattccttgatttccctgtgacagattctccgaggattctgaagcagttggaggagtgtatcgagtacgactttctagagcacccagagtgctag

SEQ ID NO: 295805 - DNA, 438 bp, Artificial Sequence
  derived and/or modified sequence
atggaccctgaagaacaggagctactcaacgattaccgctatagatcgtactcaagcgtcatcgagaaagcactcagaaattttgagtccagctctgagtgggcagatctcatcagtagcctgggaaagctcaacaaggccctccagtcaaacctgcgctattccttactgcccagacggttgttgatctccaagcgactcgctcagtgcctacatcccgctctcccaagtggggtccaccttaaagcactggaaacgtacgagatcattttcaagatagtggggacaaagtggctggcaaaggacctgtttttgtattcctgcgggctctttccgttattagcccacgctgccgtgtccgtgcgccctgtcttgcttactctgtatgagaagtactttctgccactgcaaaagttgttactgccctccctccagtag

SEQ ID NO: 295806 - DNA, 6896 bp, Artificial Sequence
  derived and/or modified sequence
atggacccagaagagcaggagctgctgaacgactacaggtataggagctactcctccgtaattgaaaaagctcttcgaaacttcgagtcctcttccgagtgggccgatctcatcagcagtttgggaaaactgaacaaggccctgcagtctaatttaagatactcgttattaccccgacgactgctcattagcaagcggctggctcagtgtctccacccagctctcccatccggcgttcacctcaaggcacttgagacatatgagatcatttttaagatcgtgggcacgaagtggctggcgaaagacttatttctctacagctgtgggctgtttcctctactggcacacgcggcagtaagcgtccgtcccgtgctgctgactctttacgagaagtattttctgccattgcagaaattgctgctaccatccctccaggcgtttatcgtggggcttctgcccggtctcgaagagggctctgaaataagcgatcgcacggacgccctcctccttaggctgagcctggtagtcggcaaggaagtcttctacacagctctgtggggtagtgttctggccagccctagtattaggctgcccgctagcgtgttcgtagttggtcacattaaccgcgatgcccctgggagagaacaaaagtacatgctgggaacaaaccaccagcttaccgttaaatctctccgggcttcgcttctggacagcaacgtcttagtccaaaggaataacctggaaatcgtgcttttcttttttccattctatacttgcctcgacagcaacgaacgcgcaattccactgctgcgttcagatatcgttcggatcttgagtgcagccacacagaccttgctccggagggacatgtcactgaataggaggctttacgcatggctgctgggcagtgatattaaaggcaacactgtggttccggagtccgagatttcgaatagctacgaggatcaaagctcctacttttttgaaaaatactcaaaggacctgctagtggaagggctcgcagagatcttgcatcaaaagttcattgacgcggacgtggaggagcggcaccacgcgtacctcaagccattccgggtcctaattagtctgctcgacaagccagagatcggtccccaggtggtaggcaatctgttccttgaagtgatcagggccttttacagctattgtagggatgcattaggctccgatctgaagctgagttatacacagtcgggtaatagcctcatctccgcaataaaagagaatcgtaatgcctcggagatcgtgaaaaccgtgaaccttctaatcacttcattgagtacagactttctgtgggactacatgacgcgctgcttcgaagaatgcttccgccctgtcaaacagcggtattccgttcgcaattccgtttccccaccgcctactgtcagtgagctctgcgctctgttggtgttcctgctcgatgtaatcccactggaactctacagtgaggtgcagactcagtatttgccccaggtgctaggctgcctggtgcagccactcgctgaagatatggaagcacttagcctgcctgagcttactcacgcactaaaaacctgctttaaggttctgtcaaaggtgcagatgccaccatcctacttagacaccgagtccacttcagggacgtcctcccccgtgaaaggggaaaacggtaaaatcattctggaaactaaagcagtcatcccaggtgacgaggacgccagtttccctcccctgaaaagtgaagacagtgggatcggactctctgcctcaagccctgagctttccgagcacctgcgggtacccagggtatccctggaaagggatgatgtttggaaaaaaggtgggtccatgcagcggacattcctctgcattcaggagttaatcgcaaacttcgcctccaagaatattttcggggtccagctgacggcttccggtgaagaatcaaagagtgaagagcccgctgggaagcgtgacagggatggcacccagagtctagccgcaaacgattcatcaaggaaaaactcctgggagcccaaaccaattaccgtccctcagttcaaacagatgctgtcagatctcttcaccgctcgaggctctcctttcaagactaagtcctcagagtctccctctagctccccatcgtcccccgctagaaaaaatggcggagaatgggacgtcgagaaagtggttatcgacctgggcggttcacgcgaggagcggagggaagctttcgctgccgcttgccacctcttactcgattgtgctaccttccctgtttatctttctgaagaggagacggaacagctgtgcgcgacactgttccagctcccaggcgctggagatagttcattcccaagctggctcaagtcactgatgactatttgctgttgcgtcactgactgttacctccaaaacgtcgccatcagtacacttttagaggtgatcaaccattcccagagtctcgcactggtaatagaggataagatgaagcggtataagtctagcggacacaaccccttctttgggaaattacaaatggtgacggtacccccaatcgccccaggtattctgaaagtgatcgctgaaaaaaccgacttctaccagcgggtggcaagggtgctctggaaccaattaaataaggaaacccgcgaacaccatgtgacctgtgtggagctgttttaccggctgcactgtttggcacctacggctaatatttgtgaggacatcatttgccacgcgctcttggatcctgacaaaggaacaaggctggaggccctctttcggttctccgttatttggcaccttactcgcgaaatacaaggttcaagggtaaccagccataatcgatccttcgatcgctccctgtttgtggtgctggattcgctggcgtgtaccgatggtgccataggcgctgccgctcagggctggctggttcgagccctgagtttgggggatgtggctcgcatcctggaaccagtgctcctgctccttctccagccgaagacccagcgcaccagcatccattgtttgaagcaagaaaacagtgcggacgatcttcatcgctggttcaatagaaaaaagaccagtttccgggaagcttgtgcagtgccagagcctcaggagtcgggcagcgaggaacatctacctttgtcacagttcaccacggtggatagagaggctatctgggcagaggtcgagaaggaacccgagaaatacccactgcggggagaacttagtgaagaagaactaccgtactatgttgaattgcccgatagaacagcccatggggctcccgactccagtgaacacaccgagtcagcagacacttcctcctgccataccgatagtgagaatacatccagtttctctagcccttcgcacgacctccaagagctatctaatgaggagaattgttgcgccccaatccctatgggaggaagagcgtatcccaaaaggtctgctctgttggcggcttttcaaagtgagtcctttaaggcaggggctaagctgagcttagttagagttgattcagacaagacgcaggcctccgaatcattttctagcgacgaagaagcggacctggagcttcaagccctcaccacatccaggctgctcaagcaacagcgcgagaggcaggaagcggtggaggccttattcaaacatatcttgctgtacttgcaaccatacgactctaggagggtcctgtatgcgttcagcgtgcttgaggccgtccttaaaactaatccaaaggagtttatcgaggcggtgagcagaacctccatggacacatcatcaaccgcccacctcaacctgataagcaatcttttggctagacaccaggaggcattgatcggccagagtttctatggcaaactccagacacaggtacctaatgtctgccctcacagtttgttgcttgagctgctgacctatctttgtctgtctttccttagaagttattacccttgctatttaaaagtttctcacagagacatcttggggaacagggatgtgcaggtaaaaagtgtggaggtgctaattaggatcatgatgcaattggtgtctgttgccaagtcaagcgaaggtaaaaatgtagagttcattcatagtcttctgcaacggtgtaaagtccaggaattcgtgctgttgtcgctgtcagcctcaatgtacacgtcacagaaaaggtatgggctcgctaccgcgcaccatgggagggctctacccgaggactctctatttgaggagagtctgataaatctcgggcaggaccagatctggagtgagcatcccctacagatcgaactgctgaaactgctgcaggtcctcatagtgcttgagcatcacctaggtagggcccacgaggaagctgagaatcagccggatttaagcagggaatggcagcgcgcactgaactttcagcaggcaatctccgcactgcagtacgtacaacctcatccactgacaagccaagggctccttgttagtgccgtggttcggggactccagccagcctacggatacggcatgcaccccgcatgggtcagcctcgttacacatagtctgccgtacttcgggaaatcgttgggatggacagtcactccttttgtggtccaaatctgcaagaacttggacgatctggtaaaacagtacgaatcagagagtgtcaagctctctgtcagcaccacctctaaaagagagaacattagcccagattatcccctgactcttcttgaaggcttgactactatttctcatttctgcctattggaacaggcaaatcagaacaagaagaccatggccgcaggggacccagcaaatctgcggaatgccagaaatgccatactggaagagctgccacgcacagtgaacacaatggcactgctatggaatgttctgcggaaagaggaaacgcagaagcggccagttgacctgctgggcgcaactaaaggatcatctagcgtttacttcaaaaccactaagaccattcgccaaaagattctggacttcctcaaccccctgactgcccacctgggtgtgcaactgaccgcagccgtcgcagcagtgtggagcagaaaaaaggctcagaggcacagcaagatgaaaatcatacctaccgcaagtgcctcccagctgacactggtagatctggtttgcgctctctctactctgcaaaccgatacgctcctacacctggttaaagaagtggtcaagcgccctccccaagtgaaggggggagatgaaaaatcacccctcgtggacatccccgtgctccaattctgctacgcgttcttgcaacgcctacccgttcccgctctgcaggagaacttcagctctcttctgggtgttcttaaggagtcagtccagctgaacctggcccctcctggttatttcctccttctcagcatgctcaatgacttcgtgaccagaacaccaaaccttgaaaataaaaaggaccagaaagacctgcaggagataacacagaaaatcttggaagctgtgggtaacatcgccggatcttcactggagcaaacaagttggctgagtagaaatctagaagtcaaagcccagcctcaggcctccctggaggaaagtgatgcagaagaagatttatatgacgcggctgcagcgtcagctatggttagttctagtgccccttctgtgtattccgtgcaggctctatcactgttggctgaggtgctcgccagcttgcttgatatggtgtaccgctctgacgagaaagagaaagcagttccccttattagtcgtctcctgtactacgtctttccttatcttagaaatcattctgcctacaacgctccgagctttagggctggcgctcaactactgagtagcctgtctggatatgcctacacaaagcgggcatggcgaaaagaggttctcgagctgttcttagatcccgcatttttccaaatggatacatcttgcgtgcattggaaatccatcatagaccatttgctcactcacgagaagacaatgttcaaagatctcatgaatatgcagtccagttctctgaagcttttttcttcattcgagcagaaggccatgcttcttaagaggcaggcttttgccgtattttcaggcgaattggaccagtatcacctgtatctgcccctgatccaggaaaggttgacggacaaccttagagttggacagacatcaatcgtagctgcccagatgttcctgttctttcgcgttttacttctcagaatctccccacagcacttaacaagcctgtggcccatcatggtgagcgagttgattcagacctttacccagctcgaagaagatcttaaagatgaggacgagtctcttcgctctaccaacaaggtgaaccggacaaaggtgtcagtgcccgacgcaaatggcccatccgtaggggagattcctcagtccgagttgatcctgtacctatctgcctgtaagtttctggacacagccttatcctttccccctgataagatgccactgttccaaatctaccggtgggctttcatccctgaggttgacacagaggggcctgcctttctgtcagacgtggaggagaaccaccaggaatgtaaaccccatacggtccgaatccttgagcttctgaagcttaaattcggagagatctccagtagcgacgaaatcactatgaagtccgaatttccactgctgcggcagcatagcgtgagtagcatcagacaactcatgccattcttcatgacattgaatggcgcttttaaaacccaacggcagcttccagcagattcgccaggaaccccatttctggattttccagtgaccgactctcccaggatcttgaagcagctagaggagtgtatcgagtacgactttctcgaacacccagagtgtta

SEQ ID NO: 295807 - DNA, 438 bp, Artificial Sequence
  derived and/or modified sequence
atggaccccgaggagcaggagctgctgaacgactacagatacagaagctacagcagcgtgatcgagaaggccctgagaaacttcgagagcagcagcgagtgggccgacctgatcagcagcctgggcaagctgaacaaggccctgcagagcaacctgagatacagcctgctgcccagaagactgctgatcagcaagagactggcccagtgcctgcaccccgccctgcccagcggcgtgcacctgaaggccctggagacctacgagatcatcttcaagatcgtgggcaccaagtggctggccaaggacctgttcctgtacagctgcggcctgttccccctgctggcccacgccgccgtgagcgtgagacccgtgctgctgaccctgtacgagaagtacttcctgcccctgcagaagctgctgctgcccagcctgcagtag

SEQ ID NO: 295808 - DNA, 6897 bp, Artificial Sequence
  derived and/or modified sequence
atggaccccgaggagcaggagctgctgaacgactacagatacagaagctacagcagcgtgatcgagaaggccctgagaaacttcgagagcagcagcgagtgggccgacctgatcagcagcctgggcaagctgaacaaggccctgcagagcaacctgagatacagcctgctgcccagaagactgctgatcagcaagagactggcccagtgcctgcaccccgccctgcccagcggcgtgcacctgaaggccctggagacctacgagatcatcttcaagatcgtgggcaccaagtggctggccaaggacctgttcctgtacagctgcggcctgttccccctgctggcccacgccgccgtgagcgtgagacccgtgctgctgaccctgtacgagaagtacttcctgcccctgcagaagctgctgctgcccagcctgcaggccttcatcgtgggcctgctgcccggcctggaggagggcagcgagatcagcgacagaaccgacgccctgctgctgagactgagcctggtggtgggcaaggaggtgttctacaccgccctgtggggcagcgtgctggccagccccagcatcagactgcccgccagcgtgttcgtggtgggccacatcaacagagacgcccccggcagagagcagaagtacatgctgggcaccaaccaccagctgaccgtgaagagcctgagagccagcctgctggacagcaacgtgctggtgcagagaaacaacctggagatcgtgctgttcttcttccccttctacacctgcctggacagcaacgagagagccatccccctgctgagaagcgacatcgtgagaatcctgagcgccgccacccagaccctgctgagaagagacatgagcctgaacagaagactgtacgcctggctgctgggcagcgacatcaagggcaacaccgtggtgcccgagagcgagatcagcaacagctacgaggaccagagcagctacttcttcgagaagtacagcaaggacctgctggtggagggcctggccgagatcctgcaccagaagttcatcgacgccgacgtggaggagagacaccacgcctacctgaagcccttcagagtgctgatcagcctgctggacaagcccgagatcggcccccaggtggtgggcaacctgttcctggaggtgatcagagccttctacagctactgcagagacgccctgggcagcgacctgaagctgagctacacccagagcggcaacagcctgatcagcgccatcaaggagaacagaaacgccagcgagatcgtgaagaccgtgaacctgctgatcaccagcctgagcaccgacttcctgtgggactacatgaccagatgcttcgaggagtgcttcagacccgtgaagcagagatacagcgtgagaaacagcgtgagccccccccccaccgtgagcgagctgtgcgccctgctggtgttcctgctggacgtgatccccctggagctgtacagcgaggtgcagacccagtacctgccccaggtgctgggctgcctggtgcagcccctggccgaggacatggaggccctgagcctgcccgagctgacccacgccctgaagacctgcttcaaggtgctgagcaaggtgcagatgccccccagctacctggacaccgagagcaccagcggcaccagcagccccgtgaagggcgagaacggcaagatcatcctggagaccaaggccgtgatccccggcgacgaggacgccagcttcccccccctgaagagcgaggacagcggcatcggcctgagcgccagcagccccgagctgagcgagcacctgagagtgcccagagtgagcctggagagagacgacgtgtggaagaagggcggcagcatgcagagaaccttcctgtgcatccaggagctgatcgccaacttcgccagcaagaacatcttcggcgtgcagctgaccgccagcggcgaggagagcaagagcgaggagcccgccggcaagagagacagagacggcacccagagcctggccgccaacgacagcagcagaaagaacagctgggagcccaagcccatcaccgtgccccagttcaagcagatgctgagcgacctgttcaccgccagaggcagccccttcaagaccaagagcagcgagagccccagcagcagccccagcagccccgccagaaagaacggcggcgagtgggacgtggagaaggtggtgatcgacctgggcggcagcagagaggagagaagagaggccttcgccgccgcctgccacctgctgctggactgcgccaccttccccgtgtacctgagcgaggaggagaccgagcagctgtgcgccaccctgttccagctgcccggcgccggcgacagcagcttccccagctggctgaagagcctgatgaccatctgctgctgcgtgaccgactgctacctgcagaacgtggccatcagcaccctgctggaggtgatcaaccacagccagagcctggccctggtgatcgaggacaagatgaagagatacaagagcagcggccacaaccccttcttcggcaagctgcagatggtgaccgtgccccccatcgcccccggcatcctgaaggtgatcgccgagaagaccgacttctaccagagagtggccagagtgctgtggaaccagctgaacaaggagaccagagagcaccacgtgacctgcgtggagctgttctacagactgcactgcctggcccccaccgccaacatctgcgaggacatcatctgccacgccctgctggaccccgacaagggcaccagactggaggccctgttcagattcagcgtgatctggcacctgaccagagagatccagggcagcagagtgaccagccacaacagaagcttcgacagaagcctgttcgtggtgctggacagcctggcctgcaccgacggcgccatcggcgccgccgcccagggctggctggtgagagccctgagcctgggcgacgtggccagaatcctggagcccgtgctgctgctgctgctgcagcccaagacccagagaaccagcatccactgcctgaagcaggagaacagcgccgacgacctgcacagatggttcaacagaaagaagaccagcttcagagaggcctgcgccgtgcccgagccccaggagagcggcagcgaggagcacctgcccctgagccagttcaccaccgtggacagagaggccatctgggccgaggtggagaaggagcccgagaagtaccccctgagaggcgagctgagcgaggaggagctgccctactacgtggagctgcccgacagaaccgcccacggcgcccccgacagcagcgagcacaccgagagcgccgacaccagcagctgccacaccgacagcgagaacaccagcagcttcagcagccccagccacgacctgcaggagctgagcaacgaggagaactgctgcgcccccatccccatgggcggcagagcctaccccaagagaagcgccctgctggccgccttccagagcgagagcttcaaggccggcgccaagctgagcctggtgagagtggacagcgacaagacccaggccagcgagagcttcagcagcgacgaggaggccgacctggagctgcaggccctgaccaccagcagactgctgaagcagcagagagagagacaggaggccgtggaggccctgttcaagcacatcctgctgtacctgcagccctacgacagcagaagagtgctgtacgccttcagcgtgctggaggccgtgctgaagaccaaccccaaggagttcatcgaggccgtgagcagaaccagcatggacaccagcagcaccgcccacctgaacctgatcagcaacctgctggccagacaccaggaggccctgatcggccagagcttctacggcaagctgcagacccaggtgcccaacgtgtgcccccacagcctgctgctggagctgctgacctacctgtgcctgagcttcctgagaagctactacccctgctacctgaaggtgagccacagagacatcctgggcaacagagacgtgcaggtgaagagcgtggaggtgctgatcagaatcatgatgcagctggtgagcgtggccaagagcagcgagggcaagaacgtggagttcatccacagcctgctgcagagatgcaaggtgcaggagttcgtgctgctgagcctgagcgccagcatgtacaccagccagaagagatacggcctggccaccgcccaccacggcagagccctgcccgaggacagcctgttcgaggagagcctgatcaacctgggccaggaccagatctggagcgagcaccccctgcagatcgagctgctgaagctgctgcaggtgctgatcgtgctggagcaccacctgggcagagcccacgaggaggccgagaaccagcccgacctgagcagagagtggcagagagccctgaacttccagcaggccatcagcgccctgcagtacgtgcagccccaccccctgaccagccagggcctgctggtgagcgccgtggtgagaggcctgcagcccgcctacggctacggcatgcaccccgcctgggtgagcctggtgacccacagcctgccctacttcggcaagagcctgggctggaccgtgacccccttcgtggtgcagatctgcaagaacctggacgacctggtgaagcagtacgagagcgagagcgtgaagctgagcgtgagcaccaccagcaagagagagaacatcagccccgactaccccctgaccctgctggagggcctgaccaccatcagccacttctgcctgctggagcaggccaaccagaacaagaagaccatggccgccggcgaccccgccaacctgagaaacgccagaaacgccatcctggaggagctgcccagaaccgtgaacaccatggccctgctgtggaacgtgctgagaaaggaggagacccagaagagacccgtggacctgctgggcgccaccaagggcagcagcagcgtgtacttcaagaccaccaagaccatcagacagaagatcctggacttcctgaaccccctgaccgcccacctgggcgtgcagctgaccgccgccgtggccgccgtgtggagcagaaagaaggcccagagacacagcaagatgaagatcatccccaccgccagcgccagccagctgaccctggtggacctggtgtgcgccctgagcaccctgcagaccgacaccctgctgcacctggtgaaggaggtggtgaagagacccccccaggtgaagggcggcgacgagaagagccccctggtggacatccccgtgctgcagttctgctacgccttcctgcagagactgcccgtgcccgccctgcaggagaacttcagcagcctgctgggcgtgctgaaggagagcgtgcagctgaacctggccccccccggctacttcctgctgctgagcatgctgaacgacttcgtgaccagaacccccaacctggagaacaagaaggaccagaaggacctgcaggagatcacccagaagatcctggaggccgtgggcaacatcgccggcagcagcctggagcagaccagctggctgagcagaaacctggaggtgaaggcccagccccaggccagcctggaggagagcgacgccgaggaggacctgtacgacgccgccgccgccagcgccatggtgagcagcagcgcccccagcgtgtacagcgtgcaggccctgagcctgctggccgaggtgctggccagcctgctggacatggtgtacagaagcgacgagaaggagaaggccgtgcccctgatcagcagactgctgtactacgtgttcccctacctgagaaaccacagcgcctacaacgcccccagcttcagagccggcgcccagctgctgagcagcctgagcggctacgcctacaccaagagagcctggagaaaggaggtgctggagctgttcctggaccccgccttcttccagatggacaccagctgcgtgcactggaagagcatcatcgaccacctgctgacccacgagaagaccatgttcaaggacctgatgaacatgcagagcagcagcctgaagctgttcagcagcttcgagcagaaggccatgctgctgaagagacaggccttcgccgtgttcagcggcgagctggaccagtaccacctgtacctgcccctgatccaggagagactgaccgacaacctgagagtgggccagaccagcatcgtggccgcccagatgttcctgttcttcagagtgctgctgctgagaatcagcccccagcacctgaccagcctgtggcccatcatggtgagcgagctgatccagaccttcacccagctggaggaggacctgaaggacgaggacgagagcctgagaagcaccaacaaggtgaacagaaccaaggtgagcgtgcccgacgccaacggccccagcgtgggcgagatcccccagagcgagctgatcctgtacctgagcgcctgcaagttcctggacaccgccctgagcttcccccccgacaagatgcccctgttccagatctacagatgggccttcatccccgaggtggacaccgagggccccgccttcctgagcgacgtggaggagaaccaccaggagtgcaagccccacaccgtgagaatcctggagctgctgaagctgaagttcggcgagatcagcagcagcgacgagatcaccatgaagagcgagttccccctgctgagacagcacagcgtgagcagcatcagacagctgatgcccttcttcatgaccctgaacggcgccttcaagacccagagacagctgcccgccgacagccccggcacccccttcctggacttccccgtgaccgacagccccagaatcctgaagcagctggaggagtgcatcgagtacgacttcctggagcaccccgagtgctag

SEQ ID NO: 295809 - DNA, 623 bp, Artificial Sequence
  derived and/or modified sequence
gacccgcgcggtggggaagagccgctgccgctggttctccggctcttcctcggcggttctggctcccggccgcgccgcagccctgcccagtctctctcccccagcccggagggctcctccgcgccgcacgtgagcgcgcccgccaacagggccactgccgcgatacttttctgctgtgagaatgtaagatggatccagaagagcaggagctcttaaatgattacagatacagaagctactcttcagtgattgaaaaggctttgagaaattttgagtcctcgagtgaatgggcggatctcatatcttcacttggcaaactcaacaaggctcttcagagtaacctgaggtactccttgttgccaagacggctcctcatcagcaaaagattagctcagtgtttgcaccctgccctgcccagtggtgtccacttaaaagctctggaaacctacgagattatctttaaaatcgtggggaccaaatggctggccaaggacttgtttctgtacagctgcgggttatttcctctcctggcacacgcggcggtgtcggtgaggccggtgctgctcaccctgtacgagaagtacttcctcccactgcagaagctgctcctgcccagtctgcag

SEQ ID NO: 295810 - DNA, 7685 bp, Artificial Sequence
  derived and/or modified sequence
ttcatctcccacagtgcctggcccagaagccttgctaaatatttgaacaggattgcccaatacttttctgctgtgagaatgtaagatggatccagaagagcaggagctcttaaatgattacagatacagaagctactcttcagtgattgaaaaggctttgagaaattttgagtcctcgagtgaatgggcggatctcatatcttcacttggcaaactcaacaaggctcttcagagtaacctgaggtactccttgttgccaagacggctcctcatcagcaaaagattagctcagtgtttgcaccctgccctgcccagtggtgtccacttaaaagctctggaaacctacgagattatctttaaaatcgtggggaccaaatggctggccaaggacttgtttctgtacagctgcgggttatttcctctcctggcacacgcggcggtgtcggtgaggccggtgctgctcaccctgtacgagaagtacttcctcccactgcagaagctgctcctgcccagtctgcaggccttcatcgtgggcctgctgcccggccttgaagagggctccgagatctccgacagaacggatgctctgctcctgagactgtcgctggtggttggcaaagaggtgttttacaccgccctctgggggagcgtcctggccagcccgtccatccgcctccctgcctcagtcttcgtggtgggccacatcaacagggatgcccccggccgggagcagaagtacatgctggggaccaatcaccaactcacggtgaagtctttgcgtgcctccctgttggactcaaatgttcttgtgcaaagaaataatctggaaatcgttctgtttttcttcccattttatacctgtctggattccaatgagagagccatccccctcctcagatctgacatcgtgcgcattctctcagccgccacccagaccctactgagaagggacatgtccctgaacagaagactgtatgcatggttactaggctcagacataaaaggaaataccgttgtgccagaatctgaaatctcaaattcttatgaagaccagtcgtcttatttttttgaaaaatactccaaggatcttttagttgagggtttggctgagatattgcatcagaagttcatagatgctgacgtggaggaacgccatcatgcatacctgaagccttttcgcgtcctcatcagtctgcttgacaagccagaaatagggcctcaagtggttgggaatttgtttctcgaagtcatcagggccttttattcttactgcagagatgcccttggctctgatcttaaacttagctacacccagagtggaaattcgctgataagtgcaatcaaggaaaacagaaatgcctctgagattgtcaaaacggtaaatttgctgataacttctctaagcacagactttctctgggattatatgacaaggtgttttgaggaatgctttagaccagtgaagcagcgttacagcgtgaggaacagcgtcagccctccccccacggtctcggagctctgcgccctcctggtcttcctgctggatgtcattcctttggaactttactctgaggtgcaaacccagtatctccctcaggtgctcggctgcctggtgcagcctcttgctgaggacatggaggccttaagtttacctgaactcacgcatgccttgaagacgtgtttcaaggtgctcagcaaagtccagatgcctccttcctacctcgacacggagtccaccagcggaacctcgagtccagtaaaaggtgaaaacggcaaaataattttggaaacaaaggcagtgattcccggtgacgaagatgcttcgtttccccctctgaagtctgaggacagtgggatcgggctcagtgcctcgtcaccggagctctctgagcacttgagggttcctcgagtttctctggaaagggacgacgtttggaagaagggcgggagcatgcagaggacgtttctttgcatccaagagctaatcgccaactttgccagcaagaacatttttggagtacagctgacagcgtcaggagaagaaagcaagtccgaggagcctgcagggaagagggacagggatgggacgcagagcctggcagccaatgattccagcaggaagaactcttgggagcccaagcccatcactgtgcctcagttcaagcagatgctgtcagacttgttcacagcacgagggtctccattcaagacaaaaagttcagagtcaccatcgtcttcgcccagcagccctgccaggaaaaacgggggagaatgggatgttgagaaggtggtcattgacctggggggttccagggaggaacgcagggaggcctttgccgccgcctgccacctgctgctggattgtgccactttccctgtctacctgtccgaggaagagaccgagcagctctgtgcaacgctcttccagctgccaggagccggtgattccagttttccatcttggctgaagtccctcatgactatttgctgctgtgtgactgactgctacctccagaacgtggccatttccactctgctggaagtgataaaccattcccagtccctggcgcttgtcattgaagacaagatgaaacgctataagagctctggacacaaccctttttttggcaagctgcagatggtgacggttcctcccattgctccagggatattgaaagtcattgcagagaaaacagatttctatcagagggtggctcgtgtgctttggaatcagctgaacaaagagacccgggagcatcacgtcacctgcgtagaattgttctaccggctgcactgcctggcccctacggccaacatctgcgaggacatcatctgccatgccctcctggaccctgacaagggaacaaggctggaagctctgtttagattttccgtgatctggcatctgacaagagagatccaaggcagtcgagtaacatctcacaatcgctcctttgataggtccttgtttgtcgtgctggacagcctggcctgcacggatggtgccatcggtgcggcagcccagggctggctggtgcgtgcgctctccctcggggacgtggctcgcatcctcgaacccgtgctcctgctgctgctgcagccaaaaacccagagaacctccatccactgcctcaagcaggagaactcggccgatgacttgcaccgttggtttaacaggaagaaaacctctttcagagaggcatgcgcagtgcccgagcctcaggagagcggctctgaagagcacctgcctctgagccagttcaccacagtggaccgtgaagccatttgggccgaagtggagaaggagcccgagaagtacccgctgcgaggcgagctgagcgaggaagagctgccctactacgtggagcttccagacaggacggcccacggcgccccggacagcagcgagcacaccgagtctgcagatacaagctcctgccacacggacagcgagaacacgtcctccttctcctccccttcccacgacctgcaggagctgagcaacgaagagaactgctgtgcacccatccccatggggggcagggcgtaccccaagcgctcggccctgctggcggccttccagtcagaaagcttcaaggctggggccaagttaagcctggtgcgggtggactcggacaagacgcaggcttctgagtcgttctccagcgacgaggaggcggacttggagctccaggccctcaccacatccaggctgctaaagcagcagcgggaaaggcaggaggccgtcgaggccttgttcaagcacatcctgctctacctgcagccctacgactctcggcgggtcctctatgccttctcggtgctggaggctgtgctcaaaaccaaccctaaggaattcatcgaggctgtgtccaggactagcatggataccagctccaccgcgcacctcaacctcatctccaacctcctcgctcgccaccaggaggccctcattggccagagtttctacggaaagctccagacccaggtccccaacgtgtgcccccactctctgctcctggagctgctcacctacctctgcctgagcttcctgcgctcctactacccttgctatttgaaggtctcgcaccgagacattctcggcaaccgggacgtgcaggtcaaaagtgtcgaggttttgatcaggataatgatgcagctggtctcagtggccaagtcttcggaagggaagaacgtggagttcatccacagcttgctgcagaggtgcaaagttcaggagtttgtcctgctctccctgtcggcgtccatgtacacgagccagaagcgctacgggctggccaccgcccaccacggcagggccctgccagaggacagcctctttgaggagagtctcattaacttgggtcaggaccagatctggagtgagcacccgctgcagattgagctgctgaagctgctgcaggtgctgattgtcttggaacaccacctgggtcgggcccatgaggaggcggaaaaccagcccgacctgtcccgggagtggcagagagccctgaacttccagcaggccatcagcgccctgcagtacgtgcagccccaccccctcacctcccagggtcttctggtctctgcggtggtgaggggtctgcagcccgcctacggttacggcatgcatccggcctgggtgagcttggtcacgcattccttgccctacttcggaaagtccctgggctggacggtgacaccctttgttgtccagatttgcaaaaacttggatgacttggtcaagcagtatgaaagcgaatctgtgaagctctctgtcagcacaacctccaagagggaaaacatttctccagattatccactcacccttctagaaggtctaacgaccattagtcatttttgtcttttggaacaagccaaccaaaacaaaaagaccatggctgcaggtgatcctgccaacttgaggaatgccagaaatgccattttggaagagctgcctcgaactgttaacaccatggcccttctctggaatgttctcagaaaggaggagactcaaaagagacctgtcgatctcctaggggccacgaagggatcctcttccgtttactttaaaaccaccaaaaccataagacaaaaaattttagacttcttaaaccccttgacggcccatcttggggttcagttgacagcggctgttgcggcagtgtggagcagaaagaaagcccagcgtcacagtaagatgaagattatcccaacggcaagtgcatcccagctaacccttgtcgacttggtgtgtgcactcagcaccctgcagactgacacgctgctgcacctggtgaaggaggtggtgaagaggccaccccaagtcaaagggggtgatgagaaatcgcccctagtggacattcctgtgttgcagttttgctatgcttttctccaaaggctcccagtaccagccttgcaagagaacttttcttcactgttgggagtattgaaagagtctgtacagttgaatctagccccacctgggtattttctgcttctcagcatgctgaatgactttgtaacaagaactcccaacctggaaaacaagaaggaccaaaaagacctgcaggaaatcactcagaaaatcctagaagctgtggggaacattgccggctcttccttggagcaaaccagctggctaagcagaaacctggaagtgaaggcccaacctcaggcctctctagaagaatctgatgctgaggaggacctgtatgatgctgctgcagcttcagcaatggtgtcttcatccgccccgtcggtgtacagcgtgcaagccctctctctcctggcagaggtactggcttccctcctggacatggtttatcgaagtgatgagaaggagaaagctgtgccgttaatctcccgtctgctttactatgtttttccatacttacgcaaccacagtgcctacaatgctcccagcttccgggctggcgctcagctgctgagctccctgagtggctatgcctacacaaagcgagcctggaggaaggaggtcctggagctgtttctcgaccccgctttctttcagatggatacttcctgtgttcattggaagtccattattgaccatcttttgactcatgagaaaacaatgtttaaggatttaatgaacatgcagagcagttctttgaaactattctcaagttttgaacagaaagccatgctgttaaagcgccaggcttttgctgtcttcagtggagaacttgatcaataccacctttaccttccactgatacaagaacgcctgacagacaatctcagagttggacagacatccatagttgctgctcagatgtttctttttttcagagttttgctgctaagaatatctcctcaacatttgacttcattgtggccaataatggtctctgaattgattcagacattcacacagcttgaagaagatctaaaagatgaagatgagtcattgagaagcaccaacaaagtaaacagaacgaaagtttcagtcccggatgcaaatggaccctcagtgggggagataccccagagtgaactcatcttgtatttatcagcttgcaaattcttggacacagcgctttcttttccacctgacaagatgccattatttcaaatttataggtgggcatttattccagaagtggacacagagggccctgccttcctgtcggatgtagaggagaatcaccaagaatgcaaaccccacactgtcaggattctagaacttctaaaattaaagtttggggaaatcagtagctctgatgagatcaccatgaagagtgaattcccgcttctgcgccaacattctgtttccagcatcaggcagttgatgccattcttcatgactctaaatggtgcatttaagacccagagacagctgcctgctgatagcccaggaactccattcttggactttcctgtcacagatagcccaaggatcttaaaacaactggaagaatgcatcgaatatgattttctggaacatccagaatgttaaccatgtgagagagaatatgtttaatccatgtattggtactttactgaaaaccaggttatattctaaagaagaaagaaggcaggatagtgcttttgaacaagcctatttccattttgaaagtagatttcaggctaggtgcggtggctcacacctgtaatctcagcactttgggaggccaaggcaggcagatcacttgaggtcaggagttcgagaccagcctgaccaacatggtgagaccctgtctctactaaaaatacaaaaattagctgggtgtggtggcggcgcctgtaatcccagctacttgggaggctaaggcatgagaattgcttgaacccaggaggtggaggctgcagtgagccgagatcacgacactgcactccagctgtgtgacagaatgagaccatctccaaaaaaaaaaaaaagtagatttcagataatttactgttcagcaacaggacacacctccctaaatgccttgtaatatatttgaatctgattctgcatttcttcctcaatttatgtaatgaaaataaaattaatatatcatctaacagtagcacaaaatttgtaatatgaagtaaagtatgaagataatgaagaagttgttttctttgttgaagcagttatatgggtctttctcagtatatttctcttttctctaaaagtttaaacttattaaaagaatgttatttttaacctttca

SEQ ID NO: 295811 - DNA, 732 bp, Artificial Sequence
  derived and/or modified sequence
accatcagagtgaaggacagcctgatctgcgtggactgcgccatggagagcagcagaaacagcagcatgctgaccctgcccctgagcctgttcgacgtggacagcaagcccctgaagaccctggaggacgccctgcactgcttcttccagcccagagagctgagcagcaagagcaagtgcttctgcgagaactgcggcaagaagaccagaggcaagcaggtgctgaagctgacccacctgccccagaccctgaccatccacctgatgagattcagcatcagaaacagccagaccagaaagatctgccacagcctgtacttcccccagagcctggacttcagccagatcctgcccatgaagagagagagctgcgacgccgaggagcagagcggcggccagtacgagctgttcgccgtgatcgcccacgtgggcatggccgacagcggccactactgcgtgtacatcagaaacgccgtggacggcaagtggttctgcttcaacgacagcaacatctgcctggtgagctgggaggacatccagtgcacctacggcaaccccaactaccactggccccccttcctgtgccacgcctgcatcctgatcgaggacggcgagtacctgagactgttcagacccgccaacatcagacagttcaccagcagagaggagacctgggtggagtgctggtgcgtgctgaccctgcagtgcaagcagctgcagcaggtgtggtag

SEQ ID NO: 295812 - DNA, 732 bp, Artificial Sequence
  derived and/or modified sequence
accatcagggtgaaggattcactgatctgcgttgattgcgcaatggagagttcacgcaattcgagcatgctgacactgcccttgagcctctttgacgtggattccaagcctctcaaaacactggaggatgccttgcattgcttcttccaaccacgagagctcagtagtaagtctaaatgtttctgtgagaactgcggtaaaaagactcggggaaagcaggtgctgaagctcactcacctgccccagactttaacgatccatttgatgaggttttccatacgaaactctcaaacgaggaagatctgccacagtctatatttccctcagagcctcgacttctcccaaatcctgcccatgaaaagagaatcctgcgatgcagaggaacagtctggagggcagtacgaactttttgcggtgatagcacatgtgggtatggctgactccggccattattgtgtgtacattaggaacgcagtcgacgggaagtggttctgctttaacgattctaatatctgtctggtgagttgggaggatatccagtgtacctacggcaaccctaattatcactggccgccttttttgtgtcacgcttgcattctgatagaggacggggaatatctgaggttgttccgccctgcaaacattcgacaattcacctctagagaggaaacctgggtcgaatgctggtgtgtcctgacactgcagtgtaaacagctgcagcaggtgtggtag

SEQ ID NO: 295813 - DNA, 732 bp, Artificial Sequence
  derived and/or modified sequence
accatccgggtgaaggacagcctcatctgtgtggactgtgccatggagagcagcaggaacagctccatgctgaccctgcccctgagcctgtttgatgtggacagcaagcccctgaagaccctggaggatgccctgcactgcttcttccagccccgggagctgagcagcaagagcaagtgcttctgtgagaactgtgggaagaagacccggggcaagcaggtgctgaagctgacccacctgccccagaccctgaccatccacctgatgaggttcagcatccggaacagccagaccaggaagatctgccacagcctgtacttcccccagagcctggacttcagccagatcctgcccatgaagcgggagagctgtgatgctgaggagcagagcggcggccagtatgagctgtttgctgtgattgcccacgtgggcatggctgacagcggccactactgtgtgtacatcagaaatgctgtggatggcaagtggttctgcttcaatgacagcaacatctgcctggtgtcctgggaggacatccagtgcacctacggcaaccccaactaccactggccacccttcctgtgccacgcctgcatcctgattgaagatggagagtacctgcggctcttccggcctgccaacatccggcagttcaccagccgggaggagacctgggtggagtgctggtgtgtgctgaccctgcagtgcaagcagctgcagcaggtgtggtag

SEQ ID NO: 295814 - DNA, 732 bp, Artificial Sequence
  derived and/or modified sequence
accatccgggtgaaggacagcctgatctgcgtggactgcgccatggagtcttcccgaaatagttctatgctgaccctacctctgagcttatttgatgttgactcgaagccactcaaaactctcgaagacgcactacactgttttttccagccacgagagctgagttccaagtctaagtgtttctgcgaaaattgcggaaaaaagaccagagggaagcaagtgctgaaattgacccacctgcctcagacgcttacaattcacctgatgcggttcagcatccgaaatagtcagacaaggaaaatttgtcatagcttatactttccacaatctttagatttctctcagattctcccgatgaagagggaatcctgcgatgccgaagaacagagtggcggtcagtacgaactgttcgccgtgatcgctcacgtgggaatggcagattctggccactactgtgtctatatccgtaatgctgtagacggtaagtggttttgttttaacgactctaatatctgcttggtcagctgggaggatatccagtgtacctacggcaatccgaactaccactggccacccttcctctgtcacgcttgtatcctgatagaggacggggagtatctcaggctattccgcccggccaatatccgccagttcacctcacgcgaggagacatgggtggaatgttggtgtgtcttaacattgcaatgtaagcagttgcagcaggtatggtag

SEQ ID NO: 295815 - DNA, 732 bp, Artificial Sequence
  derived and/or modified sequence
accattcgcgttaaggacagcctgatttgcgtggattgcgctatggagagttctcggaattcatcgatgctgacgctaccgttaagcttgttcgacgtcgattccaagcctctcaaaacgctcgaggacgccctccactgcttcttccagcctcgagaactcagctctaaaagcaagtgtttctgcgagaattgtgggaaaaaaacccggggaaagcaagtactgaagctgacgcacctgccacagacccttactattcatttgatgcgcttctctattcgcaattcacagactcggaaaatttgccactccctctatttcccacagagtctagatttctcccagatcctgcccatgaaacgcgagagctgtgatgcggaggagcagtccgggggacagtatgagctctttgccgtcatcgcacacgtcggcatggctgattcaggccactattgtgtgtatatcaggaatgcggtggacggcaagtggttctgtttcaacgattcgaatatctgtctggtatcctgggaggacatccaatgcacttacggtaatcccaactaccattggcccccattcttgtgccacgcatgcattttaatcgaggacggtgaatacttgagactcttccggccagcaaacattcggcagttcacctcccgcgaggagacctgggtcgagtgttggtgtgtgctaaccctgcagtgcaagcagctgcaacaagtgtggtag

SEQ ID NO: 295816 - DNA, 1180 bp, Artificial Sequence
  derived and/or modified sequence
ataactgctgacccatgtctgctcccagagctaggtgacccagcagccaagcccttgagtgggaactgcaaaagctggggctgcctatgtgtggtccaaaccctcccctctccaggagaaagctgggagtagggattccttcctcacagtaagtgtttgtccaacatgatgctgcccaactgtacctcaaactctggaacctgattaaggaccagatcactgatgtgcacttggtggagagactgcaggccctgtatacgatccgggtgaaggactccttgatttgcgttgactgtgccatggagagtagcagaaacagcagcatgctcaccctcccactttctctttttgatgtggactcaaagcccctgaagacactggaggacgccctgcactgcttcttccagcccagggagttatcaagcaaaagcaagtgcttctgtgagaactgtgggaagaagacccgtgggaaacaggtcttgaagctgacccatttgccccagaccctgacaatccacctcatgcgattctccatcaggaattcacagacgagaaagatctgccactccctgtacttcccccagagcttggatttcagccagatccttccaatgaagcgagagtcttgtgatgctgaggagcagtctggagggcagtatgagctttttgctgtgattgcgcacgtgggaatggcagactccggtcattactgtgtctacatccggaatgctgtggatggaaaatggttctgcttcaatgactccaatatttgcttggtgtcctgggaagacatccagtgtacctacggaaatcctaactaccactggcctccttttctttgtcatgcatgcatattaattgaggatggagaatatctacgcttgttcaggccagccaacatacgacagtttacttcaagagaggagacatgggttgaatgctggtgtgttttaactctgcagtgcaaacagctgcaacaagtgtggtgaactaaacaccagatggccctttgctgccttatttgtcattgtgccttacatgtagcttgcaggatttgattacgcttatgttttgtggtgatcatactttcaactattcctaaaatactgcttcagtcttatctgtttggggtcaactgccgaggatttcatacaaattaatgaagtttgtgaatctaaag

SEQ ID NO: 295817 - protein, 1443 aa, Artificial Sequence
  derived and/or modified sequence
QELEAALHRDDVEFISDLIACLLQGCYQRRDITPQTFHSYLEDIINYRWELEEGKPNPLREASFQDLPLRTRVEILHRLCDYRLDADDVFDLLKGLDADSLRVEPLGEDNSGALYWYFYGTRMYKEDPVQGKSNGELSLSRESEGQKNVSSIPGKTGKRRGRPPKRKKLQEEILLSEKQEENSLASEPQTRHGSQGPGQGTWWLLCQTEEEWRQVTESFRERTSLRERQLYKLLSEDFLPEICNMIAQKGKRPQRTKAELHPRWMSDHLSIKPVKQEETPVLTRIEKQKRKEEEEERQILLAVQKKEQEQMLKEERKRELEEKVKAVEGMCSVRVVWRGACLSTSRPVDRAKRRKLREERAWLLAQGKELPPELSHLDPNSPMREEKKTKDLFELDDDFTAMYKVLDVVKAHKDSWPFLEPVDESYAPNYYQIIKAPMDISSMEKKLNGGLYCTKEEFVNDMKTMFRNCRKYNGESSEYTKMSDNLERCFHRAMMKHFPGEDGDTDEEFWIREDEKREKRRSRAGRSGGSHVWTRSRDPEGSSRKQQPMENGGKSLPPTRRAPSSGDDQSSSSTQPPREVGTSNGRGFSHPLHCGGTPSQAPFLNQMRPAVPGTFGPLRGSDPATLYGSSGVPEPHPGEPVQQRQPFTMQPPVGINSLRGPRLGTPEEKQMCGGLTHLSNMGPHPGSLQLGQISGPSQDGSMYAPAQFQPGFIPPRHGGAPARPPDFPESSEIPPSHMYRSYKYLNRVHSAVWNGNHGATNQGPLGPDEKPHLGPGPSHQPRTLGHVMDSRVMRPPVPPNQWTEQSGFLPHGVPSSGYMRPPCKSAGHRLQPPPVPAPSSLFGAPAQALRGVQGGDSMMDSPEMIAMQQLSSRVCPPGVPYHPHQPAHPRLPGPFPQVAHPMSVTVSAPKPALGNPGRAPENSEAQEPENDQAEPLPGLEEKPPGVGTSEGVYLTQLPHPTPPLQTDCTRQSSPQERETVGPELKSSSSESADNCKAMKGKNPWPSDSSYPGPAAQGCVRDLSTVADRGALSENGVIGEASPCGSEGKGLGSSGSEKLLCPRGRTLQETMPCTGQNAATPPSTDPGLTGGTVSQFPPLYMPGLEYPNSAAHYHISPGLQGVGPVMGGKSPASHPQHFPPRGFQSNHPHSGGFPRYRPPQGMRYSYHPPPQPSYHHYQRTPYYACPQSFSDWQRPLHPQGSPSGPPASQPPPPRSLFSDKNAMASLQGCETLNAALTSPTRMDAVAAKVPNDGQNPGPEEEKLDESMERPESPKEFLDLDNHNAATKRQSSLSASEYLYGTPPPLSSGMGFGSSAFPPHSVMLQTGPPYTPQRPASHFQPRAYSSPVAALPPHHPGATQPNGLSQEGPIYRCQEEGLGHFQAVMMEQIGTRSGIRGPFQEMYRPSGMQMHPVQSQASFPKTPTAATSQEEVPPHKPPTLPLDQS

SEQ ID NO: 295818 - DNA, 1684 bp, Artificial Sequence
  derived and/or modified sequence
gctctgaagagagaaaagcggcggtgtcctgcggagagagccgctccctccactgcccgaggggagcgcgtcgcctcagccgctcgaaagcaggaaatgggcggcaaaagcgcagtcagacaccaactggttctggactgcccccgagaggcagcgagcagcgctcccgcgcttcgcccgctaggagctgccgccacgtcccgagctgcgccgctcgcgcccctccctgctccgagtccccggtgggggctgggctgcggccgagtccggtacccgggcccccacccgcgccgcgctgtcgaacccgccgccggcccgctctcggcgccgataatcgccggcgggcatcccgcagaggctgccgccggctccgccaaacagcagccaaggcatagccgggaagtccccaggccacccgttccccagcacccttcggggaattcccgttcagctctacaggaggcgaaaacggaacaaacgaaaaccccttaacagtgaaaccgggcccggcgatggcccgggtggcgactgcgacgactcgacgcgtgcggacacaagacccgtctcgcgctccgctgctcctgtgcgtccggacgaaccttagagatcacttaaggaggctcgcgcgctactcctcaccacgtgaccgccccgccaggccgccccccgcgccgccatcttacatccgggacagaggcggcgtcccctttccctgccttggcaggcgtcagcgtgctaccagaaatcagccctgaaagaggggaccccgattccacgtcaccagagtgctgaggcagcgggcgatgccctccatcggctcagcgggggggagtggagtcccaaacttttttcggcctttgcccgcaaagaagatggcggcgcatatcgccgcctaagcggacacgttgtaccctggccgtggtttgaagtttccggcacctcctttcccaaccagcaaggacacaaccatacgagccccacccacgcggggtggctgccgtgctacattccgcagaaaacaggcgggaaagctgcggcacagcccgctttaaacgcaagcttttgggacttctggttttggctttttctttttaagccaagttagggagaaggctgactgccatggagccacttctgcttttggcccagacaacttacgggattttttttttcctcccatttagagattttttgtaggaagttaacaaattattttaaagaagtagttagggcttgtcagataaaatacaggacgcccagttaaattggaatttcagataaccagtgttttggcatatgtgtgttacatatatttttaaaattgtttatctgatattccaatttaactgcacattctcaatttttaatgactgtatctggcaaccctatcagcctttacccctgaaaatccagactgcttatgacaaaagtaaggaatggagggaaatgaaaagcatgtttacctacaacttagaattgtctttgcccagactttgatccttcatggaggccagagggccgtggtctagaacaaaatttggcagcaactcataaagatatccttgtataattccctttctggcaaagtaagattttttttttcttaagctatcacgatgtaattttggacaacagatcctcttggccaagagtttaattgcaaattaaaaattaaataactggc

SEQ ID NO: 295819 - DNA, 396 bp, Artificial Sequence
  derived and/or modified sequence
atgggcggcaagagcgccgtgagacaccagctggtgctggactgccccagagaggccgccagcagcgcccccgccctgagacccctgggcgccgccgccaccagcagagccgcccccctggcccccctgcccgcccccagccccagatggggcctgggctgcggcagagtgagataccccggcccccaccccagaagagccgtggagcccgccgccggccccctgagcgcccccatcatcgccggcggccaccccgccgaggccgccgccggcagcgccaagcagcagcccagacacagcagagaggtgcccagaccccccgtgccccagcaccccagcggcaacagcagaagcgccctgcaggaggccaagaccgagcagaccaagaccccctag

SEQ ID NO: 295820 - DNA, 396 bp, Artificial Sequence
  derived and/or modified sequence
atgggaggcaagagcgcagtgaggcaccagctcgtgttggattgcccgcgggaggctgcctcttcagcgcccgccctgagaccccttggtgccgctgccacctccagggcagcccccctggcacctctcccggcaccatctcctcggtggggactcgggtgcggccgggtgcgctaccccggcccgcatccccgacgggccgttgaacctgctgctgggcccctaagtgctcccatcatagcgggggggcatcctgcagaagccgccgctggaagtgcgaagcagcaaccccgtcactcacgagaggtgcctagacctccagtgcctcaacaccccagcggcaatagtcgctccgccttgcaggaagccaagaccgagcagaccaaaacaccatag

SEQ ID NO: 295821 - DNA, 396 bp, Artificial Sequence
  derived and/or modified sequence
atgggcggcaagtctgctgtgcgccaccagctggtgctggactgcccccgggaggccgccagcagcgccccagccctgcggcccctgggcgccgccgccaccagcagagctgcccccctggcccccctgcctgcccccagcccccgctggggcctgggctgcggccgggtgcgctacccaggcccccaccccaggagagctgtggagcctgctgctggccccctgagcgcccccatcatcgccggcggccaccctgctgaggccgccgccggcagcgccaagcagcagcccaggcacagccgggaggtgccccggccccctgtgccccagcaccccagcggcaacagccgcagcgccctgcaggaggccaagacagagcagaccaagaccccctag

SEQ ID NO: 295822 - DNA, 396 bp, Artificial Sequence
  derived and/or modified sequence
atgggcggcaagagcgccgtgcggcaccagctggtgctggactgccctcgagaggctgcctcctcagcccccgcgctgagacctttaggcgcagccgcaacgtcccgcgccgcaccgctggcaccattgcctgccccttcaccacgctgggggctcggctgcggtcgggtcagatatcccgggccccatcctaggagagcagttgagcctgccgccggccctctcagtgctcccatcatcgctggagggcatccggctgaggctgctgcggggagtgctaagcagcagcctcgccacagcagagaagttccgcgccctccagtgccacagcatccctcaggtaactctagatctgccctgcaggaggcaaaaaccgagcagactaaaacaccttag

SEQ ID NO: 295823 - DNA, 396 bp, Artificial Sequence
  derived and/or modified sequence
atgggcggaaaaagtgctgttagacaccagctagtgctcgactgtcctagagaagctgccagtagtgctcccgcattgcgtcctctgggggcagcagcgacatcccgcgctgccccattggccccacttcctgcaccaagtccgaggtggggcctgggctgcgggcgtgtcaggtaccccggtccccatcctcgtcgagctgtcgaaccagcagcagggccactgtctgcgccaatcattgcgggaggccacccagccgaggctgctgcaggctcagcgaaacagcagcctaggcacagtcgcgaagtccctcggcctcccgtcccccagcatcccagtgggaattctcggagcgccttgcaggaggcgaagaccgaacagacgaagacaccttag

SEQ ID NO: 295824 - DNA, 4047 bp, Artificial Sequence
  derived and/or modified sequence
cttctccaagatggcggcgatcggcggcgttgaggcgggatccgggcgagccgagtgaagacctggtcctgtagacgggaaggagcctggacacagtgacacattctcaaaggccctgcaggaccaccatggcttatgatgactccgtgaagaaagaagattgttttgatggtgatcatacctttgaggacataggacttgcagctggccgaagccaacgagagaaaaaacgttcttacaaagattttttaagggaagaggaagaaattgctgctcaggtcaggaattcttccaagaagaagttgaaggatagtgaactttacttcttggggacggacacacacaagaagaagaggaagcactcctctgatgattactactatggagatatttcgtctttggaatcgtcacagaagaaaaagaaaaagtccagcccacagtctactgatacagctatggacctgttgaaagctatcacttccccactggcagcaggctccaagccctccaaaaagactggggagaaatcctctggctcttcaagccattcggagagtaaaaaggagcaccacaggaagaaagtcagtggaagcagtggggaactacccctagaggatggtggctcccacaaatcgaaaaaaatgaaacctctctatgtgaacacagagacactgacccttcgggagcctgatggtttaaaaatgaaacttattctgtcaccaaaggagaagggaagcagctctgttgatgaggagtcttttcaatatccctcccaacaagcgactgtgaaaaaatcctcaaagaaatcagctcgggatgagcagggtgctttactcctaggacatgagttacagagctttctgaaaacagcccggaaaaagcacaagtcatcctcagacgcacattcatctcctggccctgaaggctgtgggtctgacgcctcccagttcgcagagtcccacagtgctaaccttgatctttcagggcttgaacctattctggtagaatcagactcatcctctggtggggaactagaggctggggagttagtgatagatgattcttaccgagaaatcaagaagaaaaagaagtcaaagaagagcaaaaagaagaaagacaaggagaagcataaagagaagcgacactccaagtccaagagaagtttaggactttctgccgtgccagtgggagaggtcacagtgacatctggccctcctcccagcatcccatacgctggagcagcagcacctcccctgccacttcctggcctccacacagatgggcatagtgaaaaaaaaaagaaaaaagaagagaaggacaaagagagagagagaggagaaaagccaaaaaagaagaacatgtcggcctaccaggtgttctgtaaagagtatcgcgtgaccattgtggctgaccatccaggtatagattttggggaacttagtaaaaaactggctgaggtgtggaagcaattaccagaaaaagacaaactgatttggaagcaaaaagctcagtatctgcagcacaaacagaacaaagcagaagccacaactgtgaaaaggaaagcatccagctcagaaggttccatgaaagtcaaagcctcttctgtaggagtactgtcaccccagaagaagtccccacccaccaccatgctgttaccagcctcaccagccaaagcccctgagacagagcccattgatgttgctgctcatcttcagctgttgggagagtccctaagcctcattggacaccgtctgcaggaaactgagggtatggtggctgtgtctggcagtttgtcagtgcttctggattccattatctgtgcccttggccccttggcatgtctcaccacacaactacctgaattgaatggctgtcccaaacaggtcttgtcaaacacattagacaacattgcttacatcatgccgggactgtgacagcaaagaatcctgggacagaaaccttatcctacaccattgctggtttgtgtatatatgactgttgcagattccttcagtggcctctggctgtaggttttaaatttttatatctatacatacatatatacatatatatataatgtacaatatatacatagactgtaactactttgcttttaataattttatgaaatggcaaaggtttagccaagaggaaattttggcatgaatacaggcttgggattcttttttctcctgtggtggataaatctgccttaaaaatcaatgtaacttgggggctgggggcttgttctgggtgccaagcgcatctctttatggacagctaaaatgtgattattttccaagctcagttggacctccagacccatcactgaccatttgccttacctgtcttagtctgaaatgtaataggaaagataacgggaagatgccagttgactgaaaattcaaagcctttcaatttgaagtgacctaggtgggaggtgataaaatttgttccctttatagttatggaagtggcttaggtgaattgagtagagggttcattccaattcctactgtataggtgtctgtgtctcaaaatttattgtaatcattggtaccattggtggcctcaacagaggccaaggagttctgtgagccctggcagcaaaaaacaccttggggggtgaagctgtcaatgccaccagttggacctccatacattctgagctaacccagaatctttagtcggcagaattaagtgctggtgtctttcactggcagcatgaagttagccaccaagtcctcacaagccgtgctgcttagttgctcggtggttatggataaactttgcccagcatgatttttgggttcatcttatcagttcccctggtgggcagatacacagtgttctgcattccacatgtaagtgaattgcaaaaacaaaacaaaactcactctcttgtaggtttatttatgtgtgtgtgaatgtgtattttaattatgtgtatttaactctttaaaatctcttagattttaatttatcctgtaaatttctgtatatataatttaataacagaagcctccaccagcaacagcatgtggaagatacagatttgtcatttctcccttccgccctcccttctttccttccttccttccctgtttccttccctctttccttccttcctcctggtctgttccaaaaactctgaatcatctacattttaaggtattttacctcaaaaatgaatcattgtgttaggattctaattctttataaagaacttcatgggcttcaataatgtctagaaagtaaaataaagaggaatgttaccatccccagctgcccttatttccagagaaccagacgtttgtttcccagttggaaagaagacagttgagcacttcaggatggtttttaaatttggtatgagattctctgccaacaccaagctctgagttaactgtgctttcttctcctggccctgacagagcactacagcatcaaagtaaatctttggggacagtgtagcccatctgcatcctatttaatttcttcccttctccccaccagtgttgtcacagggctatgttgcttaaaggtagtctggctgctgaatccctttctcagctcagagcagttttaagatttaattgggaatacagagaaacaggattgtttgagaaccaaaatcaagaggaacagaaatcttaacttgatttcatgtgttagaacattgtaccatgcctcttctgtatctgtggaagtttcctgtttgacacagggtatctaggaggggcggggaagacatggatagtataggaagacattaatcctagcattgtcatttatatacattaatgaaatcctgatgaggacctgctttttgtttgttttcctttgaaacccagccctattgtatttgtatttaaaatttgtacacatttgtataataatctgtaccttgtggtatttggtactattagaggaaaaactttggattcagaccttcttgcagtttttatatcattgttttattttgttttttaaataaattctagtggtttgatccaaatcccattacagttgtataaagaaataaaa

SEQ ID NO: 295825 - DNA, 1479 bp, Artificial Sequence
  derived and/or modified sequence
atggacctcctgaaggctatcacatccccattggccgccggtagcaagccctccaaaaagaccggcgaaaagtcatctgggtcctctagccacagtgagtcgaagaaggaacaccatcggaagaaagtatctgggtcatctggcgagctgcctcttgaagacgggggctctcacaagtccaagaaaatgaaacccctgtacgtaaacaccgaaaccttgactctcagagaacccgacgggctgaaaatgaagctcatcttatcgcctaaggagaaagggtccagcagcgttgatgaggagtccttccagtaccctagccaacaggccactgtaaaaaaaagttcgaaaaagagcgccagggatgaacagggcgcccttctccttggtcatgagctgcagtcttttctgaagacagcccggaagaaacacaaaagctctagtgacgcccattcctctcctggacctgagggatgtggatctgacgcttcacaatttgccgagagccactccgccaatctggacctgtccgggctcgagcctatcctggtcgaaagcgacagctctagcggcggagaattggaagccggggagctggtaatcgatgattcataccgggaaattaagaagaagaagaaatctaagaagagtaagaaaaagaaagacaaggagaagcataaagagaagcgccattcaaagtctaaacgatctttgggtctgtcggctgtgcccgtcggtgaggtgacagtgacttccggccccccaccttccattccatacgctggcgcagcagctcctccccttcccctgcctggcctgcataccgatgggcattccgagaagaagaagaagaaggaagaaaaggacaaagaacgggaacgcggcgagaaacccaaaaagaagaacatgagtgcctatcaggtcttctgtaaggaataccgggtgaccattgtagccgatcacccaggcattgatttcggagagctctcaaaaaagctggctgaagtgtggaaacagctccccgagaaagataaactgatctggaagcaaaaggcccaatacttgcagcataagcagaataaggcagaagcaactaccgtgaagaggaaggcatccagttcagaaggctcaatgaaagtgaaagcaagcagcgtcggagtcttgagcccccagaagaagagtcctcccacaaccatgctattaccagcaagccctgccaaagccccagagacagaacctatcgacgtggctgcgcatctccaactgcttggcgagtcgctgtctctgataggtcacagactgcaggagacagagggcatggtggccgtctctggcagtctgtccgtgttgctggatagcatcatctgcgccttgggtccactggcatgtctgacaactcagctgccagaactaaacggctgtccaaaacaggtgcttagcaatacactggacaatatcgcatacattatgccagggctgtag

SEQ ID NO: 295826 - DNA, 1479 bp, Artificial Sequence
  derived and/or modified sequence
atggacctgctgaaggccatcaccagccccctggccgccggcagcaagcccagcaagaagacaggagagaagagcagcggcagcagcagccacagcgagagcaagaaggagcaccacaggaagaaggtgtctggcagcagtggagagctgcccctggaggatggcggcagccacaagagcaagaagatgaagcccctgtatgtgaacacagagaccctgaccctgcgggagccagatggcctgaagatgaagctgatcctgagccccaaggagaagggcagcagctctgtggatgaggagagcttccagtaccccagccagcaggccaccgtgaagaagagcagcaagaagagcgccagagatgagcagggcgccctgctgctgggccacgagctgcagagcttcctgaagacagccaggaagaagcacaagagcagcagtgatgcccacagcagccctggccctgagggctgcggcagtgatgccagccagtttgctgagagccacagcgccaacctggacctgagcggcctggagcccatcctggtggagagtgacagcagcagtggaggagagctggaggccggggagctggtgattgatgacagctaccgggagatcaagaagaagaagaagagcaagaagagcaagaagaagaaggacaaggagaagcacaaggagaagaggcacagcaagagcaagaggagcctgggcctgtctgctgtgcctgtgggggaggtgacagtgaccagcggccccccacccagcatcccctatgctggagctgctgccccacccctgcccctgcccggcctgcacacagatggccacagcgagaagaagaagaagaaggaggagaaggacaaggagcgggagcggggggagaagcccaagaagaagaacatgtctgcctaccaggtgttctgcaaggagtacagagtgaccatcgtggccgaccaccctggcatcgactttggagagctgagcaagaagctggccgaggtgtggaagcagctgcctgagaaggacaagctgatctggaagcagaaggcccagtacctgcagcacaagcagaacaaggccgaggccaccaccgtgaagaggaaggccagcagcagcgagggctccatgaaggtgaaggccagctctgtgggcgtgctgagcccccagaagaagagcccccccaccaccatgctgctgcctgccagccctgccaaggcccctgagacagagcccattgatgtggccgcccacctgcagctgctgggggagagcctgagcctgattggccaccggctgcaggagacagagggcatggtggccgtgtctggcagcctgtctgtgctgctggacagcatcatctgtgccctgggccccctggcctgcctgaccacccagctgcctgagctgaatggctgccccaagcaggtgctgagcaacaccctggacaacatcgcctacatcatgcctggcctgtag

SEQ ID NO: 295827 - DNA, 1479 bp, Artificial Sequence
  derived and/or modified sequence
atggacctgctgaaggccatcaccagccccctggccgccggcagcaagccctctaaaaaaaccggagaaaagtccagcggttcaagctcgcatagtgaaagcaagaaggagcaccacaggaagaaggtctccggatcgagcggcgaattgccactggaggatggaggaagccacaagtctaaaaagatgaagccattatatgtcaacacagaaaccctcactctgagggagccagacggtttaaaaatgaagctcatcttgtccccaaaagagaagggtagcagctctgtggatgaagagtcctttcagtaccctagccagcaagccaccgttaaaaagtcctcaaaaaagtccgcgagagacgaacagggtgccctgttactgggtcacgaattgcagtcctttttgaaaaccgctagaaaaaagcataagtctagctcagacgctcacagttccccgggccctgaggggtgtgggtccgacgctagtcaattcgccgagtcccattcagccaacctcgacctctccggactggaaccaatattggttgaaagtgactcctcatctggcggtgagcttgaggctggcgagcttgtcattgacgattcttacagggaaatcaaaaaaaaaaagaagagcaaaaagtcaaaaaagaagaaggacaaagagaagcataaggaaaagaggcactccaagtctaagcgaagtttgggcctatcggctgtgccagtaggtgaagtaaccgtgacctccgggcctccaccttcaattccatatgccggcgcagccgctccacccctgccgctgccagggctccacacagacggacacagtgaaaagaagaagaaaaaggaagaaaaagataaggaacgagaacgaggcgaaaagcctaagaagaagaatatgagcgcatatcaggtattctgtaaggagtacagagttactatcgtagctgatcacccaggcatagattttggcgagctttccaagaagctggcggaggtctggaagcaattacccgagaaggataagctgatttggaagcagaaagcccagtacctgcagcacaagcagaacaaagccgaagcgactactgtaaagagaaaggcttcatcttcagagggatctatgaaagtaaaggcctcaagtgtgggcgtcttgagccctcagaagaaatccccgcccacaaccatgcttttacctgcttctcccgcaaaggcaccggaaacagagcccatagacgtcgcagcccacctccagctgctcggcgagtccctgagcttgattggccatcgcctccaggagacagagggaatggtggcagtgtcaggaagtctcagcgttcttctggactcaattatatgcgcactaggccccctcgcgtgccttaccacgcagctgcctgaactgaatggctgtcccaagcaggtcctgtccaatactctggacaacatcgcctacatcatgccagggctttag

SEQ ID NO: 295828 - DNA, 1479 bp, Artificial Sequence
  derived and/or modified sequence
atggatttgctcaaggctattacgtcacccttagcggcaggtagcaaaccttcgaagaagactggcgaaaagtcaagtggcagcagcagtcattccgaaagcaagaaggagcatcatcgcaagaaggtttctggcagttccggcgagctccctcttgaagacggcggatctcataaatccaagaaaatgaagcctctctacgtgaacacagagacacttactcttagggaacccgacgggcttaagatgaagcttatcctctctccgaaggagaagggatcaagctctgtggatgaggagtcctttcagtaccccagtcagcaagcaaccgtcaaaaaatcaagcaagaagtctgctagagatgagcagggcgctctgctgctaggccacgagctccaatccttcctgaagacggctcggaagaaacacaagagttccagtgatgcccatagctcgccagggccagaaggctgtggaagcgacgcttcccagttcgcagagagccattccgctaatctggatctgtcaggcctagagcccattctcgttgaatcggacagtagctccggtggcgaactggaggctggtgagttggtcattgacgattcctatcgtgaaatcaaaaagaaaaaaaaatctaaaaagagcaagaaaaaaaaagacaaagaaaagcataaggagaagagacactccaaaagcaagagaagcttgggcctgagcgcagtgccggtgggagaggtgacagtgacaagcggaccccctcctagcattccctacgccggagccgctgccccaccactccccctgcccggtctccacactgacgggcactctgaaaagaagaagaagaaggaggaaaaggataaggagagagagaggggggagaaacctaaaaaaaaaaacatgtcagcctaccaggtgttttgtaaagagtaccgcgtgacaattgtggcggatcaccccggaatcgacttcggcgaactttcaaaaaagcttgcagaagtgtggaagcagctgcccgaaaaagataagctcatttggaagcaaaaagcacagtacctgcagcacaagcagaataaggctgaagctacgacggttaagcgaaaagcctcatccagtgaggggagcatgaaagtcaaggcgagcagcgtcggcgtgctgagcccacagaagaaatcacctcccaccaccatgttactgcctgcctcacccgctaaagcacctgagaccgaacctattgatgttgctgctcatttacaattgcttggagagagccttagcctaatcggtcatcgcctccaggagacagaggggatggtcgccgtgtcaggctccctgagcgtattgctcgattccataatttgtgccctgggaccccttgcttgcctgactacccagcttcccgaactgaacggctgtccaaaacaggttttaagcaatacccttgataacatagcgtacattatgcccggtttgtag

SEQ ID NO: 295829 - DNA, 1479 bp, Artificial Sequence
  derived and/or modified sequence
atggacctgctgaaggccatcaccagccccctggccgccggcagcaagcccagcaagaagaccggcgagaagagcagcggcagcagcagccacagcgagagcaagaaggagcaccacagaaagaaggtgagcggcagcagcggcgagctgcccctggaggacggcggcagccacaagagcaagaagatgaagcccctgtacgtgaacaccgagaccctgaccctgagagagcccgacggcctgaagatgaagctgatcctgagccccaaggagaagggcagcagcagcgtggacgaggagagcttccagtaccccagccagcaggccaccgtgaagaagagcagcaagaagagcgccagagacgagcagggcgccctgctgctgggccacgagctgcagagcttcctgaagaccgccagaaagaagcacaagagcagcagcgacgcccacagcagccccggccccgagggctgcggcagcgacgccagccagttcgccgagagccacagcgccaacctggacctgagcggcctggagcccatcctggtggagagcgacagcagcagcggcggcgagctggaggccggcgagctggtgatcgacgacagctacagagagatcaagaagaagaagaagagcaagaagagcaagaagaagaaggacaaggagaagcacaaggagaagagacacagcaagagcaagagaagcctgggcctgagcgccgtgcccgtgggcgaggtgaccgtgaccagcggccccccccccagcatcccctacgccggcgccgccgccccccccctgcccctgcccggcctgcacaccgacggccacagcgagaagaagaagaagaaggaggagaaggacaaggagagagagagaggcgagaagcccaagaagaagaacatgagcgcctaccaggtgttctgcaaggagtacagagtgaccatcgtggccgaccaccccggcatcgacttcggcgagctgagcaagaagctggccgaggtgtggaagcagctgcccgagaaggacaagctgatctggaagcagaaggcccagtacctgcagcacaagcagaacaaggccgaggccaccaccgtgaagagaaaggccagcagcagcgagggcagcatgaaggtgaaggccagcagcgtgggcgtgctgagcccccagaagaagagcccccccaccaccatgctgctgcccgccagccccgccaaggcccccgagaccgagcccatcgacgtggccgcccacctgcagctgctgggcgagagcctgagcctgatcggccacagactgcaggagaccgagggcatggtggccgtgagcggcagcctgagcgtgctgctggacagcatcatctgcgccctgggccccctggcctgcctgaccacccagctgcccgagctgaacggctgccccaagcaggtgctgagcaacaccctggacaacatcgcctacatcatgcccggcctgtag

SEQ ID NO: 295830 - protein, 285 aa, Artificial Sequence
  derived and/or modified sequence
MKEDQVVAEEPGFQDEEESLFQDIDLLQKHGINVADIKKLKSVGICTIKGIQMTTRRALCNVKGLSEAKVDKIKEAANKLIEPGFLTAFEYSEKRKMVFHITTGSQEFDKLLGGGIESMAITEAFGEFRTGKTQLSHTLCGEHQMELLDYVAAKFHEEAGIFKLLIIDSIMALFRVDFSGRGELAERQQKLAQMLSRLQKISEEYNVAVFVTNQMTADPGATMTFQADPKKPIGGHILAHASTTRISLRKGRGELRIAKIYDSPEMPENEATFAITAGGIGDAKE

SEQ ID NO: 295831 - protein, 203 aa, Artificial Sequence
  derived and/or modified sequence
MKEDQVVAEEPGFQDEEESLFQDIDLLQKHGINVADIKKLKSVGICTIKGIQMTTRRALCNVKGLSEAKVDKIKEAANKLIEPGFLTAFEYSEKRKMVFHITTGSQEFDKLLGGGIESMAITEAFGEFRTGKTQLSHTLCGEHQMELLDYVAAKFHEEAGIFKLLIIDSIMALFRVDFSGRGELAERQQKLAQMLSRLQKISE

SEQ ID NO: 295832 - DNA, 420 bp, Artificial Sequence
  derived and/or modified sequence
atgaaggaggaccaggtggtggccgaggagcccggcttccaggacgaggaggagagcctgttccaggacatcgacctgctgcagaagcacggcatcaacgtggccgacatcaagaagctgaagagcgtgggcatctgcaccatcaagggcatccagatgaccaccagaagagccctgtgcaacgtgaagggcctgagcgaggccaaggtggacaagatcaaggaggccgccaacaagctgatcgagcccggcttcctgaccgccttcgagtacagcgagaagagaaagatggtgttccacatcaccaccggcagccaggagttcgacaagctgctgggcggcggcatcgagagcatggccatcaccgaggccttcggcgagttcagaaccggcaagacccagctgagccacaccctgtag

SEQ ID NO: 295833 - DNA, 858 bp, Artificial Sequence
  derived and/or modified sequence
atgaaggaggaccaggtggtggccgaggagcccggcttccaggacgaggaggagagcctgttccaggacatcgacctgctgcagaagcacggcatcaacgtggccgacatcaagaagctgaagagcgtgggcatctgcaccatcaagggcatccagatgaccaccagaagagccctgtgcaacgtgaagggcctgagcgaggccaaggtggacaagatcaaggaggccgccaacaagctgatcgagcccggcttcctgaccgccttcgagtacagcgagaagagaaagatggtgttccacatcaccaccggcagccaggagttcgacaagctgctgggcggcggcatcgagagcatggccatcaccgaggccttcggcgagttcagaaccggcaagacccagctgagccacaccctgtgcggcgagcaccagatggagctgctggactacgtggccgccaagttccacgaggaggccggcatcttcaagctgctgatcatcgacagcatcatggccctgttcagagtggacttcagcggcagaggcgagctggccgagagacagcagaagctggcccagatgctgagcagactgcagaagatcagcgaggagtacaacgtggccgtgttcgtgaccaaccagatgaccgccgaccccggcgccaccatgaccttccaggccgaccccaagaagcccatcggcggccacatcctggcccacgccagcaccaccagaatcagcctgagaaagggcagaggcgagctgagaatcgccaagatctacgacagccccgagatgcccgagaacgaggccaccttcgccatcaccgccggcggcatcggcgacgccaaggagtag

SEQ ID NO: 295834 - DNA, 612 bp, Artificial Sequence
  derived and/or modified sequence
atgaaggaggaccaggtggtggccgaggagcccggcttccaggacgaggaggagagcctgttccaggacatcgacctgctgcagaagcacggcatcaacgtggccgacatcaagaagctgaagagcgtgggcatctgcaccatcaagggcatccagatgaccaccagaagagccctgtgcaacgtgaagggcctgagcgaggccaaggtggacaagatcaaggaggccgccaacaagctgatcgagcccggcttcctgaccgccttcgagtacagcgagaagagaaagatggtgttccacatcaccaccggcagccaggagttcgacaagctgctgggcggcggcatcgagagcatggccatcaccgaggccttcggcgagttcagaaccggcaagacccagctgagccacaccctgtgcggcgagcaccagatggagctgctggactacgtggccgccaagttccacgaggaggccggcatcttcaagctgctgatcatcgacagcatcatggccctgttcagagtggacttcagcggcagaggcgagctggccgagagacagcagaagctggcccagatgctgagcagactgcagaagatcagcgagtag

SEQ ID NO: 295835 - DNA, 569 bp, Artificial Sequence
  derived and/or modified sequence
ctcatctttccaagctaaatgcttctcttactgtccttctagtccttgttgactttgaaatgaaatcagaggcccctggacaaaggactacttcttacataatatttcttattttcccagaagtgattatttttctgttgcccacttttcaatatgaaggaggatcaagttgtggcggaagaaccaggattccaagatgaagaggaatctttgtttcaagatattgacctgttacagaaacatggaattaacgtggctgacattaagaaactgaaatcagtaggaatctgtaccatcaaaggtatacagatgacaacaagaagagctctatgcaatgtcaaaggactctcagaagccaaagtagacaagattaaagaggcagcgaacaaactaattgaaccaggattcttgactgcatttgagtatagtgaaaagaggaaaatggttttccatatcaccaccgggagccaggaatttgataagttactaggaggtggaattgaaagtatggcaattacagaagcttttggagaatttcgtactggaaaaacccagctttctcataccct

SEQ ID NO: 295836 - DNA, 1056 bp, Artificial Sequence
  derived and/or modified sequence
ctcatctttccaagctaaatgcttctcttactgtccttctagtccttgttgactttgaaatgaaatcagaggcccctggacaaaggactacttcttacataatatttcttattttcccagaagtgattatttttctgttgcccacttttcaatatgaaggaggatcaagttgtggcggaagaaccaggattccaagatgaagaggaatctttgtttcaagatattgacctgttacagaaacatggaattaacgtggctgacattaagaaactgaaatcagtaggaatctgtaccatcaaaggtatacagatgacaacaagaagagctctatgcaatgtcaaaggactctcagaagccaaagtagacaagattaaagaggcagcgaacaaactaattgaaccaggattcttgactgcatttgagtatagtgaaaagaggaaaatggttttccatatcaccaccgggagccaggaatttgataagttactaggaggtggaattgaaagtatggcaattacagaagcttttggagaatttcgtactggaaaaacccagctttctcataccctctgtggtgaacatcagatggagctacttgattatgtagcagcaaagttccatgaagaagctggcatcttcaagctattgattatcgattcaataatggcactttttcgagtggatttcagtggccgtggggagttggccgaacggcagcaaaaattggcccagatgttgtcacgactccaaaaaatctcagaagaatataacgtggctgtttttgtgaccaatcaaatgactgccgatccaggagcaactatgacctttcaggcagatcccaaaaaacccattgggggacacattctggctcatgcttcaacaacaagaataagcttgcgaaagggaagaggagagctcagaattgccaagatttatgacagtcctgagatgcctgaaaatgaagccaccttcgcaataactgctggaggaattggggatgccaaggagtaggtggtgaattgatgcaaattgcttcttagtgcttattaggagctg

SEQ ID NO: 295837 - DNA, 721 bp, Artificial Sequence
  derived and/or modified sequence
ccgagttagaatcctgtcagctgaggaggtcgggcggggcagaggggcttcaccttgaaaatctcggggagactgtggaagtgattatttttctgttgcccacttttcaatatgaaggaggatcaagttgtggcggaagaaccaggattccaagatgaagaggaatctttgtttcaagatattgacctgttacagaaacatggaattaacgtggctgacattaagaaactgaaatcagtaggaatctgtaccatcaaaggtatacagatgacaacaagaagagctctatgcaatgtcaaaggactctcagaagccaaagtagacaagattaaagaggcagcgaacaaactaattgaaccaggattcttgactgcatttgagtatagtgaaaagaggaaaatggttttccatatcaccaccgggagccaggaatttgataagttactaggaggtggaattgaaagtatggcaattacagaagcttttggagaatttcgtactggaaaaacccagctttctcataccctctgtggtgaacatcagatggagctacttgattatgtagcagcaaagttccatgaagaagctggcatcttcaagctattgattatcgattcaataatggcactttttcgagtggatttcagtggccgtggggagttggccgaacggcagcaaaaattggcccagatgttgtcacgactccaaaaaatctcagaag

SEQ ID NO: 295838 - DNA, 420 bp, Artificial Sequence
  derived and/or modified sequence
atgaaagaagatcaggttgttgctgaggagcccggcttccaggacgaggaggaatccttgttccaggatatcgatctgctccagaaacatggaataaatgtggctgatattaagaaattgaagagcgtgggaatctgcaccatcaagggcatccagatgacaactcgacgcgccctatgcaacgtgaaaggcctgtctgaagcgaaagttgacaaaatcaaggaggctgctaacaaactaattgagcctggcttcctaactgcttttgagtacagtgagaagcgaaagatggtgttccatatcaccactggcagccaggagttcgataaactcctgggcggtggtatcgaaagcatggccataacggaagcctttggcgaatttcggaccggaaaaactcagctctcgcacacactgtag

SEQ ID NO: 295839 - DNA, 858 bp, Artificial Sequence
  derived and/or modified sequence
atgaaggaagaccaggttgtcgccgaggagcctggctttcaggatgaagaggaatctcttttccaggatatcgatctcctccagaaacatggtatcaatgtggctgatatcaagaagctgaagtcagtcggtatctgtacgattaagggaatacaaatgaccactcgccgcgccctctgcaacgtcaagggtctgagtgaagcaaaagtcgacaaaattaaggaggccgccaacaagctgatagagccaggattcctgactgcgtttgaatattcagagaagcggaaaatggtcttccacattaccacaggtagccaggagttcgacaaactgcttggggggggcatcgagagtatggctatcaccgaagctttcggcgaattccggacgggaaagactcagctgtcccacacattgtgtggagagcatcagatggaactgctagattacgtcgcggcgaaatttcacgaagaagccggaattttcaagctcctaatcatcgacagtatcatggccctttttagggtggatttctcaggacgcggggagctggccgagaggcaacaaaagctcgcccaaatgctttccagactgcagaagatcagtgaggagtacaacgtggccgtctttgtgactaatcagatgactgccgaccccggcgctacaatgacattccaggccgatcccaaaaaaccaatcggaggacacatactcgctcacgctagtacaactcgcatatccctgcgcaaagggaggggcgagctccgaattgccaagatatacgactctcctgagatgcctgagaacgaggccaccttcgctatcactgccgggggcatcggggacgcaaaagagtag

SEQ ID NO: 295840 - DNA, 612 bp, Artificial Sequence
  derived and/or modified sequence
atgaaggaagaccaggtggttgccgaagaacctgggttccaagacgaagaggaaagcctctttcaggatatcgacctgttacaaaaacatggtattaacgtcgcagacatcaaaaaactgaagtctgtgggtatttgtaccattaaagggatacaaatgaccactcgtcgtgccttgtgcaacgtgaaaggactgtcagaggccaaggtcgataaaattaaggaagcggctaataagcttatagaacctggctttctaaccgctttcgagtattctgagaagaggaaaatggtgtttcacatcaccactggctctcaagagtttgataaactgcttgggggcgggatcgaaagtatggctataaccgaggcctttggcgaattcaggacgggcaagacacagctgtcccacacactgtgcggtgagcaccagatggaactgctggattatgtcgccgctaagtttcacgaggaggctggaatttttaaactactaatcatcgactctatcatggcccttttccgcgtagatttttccgggcgcggggaactcgcagaacgccaacagaagctcgcccaaatgttgtcccgcctccagaaaatctccgagtag

SEQ ID NO: 295841 - DNA, 420 bp, Artificial Sequence
  derived and/or modified sequence
atgaaggaggaccaggtggtggccgaggagcccggcttccaggatgaggaggagagcctcttccaggacatcgacctgctgcagaagcacggcatcaacgtggccgacatcaagaagctgaagtctgtgggcatctgcaccatcaagggcatccagatgaccacccggcgggccctgtgcaatgtgaagggcctgtctgaggccaaggtggacaagatcaaggaggccgccaacaagctgattgagcccggcttcctgacagcctttgagtacagcgagaagaggaagatggtgttccacatcaccaccggcagccaggagtttgacaagctgctgggcggcggcatcgagagcatggccatcacagaggcctttggagagttcagaacaggcaagacccagctgagccacaccctgtag

SEQ ID NO: 295842 - DNA, 858 bp, Artificial Sequence
  derived and/or modified sequence
atgaaggaggaccaggtggtggccgaggagcccggcttccaggatgaggaggagagcctcttccaggacatcgacctgctgcagaagcacggcatcaacgtggccgacatcaagaagctgaagtctgtgggcatctgcaccatcaagggcatccagatgaccacccggcgggccctgtgcaatgtgaagggcctgtctgaggccaaggtggacaagatcaaggaggccgccaacaagctgattgagcccggcttcctgacagcctttgagtacagcgagaagaggaagatggtgttccacatcaccaccggcagccaggagtttgacaagctgctgggcggcggcatcgagagcatggccatcacagaggcctttggagagttcagaacaggcaagacccagctgagccacaccctgtgtggggagcaccagatggagctgctggactatgtggccgccaagttccacgaggaggccggcatcttcaagctgctgatcatcgacagcatcatggccctcttccgggtggacttcagcggccgcggggagctggccgagcggcagcagaagctggcccagatgctgagccggctgcagaagatcagcgaggagtacaacgtggccgtgtttgtgaccaaccagatgacagctgaccccggggccaccatgaccttccaggccgaccccaagaagcccatcggcggccacatcctggcccacgccagcaccacccgcatcagcctgaggaagggccgcggggagctgagaattgccaagatctatgacagccctgagatgccagaaaatgaggccacctttgccatcacagctgggggcattggagatgccaaggagtag

SEQ ID NO: 295843 - DNA, 612 bp, Artificial Sequence
  derived and/or modified sequence
atgaaggaggaccaggtggtggccgaggagcccggcttccaggatgaggaggagagcctcttccaggacatcgacctgctgcagaagcacggcatcaacgtggccgacatcaagaagctgaagtctgtgggcatctgcaccatcaagggcatccagatgaccacccggcgggccctgtgcaatgtgaagggcctgtctgaggccaaggtggacaagatcaaggaggccgccaacaagctgattgagcccggcttcctgacagcctttgagtacagcgagaagaggaagatggtgttccacatcaccaccggcagccaggagtttgacaagctgctgggcggcggcatcgagagcatggccatcacagaggcctttggagagttcagaacaggcaagacccagctgagccacaccctgtgtggggagcaccagatggagctgctggactatgtggccgccaagttccacgaggaggccggcatcttcaagctgctgatcatcgacagcatcatggccctcttccgggtggacttcagcggccgcggggagctggccgagcggcagcagaagctggcccagatgctgagccggctgcagaagatcagcgagtag

SEQ ID NO: 295844 - DNA, 420 bp, Artificial Sequence
  derived and/or modified sequence
atgaaggaggaccaggtggtggccgaggagcccggcttccaggacgaggaggagagcctgttccaggatatagatctcctccagaaacatggcattaacgttgcagacattaagaaactgaaatccgttgggatctgtaccattaaaggcattcaaatgaccacacgccgggcactctgcaacgtgaaaggattatcagaagcaaaggttgacaaaattaaggaggcagcgaataaattgatcgagcctggttttctgacagcctttgaatactccgagaagcgcaaaatggtctttcatattacgaccggcagccaggagtttgacaaactcctggggggtggcatagaatcaatggcaatcactgaggcttttggtgagttccgaacaggtaagacgcaactgtcacacacgctatag

SEQ ID NO: 295845 - DNA, 858 bp, Artificial Sequence
  derived and/or modified sequence
atgaaggaggaccaggtggtggccgaggagcccggcttccaggacgaggaagaaagcctgttccaagatatagatttgttgcagaaacacgggattaacgtggcagacattaaaaagttaaagagcgtagggatatgtacaattaaagggattcagatgacaacgcggcgcgccttatgtaatgtcaagggtttatccgaagccaaggtggacaaaattaaggaggctgccaacaagctgatagagccaggctttctcaccgcgttcgaatacagcgaaaagcggaagatggtctttcacattacgaccgggagccaggagttcgacaagctcctcgggggcggcatcgaatcaatggcaataaccgaggcttttggagagtttaggaccggaaaaacgcagctaagtcacaccttgtgcggagagcatcaaatggagctgttagattacgttgcagctaaattccatgaagaggctggaatcttcaagctactgatcatagatagcattatggctctcttcagagtcgattttagcggtcgaggagagctggcagagcgacaacagaagctggcacagatgctcagtagactccagaagatttctgaggagtacaacgttgccgtgtttgtaaccaaccagatgaccgccgaccccggggcaaccatgaccttccaagctgatcccaaaaagcccataggaggccacatactggcccacgcttcaacgactagaattagcctcagaaagggacgcggagagttacggattgccaaaatctacgacagtccagagatgcccgagaatgaagccacattcgctattactgccggtggcattggggacgcaaaagagtag

SEQ ID NO: 295846 - DNA, 612 bp, Artificial Sequence
  derived and/or modified sequence
atgaaggaggaccaggtggtggccgaggagcccggcttccaggacgaggaggaaagcctctttcaggacatcgacctactccaaaaacacgggatcaacgtggcagatatcaaaaaattgaaaagcgtcggtatttgcactattaaagggattcagatgaccacacggcgcgccttatgtaacgtcaaaggcctatctgaagcgaaggttgacaagattaaggaggccgcaaataaactgattgaacctggatttctgacagcgttcgaatatagtgagaaacgtaagatggtgtttcatataactacaggaagtcaggaattcgataaactcctgggcggcggtattgagagtatggccatcacagaggcatttggcgagttccgaacaggcaaaacccaactttcccatacgctgtgtggcgagcatcagatggagttgttggactacgttgccgccaagttccacgaggaggctgggattttcaaattgttgatcattgattccattatggccctgtttagagtggatttctcaggaagaggtgagcttgccgaacgtcaacagaagttggcacagatgctttccaggctccaaaagattagcgagtag

SEQ ID NO: 295847 - DNA, 420 bp, Artificial Sequence
  derived and/or modified sequence
atgaaggaggaccaggtcgtggctgaagaacctggcttccaagacgaagaggagtctttgtttcaagatatcgacttgctgcagaagcatggtataaatgtggcagacatcaagaaactgaagtcagtggggatttgcactatcaaaggcatccagatgaccacaaggagggctctgtgtaacgttaagggtcttagcgaggccaaagtcgacaaaattaaagaggctgctaataaactgatcgagcccggattcttaaccgcctttgagtattccgagaagagaaaaatggtctttcacatcacaaccgggtcacaagaatttgacaagttactcggcggaggtatagagtccatggccattaccgaagcttttggggaattcaggaccggaaaaacacagctgtcacataccctttag

SEQ ID NO: 295848 - DNA, 858 bp, Artificial Sequence
  derived and/or modified sequence
atgaaggaggaccaggttgtagcagaggagcctggattccaagatgaggaagagtctctgttccaagatatcgatctgctccagaagcacggtattaacgtagctgacattaaaaaactgaaatccgtcgggatctgcactatcaaaggaatccagatgaccactcggagagctctctgcaatgtaaagggtctgagcgaggcaaaggtggataagatcaaagaagcggctaacaaacttatcgagcctggattcctcacagccttcgagtactctgaaaagagaaaaatggtgttccatatcactactggatcccaggaattcgataaactactgggaggcggtatagagtctatggcaattaccgaggcattcggggaatttaggacaggcaaaacacaactgtcccacacactctgcggcgagcaccaaatggagctcctggattacgtcgccgctaaattccatgaagaggccggtattttcaaacttctcatcatcgattctattatggctttgtttagagtggacttctcgggacgtggagagcttgcagagcgccaacagaagctggcacaaatgctctccagactgcagaaaatttcagaggaatacaatgtagcggtgtttgtgacaaaccagatgactgctgaccctggcgctacaatgacatttcaggctgaccccaagaagccaatcggcggtcacatcttagcacacgcttctaccacgaggatcagcttgcgtaaaggaaggggagaactgagaatagccaagatttatgattctcccgagatgccagagaatgaggccacgttcgccatcacagctggtggaatcggtgacgccaaagagtag

SEQ ID NO: 295849 - DNA, 612 bp, Artificial Sequence
  derived and/or modified sequence
atgaaggaggatcaggttgttgcggaagagcccggattccaggatgaggaggagtctctgtttcaggacatcgatcttctgcagaagcatggcatcaatgtggccgacatcaaaaagctcaagagcgtcggcatctgtactattaaagggattcaaatgactacccgtcgtgccctgtgtaatgtgaaaggactttccgaggccaaggtggataaaatcaaggaggctgccaacaagctcatcgaaccaggctttctgaccgcctttgagtactcggagaagagaaaaatggttttccacatcaccaccggcagtcaggagttcgataagttactaggaggcggaattgagtctatggccataacagaggccttcggggagtttcgcacgggcaaaacgcaactgtcacacacactttgtggcgagcatcagatggagctgctggactatgtagcagccaagtttcacgaagaggccggaatattcaagcttttaatcatcgacagtatcatggccctctttagagtggatttctcggggaggggtgagctggccgagcgccaacagaagctggcccagatgctgtcacgcctccagaagataagcgaatag

SEQ ID NO: 295850 - protein, 226 aa, Artificial Sequence
  derived and/or modified sequence
MSRESDVEAQQSHGSSACSQPHGSVTQSQGSSSQSQGISSSSTSTMPNSSQSSHSSSGTLSSLETVSTQELYSIPPEVLVSVGTAGYNRAVDCWSLGVILFICLSGYPPFSEHRTQVSLKDQITSGKYNFIPEVWAEVSEKALDLVKKLLVVDPKARFTTEEALRHPWLQDEDMKRKFQDLLSEENESTALPQVLAQPSTSRKRPREGEAEGAETTKRPAVCAAVL

SEQ ID NO: 295851 - protein, 141 aa, Artificial Sequence
  derived and/or modified sequence
MPVAEAPQVAGGQGDGGDGEEAEPEGMFKACEDSKRKARGYLRLVPLFVLLALLVLASAGVLLWYFLGYKAEVMVSQVYSGSLRVLNRHFSQDLTRRESSAFRSETAKAQKMLKELITSTRLGTYYNSSSVYSFGEGPLTC

SEQ ID NO: 295852 - DNA, 2409 bp, Artificial Sequence
  derived and/or modified sequence
atgcccgtggccgaggccccccaggtggccggcggccagggcgacggcggcgacggcgaggaggccgagcccgagggcatgttcaaggcctgcgaggacagcaagagaaaggccagaggctacctgagactggtgcccctgttcgtgctgctggccctgctggtgctggccagcgccggcgtgctgctgtggtacttcctgggctacaaggccgaggtgatggtgagccaggtgtacagcggcagcctgagagtgctgaacagacacttcagccaggacctgaccagaagagagagcagcgccttcagaagcgagaccgccaaggcccagaagatgctgaaggagctgatcaccagcaccagactgggcacctactacaacagcagcagcgtgtacagcttcggcgagggccccctgacctgcttcttctggttcatcctgcagatccccgagcacagaagactgatgctgagccccgaggtggtgcaggccctgctggtggaggagctgctgagcaccgtgaacagcagcgccgccgtgccctacagagccgagtacgaggtggaccccgagggcctggtgatcctggaggccagcgtgaaggacatcgccgccctgaacagcaccctgggctgctacagatacagctacgtgggccagggccaggtgctgagactgaagggccccgaccacctggccagcagctgcctgtggcacctgcagggccccaaggacctgatgctgaagctgagactggagtggaccctggccgagtgcagagacagactggccatgtacgacgtggccggccccctggagaagagactgatcaccagcgtgtacggctgcagcagacaggagcccgtggtggaggtgctggccagcggcgccatcatggccgtggtgtggaagaagggcctgcacagctactacgaccccttcgtgctgagcgtgcagcccgtggtgttccaggcctgcgaggtgaacctgaccctggacaacagactggacagccagggcgtgctgagcaccccctacttccccagctactacagcccccagacccactgcagctggcacctgaccgtgcccagcctggactacggcctggccctgtggttcgacgcctacgccctgagaagacagaagtacgacctgccctgcacccagggccagtggaccatccagaacagaagactgtgcggcctgagaatcctgcagccctacgccgagagaatccccgtggtggccaccgccggcatcaccatcaacttcaccagccagatcagcctgaccggccccggcgtgagagtgcactacggcctgtacaaccagagcgacccctgccccggcgagttcctgtgcagcgtgaacggcctgtgcgtgcccgcctgcgacggcgtgaaggactgccccaacggcctggacgagagaaactgcgtgtgcagagccaccttccagtgcaaggaggacagcacctgcatcagcctgcccaaggtgtgcgacggccagcccgactgcctgaacggcagcgacgaggagcagtgccaggagggcgtgccctgcggcaccttcaccttccagtgcgaggacagaagctgcgtgaagaagcccaacccccagtgcgacggcagacccgactgcagagacggcagcgacgaggagcactgcgactgcggcctgcagggccccagcagcagaatcgtgggcggcgccgtgagcagcgagggcgagtggccctggcaggccagcctgcaggtgagaggcagacacatctgcggcggcgccctgatcgccgacagatgggtgatcaccgccgcccactgcttccaggaggacagcatggccagcaccgtgctgtggaccgtgttcctgggcaaggtgtggcagaacagcagatggcccggcgaggtgagcttcaaggtgagcagactgctgctgcacccctaccacgaggaggacagccacgactacgacgtggccctgctgcagctggaccaccccgtggtgagaagcgccgccgtgagacccgtgtgcctgcccgccagaagccacttcttcgagcccggcctgcactgctggatcaccggctggggcgccctgagagagggcggccccatcagcaacgccctgcagaaggtggacgtgcagctgatcccccaggacctgtgcagcgaggtgtacagataccaggtgacccccagaatgctgtgcgccggctacagaaagggcaagaaggacgcctgccagggcgacagcggcggccccctggtgtgcaaggccctgagcggcagatggttcctggccggcctggtgagctggggcctgggctgcggcagacccaactacttcggcgtgtacaccagaatcaccggcgtgatcagctggatccagcaggtggtgacctag

SEQ ID NO: 295853 - DNA, 426 bp, Artificial Sequence
  derived and/or modified sequence
atgcccgtggccgaggccccccaggtggccggcggccagggcgacggcggcgacggcgaggaggccgagcccgagggcatgttcaaggcctgcgaggacagcaagagaaaggccagaggctacctgagactggtgcccctgttcgtgctgctggccctgctggtgctggccagcgccggcgtgctgctgtggtacttcctgggctacaaggccgaggtgatggtgagccaggtgtacagcggcagcctgagagtgctgaacagacacttcagccaggacctgaccagaagagagagcagcgccttcagaagcgagaccgccaaggcccagaagatgctgaaggagctgatcaccagcaccagactgggcacctactacaacagcagcagcgtgtacagcttcggcgagggccccctgacctgctag

SEQ ID NO: 295854 - DNA, 2409 bp, Artificial Sequence
  derived and/or modified sequence
atgcctgtggctgaggccccccaggttgcaggagggcagggagatggaggtgatggcgaggaagccgaaccagaaggcatgttcaaggcctgtgaagacagcaagcgaaaggctaggggatacctccgactggttcccttattcgttcttctggctctactcgtgctagcgtctgcaggcgtcctgctttggtactttttagggtataaagctgaggtgatggtgagtcaggtgtactctgggagtttgagagtgttgaataggcacttttcgcaagatctcacacggcgcgaatcctcagcttttagatccgaaaccgcgaaggcccagaagatgctcaaggaattgatcaccagcacccggctgggcacctattataactcttcatccgtctattcatttggcgaggggcccctcacctgtttcttctggttcattctgcagattccagagcatcgacggctcatgctttcgccggaagttgtgcaggccttgcttgttgaggagttattaagcaccgtaaacagttccgcagcggtgccttaccgggccgagtacgaggtcgacccagaaggactcgtcatcttggaagcctctgtcaaggacattgcagccctgaactccacgctgggatgttatcggtactcttacgtgggacaaggccaggtgctgaggctaaagggtccagatcatctggctagctcctgtctttggcacttgcagggacccaaggaccttatgctgaagctgcgcctggagtggacgcttgcagagtgccgggatagactggctatgtacgacgtcgctggtcctctagagaagaggctgatcacctcagtgtacggatgtagtagacaggagcctgtcgtggaggtgctggcatccggcgcaattatggcagttgtgtggaaaaaaggactgcatagctattatgatccatttgtgctgtccgtccagcccgtagtgttccaggcttgtgaagtcaatctgacattggataatcgcctggacagccagggcgtgctgtctaccccatatttcccttcttattactccccacaaactcactgctcctggcacctcacagtaccttccttagattatggtttggcactgtggttcgatgcttatgccttaagacgacaaaagtacgacttgccatgcacacagggacaatggaccatccagaacaggcgattgtgcggcctccggatcctgcagccatatgccgaacgtatcccggtggttgcaaccgctgggatcaccattaattttacttcgcagatctccttgacgggacccggagtgagggtccattacgggctctataatcagtccgacccttgtcctggagagttcctctgttcagtgaacggtttgtgcgtgccggcatgtgatggcgtgaaggattgtcccaacggactggatgaacgcaactgtgtctgtagagccactttccagtgcaaggaagacagcacttgcatcagtctgccaaaagtgtgtgacgggcagcctgattgcctgaatgggtcagacgaggagcaatgccaggaaggcgtgccctgtggtaccttcaccttccagtgtgaggatagatcctgcgtgaagaagcccaacccccaatgtgacgggcgtcccgactgcagggatggatcggatgaggagcattgtgattgcgggctacaggggcctagttcccgcatcgttgggggcgcggtctcttcggaaggggagtggccttggcaggcaagcctccaagttcgcggacggcacatttgcggcggcgcactcattgcagacaggtgggtcataacagcggcccactgttttcaggaggatagtatggcttccactgtgctgtggaccgtgtttctgggtaaagtgtggcaaaactccaggtggcccggcgaggtttcattcaaggtatctaggctgctcctgcatccgtatcatgaagaggattcccatgactacgatgtggccctgctgcagttggaccatccagtggtgagaagcgctgctgtaagaccagtctgtctgcctgcacggtctcattttttcgagcccggactgcattgctggattacgggatggggagccctgcgcgaaggggggccgattagcaacgcactccaaaaggtagacgtgcagcttatcccccaagatttatgctccgaagtgtatcggtatcaagtgacccctcgcatgctgtgcgctggctatcggaaaggcaaaaaggatgcttgtcagggcgattcgggggggccactcgtgtgtaaggctttgtctggcaggtggttcttggccggtctcgtgagctgggggcttggctgtggacggccaaactattttggtgtttatactcgaatcacaggcgtgatatcgtggatccagcaggtggtgacctag

SEQ ID NO: 295855 - DNA, 426 bp, Artificial Sequence
  derived and/or modified sequence
atgccagtagccgaagcaccacaggtggctggagggcagggcgatggaggtgatggcgaggaggcagaacccgaaggcatgtttaaggcgtgtgaggattccaagcgaaaggctagaggctaccttaggctcgttccccttttcgtgctgttggctcttcttgtacttgcgtccgccggagtccttctgtggtacttcctcggttataaggctgaggttatggtgtcacaggtttactccggttcactgagggttctgaaccggcacttttcacaagatctgacacggcgggaatcatccgcctttagaagcgaaactgccaaggcccagaagatgctcaaggagttgataacctccacacgcctggggacctactacaacagtagtagtgtgtattcgttcggcgaggggcccctgacttgttag

SEQ ID NO: 295856 - DNA, 2409 bp, Artificial Sequence
  derived and/or modified sequence
atgcctgtggccgaggccccccaggtggccggcggccagggagatggaggagatggagaggaggccgagcctgagggcatgttcaaggcctgtgaggacagcaagaggaaggcccggggctacctgcggctggtgcccctgtttgtgctgctggccctgctggtgctggccagcgctggggtgctgctgtggtacttcctgggctacaaggccgaggtgatggtgtcccaggtgtacagcggcagcctgcgggtgctgaacagacacttcagccaggacctgacccggcgggagagcagcgccttccgctcagaaacagccaaggcccagaagatgctgaaggagctgatcaccagcacccggctgggcacctactacaacagcagctctgtgtacagctttggagagggccccctgacctgcttcttctggttcatcctgcagatccctgagcaccggcggctgatgctgagccctgaggtggtgcaggccctgctggtggaggagctgctgagcacagtgaacagcagcgctgctgtgccctacagagcagaatatgaggtggaccctgagggcctggtgatcctggaggcctctgtgaaggacattgctgccctgaacagcaccctgggctgctaccgctacagctatgtgggccagggccaggtgctgcggctgaagggccctgaccacctggccagcagctgcctgtggcacctgcagggccccaaggacctgatgctgaagctgcggctggagtggaccctggccgagtgccgggaccggctggccatgtatgatgtggccggccccctggagaagaggctcatcacctctgtgtatggctgcagccggcaggagcctgtggtggaggtgctggccagcggggccatcatggctgtggtgtggaagaagggcctgcacagctactatgacccctttgtgctgtctgtgcagcctgtggtgttccaggcctgtgaggtgaacctgaccctggacaaccggctggacagccagggcgtgctgagcaccccctacttccccagctactacagcccccagacccactgctcctggcacctgactgtgcccagcctggactatggcctggccctgtggtttgatgcctatgccctgcggcggcagaagtatgacctgccctgcacccagggccagtggaccatccagaacagaaggctgtgtggcctgcgcatcctgcagccctatgcagagcgcatccctgtggtggccacagctggcatcaccatcaacttcaccagccagatcagcctgaccggccctggggtgcgggtgcactacggcctgtacaaccagagcgacccctgccctggagagttcctgtgcagcgtgaatggcctgtgtgtgcctgcctgtgatggagtgaaggactgccccaacggcctggatgagaggaactgtgtgtgccgggccaccttccagtgcaaggaggacagcacctgcatcagcctgcccaaggtgtgtgatggccagcctgactgcctgaatggaagtgatgaggagcagtgccaggagggcgtgccctgtggcaccttcaccttccagtgtgaggacaggagctgtgtgaagaagcccaacccccagtgtgatggccgcccagactgcagagatggcagtgatgaggagcactgtgactgtggcctgcagggccccagcagccgcatcgtgggcggcgctgtgtcctctgagggggagtggccctggcaggccagcctgcaggtgcggggccgccacatctgtggcggggccctgattgctgaccgctgggtgatcacagctgcccactgcttccaggaggacagcatggccagcacagtgctgtggacagtgttcctgggcaaggtgtggcagaacagccgctggccaggagaggtgtccttcaaggtgtcccggctgctgctgcacccctaccacgaggaggacagccatgactatgatgtggccctgctgcagctggaccaccctgtggtgcgctctgctgctgtgcggcctgtgtgcctgcctgcccggagccacttctttgagcccggcctgcactgctggatcaccggctggggcgccctgcgggagggcggccccatcagcaatgccctgcagaaggtggatgtgcagctgatcccccaggacctgtgcagcgaggtgtaccgctaccaggtgacccccaggatgctgtgtgccggctacaggaagggcaagaaggatgcctgccagggcgacagcggcggccccctggtgtgcaaggccctgagcggccgctggttcctggccggcctggtgtcctggggcctgggctgcggccggcccaactactttggagtgtacacccgcatcactggagtcatctcctggatccagcaggtggtgacctag

SEQ ID NO: 295857 - DNA, 426 bp, Artificial Sequence
  derived and/or modified sequence
atgcctgtggccgaggccccccaggtggccggcggccagggagatggaggagatggagaggaggccgagcctgagggcatgttcaaggcctgtgaggacagcaagaggaaggcccggggctacctgcggctggtgcccctgtttgtgctgctggccctgctggtgctggccagcgctggggtgctgctgtggtacttcctgggctacaaggccgaggtgatggtgtcccaggtgtacagcggcagcctgcgggtgctgaacagacacttcagccaggacctgacccggcgggagagcagcgccttccgctcagaaacagccaaggcccagaagatgctgaaggagctgatcaccagcacccggctgggcacctactacaacagcagctctgtgtacagctttggagagggccccctgacctgctag

SEQ ID NO: 295858 - DNA, 2409 bp, Artificial Sequence
  derived and/or modified sequence
atgcccgtggccgaggccccccaggtggccggcggccagggcgacggaggagacggtgaagaggccgaacctgaagggatgttcaaggcatgcgaggactctaagcgaaaagcccgtggttacctgaggctagttcctctgtttgtgctcctggctctgctggtgctagcctcagcaggcgtgttgctgtggtactttcttggctataaagccgaggttatggtaagccaggtgtacagcgggagtctccgcgtcttgaatagacatttcagtcaagatcttaccaggcgggaaagctctgctttccgctctgaaaccgccaaggcccagaaaatgctgaaagagctcatcacaagtacaaggttaggcacgtattacaattcaagtagtgtgtactcctttggtgagggccccttgacatgctttttctggttcatcttgcaaatcccagaacatcggcgcctgatgctctctccagaagtagtgcaggctctcctggtggaagagctgctgtccaccgttaattcctctgcagccgtgccctacagggccgaatacgaagtggatcccgaaggcctcgtcatcctagaagcttcagttaaggacattgccgccttgaattccacactgggatgctaccgatattcatacgttggccaggggcaagtactcagactgaaggggcctgaccaccttgcctcatcctgtctgtggcacctgcaaggtccaaaagacctcatgttgaagttacgcctcgaatggactctggcagagtgtagagatcgtttagccatgtacgacgtagcgggaccccttgagaaaaggctgattacctccgtgtacggctgctctagacaagagcccgtggtcgaggtgttagcttccggggctatcatggcagtggtctggaaaaagggcctacattcttactatgacccatttgtactctctgtccaacccgtagtctttcaggcatgtgaggtcaacctcaccctggataataggctcgattcccagggcgtactcagtaccccatattttccttcttactactctccgcaaactcactgttcttggcatctaacagtgccatcccttgattacggcctggccctgtggtttgacgcgtatgcactccgcagacaaaaatacgacttgccctgcacacagggacaatggaccatacagaaccggagactttgcggactgaggatactgcagccatacgctgaaagaattcctgtagtggccactgctggtattaccatcaacttcaccagccagatcagtttgacaggtcccggagttcgggtgcattacgggctgtacaaccagagtgatccctgccccggtgaatttctgtgctctgtgaatggcctgtgcgtgcccgcgtgcgacggcgtgaaagattgccctaacgggctcgacgagcgtaattgcgtctgccgggccacctttcagtgcaaagaggattccacgtgtatctctctgccaaaggtttgcgatgggcagccagactgtttaaatggctctgatgaggagcagtgtcaagaaggagttccttgtggaacattcacattccagtgtgaagaccgcagctgcgttaagaagcctaacccacagtgtgatggaaggccagactgtagagacggttcggacgaagaacactgcgattgcggcctgcagggaccctcttcacgcatcgtgggcggtgccgtgtcttctgagggagagtggccttggcaagcctcgctgcaggttagagggcgccatatttgtgggggcgcactgatagcagacagatgggtaatcacagccgcgcactgcttccaggaggatagtatggcatccaccgtcttatggactgtttttctgggaaaggtttggcaaaactcaagatggcctggggaggttagtttcaaggtttcgcgccttcttctccacccctaccatgaagaggattcccacgattacgacgttgcactgctgcaactagatcacccagttgttcggtccgctgccgttcgccctgtttgtcttccagctcgatcacactttttcgaaccaggccttcactgctggatcaccggatggggtgctctgcgcgagggcggccccatttcaaacgcattgcaaaaagtagatgtacaactaatcccgcaggacttatgttctgaggtgtatcggtatcaggtgacacctaggatgctctgtgctggatatagaaaggggaaaaaggatgcgtgtcagggagactccggcggccccttggtttgtaaggctctgtccgggcgatggttccttgcaggactcgtgagttggggattagggtgcggtaggcccaattattttggcgtatacacacgcataacgggcgtaatcagctggatccagcaggtcgtgacctag

SEQ ID NO: 295859 - DNA, 426 bp, Artificial Sequence
  derived and/or modified sequence
atgcccgtggccgaggccccccaggtggccggcggccagggcgacgggggcgacggtgaggaagcagagccagagggaatgtttaaagcctgcgaagactccaaacggaaggctcgcgggtatctgagactggtgcccctgtttgttctgctggccctacttgtccttgcatcagcaggggtcctcctgtggtacttcctgggctacaaggctgaggtcatggtgtcccaggtgtactccggttccttgagagtgttaaatcggcactttagccaggatctcaccaggagggagagctctgcgttcaggtcagagacagcaaaggcgcagaagatgcttaaagagttgatcacttccaccagactcggaacttactacaattcatcttcagtctactccttcggagaaggtccgctaacttgctag

SEQ ID NO: 295860 - DNA, 2409 bp, Artificial Sequence
  derived and/or modified sequence
atgcccgtggccgaagcgcctcaagtggctgggggacagggcgacggcggagacggggaggaagccgagcccgaaggtatgttcaaagcctgcgaagatagcaaacggaaggctcggggttacctccggctggtccctttgtttgttttactcgctttgctcgtcctggcatctgcaggggtactgctctggtattttctgggatacaaagctgaggttatggtgtctcaagtctatagcggaagcctcagagtgctgaaccgccacttcagtcaggacctgactcggcgtgagagcagcgcattcagatctgagaccgccaaggcccaaaagatgttgaaagagcttatcacctctaccaggttagggacctactacaactcctcctctgtctatagcttcggtgaaggccctcttacttgcttcttttggttcatcctgcaaattccagaacacaggcgactaatgctgagcccagaagtggtccaggcactccttgtagaggagcttctatccacagttaacagctctgccgctgtgccttaccgggctgagtacgaagtcgatccagaagggctcgttattctggaggcatccgttaaggatatcgcagctctgaacagcactctgggctgctacagatattcctatgttggtcagggtcaggttcttcgcctcaaaggcccagatcacttggcaagctcctgcctgtggcacctgcagggccctaaagatttgatgctgaaactccgactggagtggactttggccgaatgccgagatcgtctggccatgtacgacgtggccggacccttggaaaagcggcttatcacaagtgtgtacgggtgctcacgtcaagaaccagtcgtggaggtactggcgtccggggctattatggccgtggtgtggaaaaagggcctgcacagttattatgacccattcgtgctaagcgtccagcccgttgtctttcaggcctgtgaagttaacctgaccctggacaatcgtttggatagtcagggagttctttccacgccatattttccatcctattactcaccgcaaacacattgttcatggcacctgacagtgcctagtctagattatggactagctctgtggttcgacgcatacgccctgaggcggcagaaatacgatctgccatgcacacagggccagtggacaatccagaaccggcgtctttgtggactcagaatcttgcaaccatatgctgagcggatccccgtggtcgcgacagcaggaataactattaactttacaagccagattagcctcacagggcctggtgtgagggtgcactacgggctatataatcagagcgatccgtgccctggagagttcttatgcagtgtgaatggcctttgtgtgcccgcttgcgatggagtgaaggattgccccaacggcctggatgagaggaactgcgtgtgtagagcaacttttcaatgtaaggaagattcaacttgcatttcccttccgaaggtatgcgatggccagcccgattgcctgaatggaagtgatgaggagcagtgccaggaaggagtgccttgcggtacctttacttttcagtgcgaagataggagttgtgttaagaaacccaacccacagtgcgatgggagacccgactgtagggacgggagcgacgaagagcattgcgattgtggcctgcagggccctagctcaagaattgtgggtggtgctgtgtcttccgagggagaatggccttggcaagcctcgctgcaggtgaggggtcggcacatctgtggaggggcactcatagctgacaggtgggttattaccgccgctcactgtttccaagaggattcgatggcatctaccgtgctttggacagtcttcctaggaaaagtttggcagaattcacgttggcccggagaggtgtcattcaaggtgagccgattgcttctgcacccttatcacgaggaggattctcacgactacgatgtggccctgctgcagctcgaccacccagtcgtcagatctgccgctgtacggccagtgtgtctgcccgctcgtagccattttttcgagcccggtctccactgctggattactggttggggagcgctcagagaggggggaccaatcagcaatgcccttcagaaagtggatgtacagttgatcccccaggacctttgtagcgaggtgtaccggtatcaggttactcctcgcatgctatgcgctggctaccgtaaaggaaagaaggacgcttgccagggagactccggtggtccactggtgtgtaaagcgctgagcggaaggtggtttctggctgggcttgtctcctggggtctgggctgcgggagacctaattattttggtgtgtacacgagaatcacaggtgtaatctcttggatccaacaagtcgtgacctag

SEQ ID NO: 295861 - DNA, 426 bp, Artificial Sequence
  derived and/or modified sequence
atgccagtggctgaagcacctcaggtcgccggagggcaaggggatggcggagatggtgaggaggcagagcccgagggcatgtttaaggcctgtgaggatagcaaacgtaaggctcggggttatctgcgtctggtgccactcttcgtgctgcttgcgttgctggttctcgcctctgctggagtcttgctgtggtactttctaggatataaagctgaagtaatggtgtcacaagtctattcaggtagcctacgtgttttgaatcgccacttttcccaggacctaacacgaagggagagtagcgcttttcgctccgaaacagcgaaggctcagaagatgctaaaggaactgataacttcaactaggttgggtacctattataactccagttctgtctactcttttggagagggccctctgacatgttag

SEQ ID NO: 295862 - DNA, 3122 bp, Artificial Sequence
  derived and/or modified sequence
gagccacctaccctgctccgaggccaggcctgcagggcctcatcggccagagggtgatcagtgagcagaaggatgcccgtggccgaggccccccaggtggctggcgggcagggggacggaggtgatggcgaggaagcggagccggaggggatgttcaaggcctgtgaggactccaagagaaaagcccggggctacctccgcctggtgcccctgtttgtgctgctggccctgctcgtgctggcttcggcgggggtgctactctggtatttcctagggtacaaggcggaggtgatggtcagccaggtgtactcaggcagtctgcgtgtactcaatcgccacttctcccaggatcttacccgccgggaatctagtgccttccgcagtgaaaccgccaaagcccagaagatgctcaaggagctcatcaccagcacccgcctgggaacttactacaactccagctccgtctattcctttggggagggacccctcacctgcttcttctggttcattctccaaatccccgagcaccgccggctgatgctgagccccgaggtggtgcaggcactgctggtggaggagctgctgtccacagtcaacagctcggctgccgtcccctacagggccgagtacgaagtggaccccgagggcctagtgatcctggaagccagtgtgaaagacatagctgcattgaattccacgctgggttgttaccgctacagctacgtgggccagggccaggtcctccggctgaaggggcctgaccacctggcctccagctgcctgtggcacctgcagggccccaaggacctcatgctcaaactccggctggagtggacgctggcagagtgccgggaccgactggccatgtatgacgtggccgggcccctggagaagaggctcatcacctcggtgtacggctgcagccgccaggagcccgtggtggaggttctggcgtcgggggccatcatggcggtcgtctggaagaagggcctgcacagctactacgaccccttcgtgctctccgtgcagccggtggtcttccaggcctgtgaagtgaacctgacgctggacaacaggctcgactcccagggcgtcctcagcaccccgtacttccccagctactactcgccccaaacccactgctcctggcacctcacggtgccctctctggactacggcttggccctctggtttgatgcctatgcactgaggaggcagaagtatgatttgccgtgcacccagggccagtggacgatccagaacaggaggctgtgtggcttgcgcatcctgcagccctacgccgagaggatccccgtggtggccacggccgggatcaccatcaacttcacctcccagatctccctcaccgggcccggtgtgcgggtgcactatggcttgtacaaccagtcggacccctgccctggagagttcctctgttctgtgaatggactctgtgtccctgcctgtgatggggtcaaggactgccccaacggcctggatgagagaaactgcgtttgcagagccacattccagtgcaaagaggacagcacatgcatctcactgcccaaggtctgtgatgggcagcctgattgtctcaacggcagcgacgaagagcagtgccaggaaggggtgccatgtgggacattcaccttccagtgtgaggaccggagctgcgtgaagaagcccaacccgcagtgtgatgggcggcccgactgcagggacggctcggatgaggagcactgtgactgtggcctccagggcccctccagccgcattgttggtggagctgtgtcctccgagggtgagtggccatggcaggccagcctccaggttcggggtcgacacatctgtgggggggccctcatcgctgaccgctgggtgataacagctgcccactgcttccaggaggacagcatggcctccacggtgctgtggaccgtgttcctgggcaaggtgtggcagaactcgcgctggcctggagaggtgtccttcaaggtgagccgcctgctcctgcacccgtaccacgaagaggacagccatgactacgacgtggcgctgctgcagctcgaccacccggtggtgcgctcggccgccgtgcgccccgtctgcctgcccgcgcgctcccacttcttcgagcccggcctgcactgctggattacgggctggggcgccttgcgcgagggcggccccatcagcaacgctctgcagaaagtggatgtgcagttgatcccacaggacctgtgcagcgaggtctatcgctaccaggtgacgccacgcatgctgtgtgccggctaccgcaagggcaagaaggatgcctgtcagggtgactcaggtggtccgctggtgtgcaaggcactcagtggccgctggttcctggcggggctggtcagctggggcctgggctgtggccggcctaactacttcggcgtctacacccgcatcacaggtgtgatcagctggatccagcaagtggtgacctgaggaactgcccccctgcaaagcagggcccacctcctggactcagagagcccagggcaactgccaagcagggggacaagtattctggcggggggtgggggagagagcaggccctgtggtggcaggaggtggcatcttgtctcgtccctgatgtctgctccagtgatggcaggaggatggagaagtgccagcagctgggggtcaagacgtcccctgaggacccaggcccacacccagcccttctgcctcccaattctctctcctccgtccccttcctccactgctgcctaatgcaaggcagtggctcagcagcaagaatgctggttctacatcccgaggagtgtctgaggtgcgccccactctgtacagaggctgtttgggcagccttgcctccagagagcagattccagcttcggaagcccctggtctaacttgggatctgggaatggaaggtgctcccatcggaggggaccctcagagccctggagactgccaggtgggcctgctgccactgtaagccaaaaggtggggaagtcctgactccagggtccttgccccacccctgcctgccacctgggccctcacagcccagaccctcactgggaggtgagctcagctgccctttggaataaagctgcctgatc

SEQ ID NO: 295863 - DNA, 7245 bp, Artificial Sequence
  derived and/or modified sequence
atggccgagaacgtggtggagcccggcccccccagcgccaagagacccaagctgagcagccccgccctgagcgccagcgccagcgacggcaccgacttcggcagcctgttcgacctggagcacgacctgcccgacgagctgatcaacagcaccgagctgggcctgaccaacggcggcgacatcaaccagctgcagaccagcctgggcatggtgcaggacgccgccagcaagcacaagcagctgagcgagctgctgagaagcggcagcagccccaacctgaacatgggcgtgggcggccccggccaggtgatggccagccaggcccagcagagcagccccggcctgggcctgatcaacagcatggtgaagagccccatgacccaggccggcctgaccagccccaacatgggcatgggcaccagcggccccaaccagggccccacccagagcaccggcatgatgaacagccccgtgaaccagcccgccatgggcatgaacaccggcatgaacgccggcatgaaccccggcatgctggccgccggcaacggccagggcatcatgcccaaccaggtgatgaacggcagcatcggcgccggcagaggcagacagaacatgcagtaccccaaccccggcatgggcagcgccggcaacctgctgaccgagcccctgcagcagggcagcccccagatgggcggccagaccggcctgagaggcccccagcccctgaagatgggcatgatgaacaaccccaacccctacggcagcccctacacccagaaccccggccagcagatcggcgccagcggcctgggcctgcagatccagaccaagaccgtgctgagcaacaacctgagccccttcgccatggacaagaaggccgtgcccggcggcggcatgcccaacatgggccagcagcccgccccccaggtgcagcagcccggcctggtgacccccgtggcccagggcatgggcagcggcgcccacaccgccgaccccgagaagagaaagctgatccagcagcagctggtgctgctgctgcacgcccacaagtgccagagaagagagcaggccaacggcgaggtgagacagtgcaacctgccccactgcagaaccatgaagaacgtgctgaaccacatgacccactgccagagcggcaagagctgccaggtggcccactgcgccagcagcagacagatcatcagccactggaagaactgcaccagacacgactgccccgtgtgcctgcccctgaagaacgccggcgacaagagaaaccagcagcccatcctgaccggcgcccccgtgggcctgggcaaccccagcagcctgggcgtgggccagcagagcgcccccaacctgagcaccgtgagccagatcgaccccagcagcatcgagagagcctacgccgccctgggcctgccctaccaggtgaaccagatgcccacccagccccaggtgcaggccaagaaccagcagaaccagcagcccggccagagcccccagggcatgagacccatgagcaacatgagcgccagccccatgggcgtgaacggcggcgtgggcgtgcagacccccagcctgctgagcgacagcatgctgcacagcgccatcaacagccagaaccccatgatgagcgagaacgccagcgtgcccagcctgggccccatgcccaccgccgcccagcccagcaccaccggcatcagaaagcagtggcacgaggacatcacccaggacctgagaaaccacctggtgcacaagctggtgcaggccatcttccccacccccgaccccgccgccctgaaggacagaagaatggagaacctggtggcctacgccagaaaggtggagggcgacatgtacgagagcgccaacaacagagccgagtactaccacctgctggccgagaagatctacaagatccagaaggagctggaggagaagagaagaaccagactgcagaagcagaacatgctgcccaacgccgccggcatggtgcccgtgagcatgaaccccggccccaacatgggccagccccagcccggcatgaccagcaacggccccctgcccgaccccagcatgatcagaggcagcgtgcccaaccagatgatgcccagaatcaccccccagagcggcctgaaccagttcggccagatgagcatggcccagccccccatcgtgcccagacagaccccccccctgcagcaccacggccagctggcccagcccggcgccctgaacccccccatgggctacggccccagaatgcagcagcccagcaaccagggccagttcctgccccagacccagttccccagccagggcatgaacgtgaccaacatccccctggcccccagcagcggccaggcccccgtgagccaggcccagatgagcagcagcagctgccccgtgaacagccccatcatgccccccggcagccagggcagccacatccactgcccccagctgccccagcccgccctgcaccagaacagccccagccccgtgcccagcagaacccccaccccccaccacaccccccccagcatcggcgcccagcagccccccgccaccaccatccccgcccccgtgcccaccccccccgccatgccccccggcccccagagccaggccctgcaccccccccccagacagacccccaccccccccaccacccagctgccccagcaggtgcagcccagcctgcccgccgcccccagcgccgaccagccccagcagcagcccagaagccagcagagcaccgccgccagcgtgcccacccccaccgcccccctgctgcccccccagcccgccacccccctgagccagcccgccgtgagcatcgagggccaggtgagcaacccccccagcaccagcagcaccgaggtgaacagccaggccatcgccgagaagcagcccagccaggaggtgaagatggaggccaagatggaggtggaccagcccgagcccgccgacacccagcccgaggacatcagcgagagcaaggtggaggactgcaagatggagagcaccgagaccgaggagagaagcaccgagctgaagaccgagatcaaggaggaggaggaccagcccagcaccagcgccacccagagcagccccgcccccggccagagcaagaagaagatcttcaagcccgaggagctgagacaggccctgatgcccaccctggaggccctgtacagacaggaccccgagagcctgcccttcagacagcccgtggacccccagctgctgggcatccccgactacttcgacatcgtgaagagccccatggacctgagcaccatcaagagaaagctggacaccggccagtaccaggagccctggcagtacgtggacgacatctggctgatgttcaacaacgcctggctgtacaacagaaagaccagcagagtgtacaagtactgcagcaagctgagcgaggtgttcgagcaggagatcgaccccgtgatgcagagcctgggctactgctgcggcagaaagctggagttcagcccccagaccctgtgctgctacggcaagcagctgtgcaccatccccagagacgccacctactacagctaccagaacagataccacttctgcgagaagtgcttcaacgagatccagggcgagagcgtgagcctgggcgacgaccccagccagccccagaccaccatcaacaaggagcagttcagcaagagaaagaacgacaccctggaccccgagctgttcgtggagtgcaccgagtgcggcagaaagatgcaccagatctgcgtgctgcaccacgagatcatctggcccgccggcttcgtgtgcgacggctgcctgaagaagagcgccagaaccagaaaggagaacaagttcagcgccaagagactgcccagcaccagactgggcaccttcctggagaacagagtgaacgacttcctgagaagacagaaccaccccgagagcggcgaggtgaccgtgagagtggtgcacgccagcgacaagaccgtggaggtgaagcccggcatgaaggccagattcgtggacagcggcgagatggccgagagcttcccctacagaaccaaggccctgttcgccttcgaggagatcgacggcgtggacctgtgcttcttcggcatgcacgtgcaggagtacggcagcgactgccccccccccaaccagagaagagtgtacatcagctacctggacagcgtgcacttcttcagacccaagtgcctgagaaccgccgtgtaccacgagatcctgatcggctacctggagtacgtgaagaagctgggctacaccaccggccacatctgggcctgcccccccagcgagggcgacgactacatcttccactgccacccccccgaccagaagatccccaagcccaagagactgcaggagtggtacaagaagatgctggacaaggccgtgagcgagagaatcgtgcacgactacaaggacatcttcaagcaggccaccgaggacagactgaccagcgccaaggagctgccctacttcgagggcgacttctggcccaacgtgctggaggagagcatcaaggagctggagcaggaggaggaggagagaaagagagaggagaacaccagcaacgagagcaccgacgtgaccaagggcgacagcaagaacgccaagaagaagaacaacaagaagaccagcaagaacaagagcagcctgagcagaggcaacaagaagaagcccggcatgcccaacgtgagcaacgacctgagccagaagctgtacgccaccatggagaagcacaaggaggtgttcttcgtgatcagactgatcgccggccccgccgccaacagcctgccccccatcgtggaccccgaccccctgatcccctgcgacctgatggacggcagagacgccttcctgaccctggccagagacaagcacctggagttcagcagcctgagaagagcccagtggagcaccatgtgcatgctggtggagctgcacacccagagccaggacagattcgtgtacacctgcaacgagtgcaagcaccacgtggagaccagatggcactgcaccgtgtgcgaggactacgacctgtgcatcacctgctacaacaccaagaaccacgaccacaagatggagaagctgggcctgggcctggacgacgagagcaacaaccagcaggccgccgccacccagagccccggcgacagcagaagactgagcatccagagatgcatccagagcctggtgcacgcctgccagtgcagaaacgccaactgcagcctgcccagctgccagaagatgaagagagtggtgcagcacaccaagggctgcaagagaaagaccaacggcggctgccccatctgcaagcagctgatcgccctgtgctgctaccacgccaagcactgccaggagaacaagtgccccgtgcccttctgcctgaacatcaagcagaagctgagacagcagcagctgcagcacagactgcagcaggcccagatgctgagaagaagaatggccagcatgcagagaaccggcgtggtgggccagcagcagggcctgcccagccccacccccgccacccccaccacccccaccggccagcagcccaccaccccccagaccccccagcccaccagccagccccagcccaccccccccaacagcatgcccccctacctgcccagaacccaggccgccggccccgtgagccagggcaaggccgccggccaggtgaccccccccacccccccccagaccgcccagccccccctgcccggccccccccccgccgccgtggagatggccatgcagatccagagagccgccgagacccagagacagatggcccacgtgcagatcttccagagacccatccagcaccagatgccccccatgacccccatggcccccatgggcatgaaccccccccccatgaccagaggccccagcggccacctggagcccggcatgggccccaccggcatgcagcagcagcccccctggagccagggcggcctgccccagccccagcagctgcagagcggcatgcccagacccgccatgatgagcgtggcccagcacggccagcccctgaacatggccccccagcccggcctgggccaggtgggcatcagccccctgaagcccggcaccgtgagccagcaggccctgcagaacctgctgagaaccctgagaagccccagcagccccctgcagcagcagcaggtgctgagcatcctgcacgccaacccccagctgctggccgccttcatcaagcagagagccgccaagtacgccaacagcaacccccagcccatccccggccagcccggcatgccccagggccagcccggcctgcagccccccaccatgcccggccagcagggcgtgcacagcaaccccgccatgcagaacatgaaccccatgcaggccggcgtgcagagagccggcctgccccagcagcagccccagcagcagctgcagccccccatgggcggcatgagcccccaggcccagcagatgaacatgaaccacaacaccatgcccagccagttcagagacatcctgagaagacagcagatgatgcagcagcagcagcagcagggcgccggccccggcatcggccccggcatggccaaccacaaccagttccagcagccccagggcgtgggctaccccccccagcagcagcagagaatgcagcaccacatgcagcagatgcagcagggcaacatgggccagatcggccagctgccccaggccctgggcgccgaggccggcgccagcctgcaggcctaccagcagagactgctgcagcagcagatgggcagccccgtgcagcccaaccccatgagcccccagcagcacatgctgcccaaccaggcccagagcccccacctgcagggccagcagatccccaacagcctgagcaaccaggtgagaagcccccagcccgtgcccagccccagaccccagagccagcccccccacagcagccccagccccagaatgcagccccagcccagcccccaccacgtgagcccccagaccagcagcccccaccccggcctggtggccgcccaggccaaccccatggagcagggccacttcgccagccccgaccagaacagcatgctgagccagctggccagcaaccccggcatggccaacctgcacggcgccagcgccaccgacctgggcctgagcaccgacaacagcgacctgaacagcaacctgagccagagcaccctggacatccactag

SEQ ID NO: 295864 - DNA, 9585 bp, Artificial Sequence
  derived and/or modified sequence
cttgtttgtgtgctaggctgggggggagagagggcgagagagagcgggcgagagtgggcaagcaggacgccgggctgagtgctaactgcgggagccagagagtgcggaggggagtcgggtcggagagaggcggcaggggccgagacagtggcagggggcccggggcgcacgggctgaggcgacccccagccccctcccgtccgcacacacccccaccgcggtccagcagccgggccggcgtcgacgcctaggggggaccattacataaccccgcgccccgcggcgtcttctcccgccgccgcgggcggccccgaacggagccccggggggcgggcgctcccagcacctggccgccggcggtgggggccgtagcagcggccgtatttatttattttccgcgggaaaggaaggcgaaggaggggagcgcggcgcgaggaggggccgcctgcgccgccgccggagcggggcctcctcggtgggctccgcgtcggcgcgggcgtgcgggcggcgctgctcggcccggccccctcggccctctggtccggccagctccgctcccggcgtccttgccgcgcctccgccggccgccgcgcgatgtgaggcggcggcgccagcctggctctcggctcgggcgagttctctgcggccattaggggccggtgcggcggcggcggcgcggagcgcggcggcaggaggagggttcggagggtgggggcgcaggcccgggagggggcaccgggaggaggtgagtgtctcttgtcgcctcctcctctccccccttttcgcccccgcctccttgtggcgatgagaaggaggaggacagcgccgaggaggaagaggttgatggcggcggcggagctccgagagacctcggctgggcaggggccggccgtggcgggccggggactgcgcctctagagccgcgagttctcgggaattcgccgcagcggacgcgctcggcgaatttgtgctcttgtgccctcctccgggcttgggcccaggcccggcccctcgcacttgcccttaccttttctatcgagtccgcatccctctccagccactgcgacccggcgaagagaaaaaggaacttcccccaccccctcgggtgccgtcggagccccccagcccacccctgggtgcggcgcggggaccccgggccgaagaagagatttcctgaggattctggttttcctcgcttgtatctccgaaagaattaaaaatggccgagaatgtggtggaaccggggccgccttcagccaagcggcctaaactctcatctccggccctctcggcgtccgccagcgatggcacagattttggctctctatttgacttggagcacgacttaccagatgaattaatcaactctacagaattgggactaaccaatggtggtgatattaatcagcttcagacaagtcttggcatggtacaagatgcagcttctaaacataaacagctgtcagaattgctgcgatctggtagttcccctaacctcaatatgggagttggtggcccaggtcaagtcatggccagccaggcccaacagagcagtcctggattaggtttgataaatagcatggtcaaaagcccaatgacacaggcaggcttgacttctcccaacatggggatgggcactagtggaccaaatcagggtcctacgcagtcaacaggtatgatgaacagtccagtaaatcagcctgccatgggaatgaacacagggatgaatgcgggcatgaatcctggaatgttggctgcaggcaatggacaagggataatgcctaatcaagtcatgaacggttcaattggagcaggccgagggcgacagaatatgcagtacccaaacccaggcatgggaagtgctggcaacttactgactgagcctcttcagcagggctctccccagatgggaggacaaacaggattgagaggcccccagcctcttaagatgggaatgatgaacaaccccaatccttatggttcaccatatactcagaatcctggacagcagattggagccagtggccttggtctccagattcagacaaaaactgtactatcaaataacttatctccatttgctatggacaaaaaggcagttcctggtggaggaatgcccaacatgggtcaacagccagccccgcaggtccagcagccaggcctggtgactccagttgcccaagggatgggttctggagcacatacagctgatccagagaagcgcaagctcatccagcagcagcttgttctccttttgcatgctcacaagtgccagcgccgggaacaggccaatggggaagtgaggcagtgcaaccttccccactgtcgcacaatgaagaatgtcctaaaccacatgacacactgccagtcaggcaagtcttgccaagtggcacactgtgcatcttctcgacaaatcatttcacactggaagaattgtacaagacatgattgtcctgtgtgtctccccctcaaaaatgctggtgataagagaaatcaacagccaattttgactggagcacccgttggacttggaaatcctagctctctaggggtgggtcaacagtctgcccccaacctaagcactgttagtcagattgatcccagctccatagaaagagcctatgcagctcttggactaccctatcaagtaaatcagatgccgacacaaccccaggtgcaagcaaagaaccagcagaatcagcagcctgggcagtctccccaaggcatgcggcccatgagcaacatgagtgctagtcctatgggagtaaatggaggtgtaggagttcaaacgccgagtcttctttctgactcaatgttgcattcagccataaattctcaaaacccaatgatgagtgaaaatgccagtgtgccctccctgggtcctatgccaacagcagctcaaccatccactactggaattcggaaacagtggcacgaagatattactcaggatcttcgaaatcatcttgttcacaaactcgtccaagccatatttcctacgccggatcctgctgctttaaaagacagacggatggaaaacctagttgcatatgctcggaaagttgaaggggacatgtatgaatctgcaaacaatcgagcggaatactaccaccttctagctgagaaaatctataagatccagaaagaactagaagaaaaacgaaggaccagactacagaagcagaacatgctaccaaatgctgcaggcatggttccagtttccatgaatccagggcctaacatgggacagccgcaaccaggaatgacttctaatggccctctacctgacccaagtatgatccgtggcagtgtgccaaaccagatgatgcctcgaataactccacaatctggtttgaatcaatttggccagatgagcatggcccagccccctattgtaccccggcaaacccctcctcttcagcaccatggacagttggctcaacctggagctctcaacccgcctatgggctatgggcctcgtatgcaacagccttccaaccagggccagttccttcctcagactcagttcccatcacagggaatgaatgtaacaaatatccctttggctccgtccagcggtcaagctccagtgtctcaagcacaaatgtctagttcttcctgcccggtgaactctcctataatgcctccagggtctcaggggagccacattcactgtccccagcttcctcaaccagctcttcatcagaattcaccctcgcctgtacctagtcgtacccccacccctcaccatactcccccaagcataggggctcagcagccaccagcaacaacaattccagcccctgttcctacacctcctgccatgccacctgggccacagtcccaggctctacatccccctccaaggcagacacctacaccaccaacaacacaacttccccaacaagtgcagccttcacttcctgctgcaccttctgctgaccagccccagcagcagcctcgctcacagcagagcacagcagcgtctgttcctaccccaacagcaccgctgcttcctccgcagcctgcaactccactttcccagccagctgtaagcattgaaggacaggtatcaaatcctccatctactagtagcacagaagtgaattctcaggccattgctgagaagcagccttcccaggaagtgaagatggaggccaaaatggaagtggatcaaccagaaccagcagatactcagccggaggatatttcagagtctaaagtggaagactgtaaaatggaatctaccgaaacagaagagagaagcactgagttaaaaactgaaataaaagaggaggaagaccagccaagtacttcagctacccagtcatctccggctccaggacagtcaaagaaaaagattttcaaaccagaagaactacgacaggcactgatgccaactttggaggcactttaccgtcaggatccagaatcccttccctttcgtcaacctgtggaccctcagcttttaggaatccctgattactttgatattgtgaagagccccatggatctttctaccattaagaggaagttagacactggacagtatcaggagccctggcagtatgtcgatgatatttggcttatgttcaataatgcctggttatataaccggaaaacatcacgggtatacaaatactgctccaagctctctgaggtctttgaacaagaaattgacccagtgatgcaaagccttggatactgttgtggcagaaagttggagttctctccacagacactgtgttgctacggcaaacagttgtgcacaatacctcgtgatgccacttattacagttaccagaacaggtatcatttctgtgagaagtgtttcaatgagatccaaggggagagcgtttctttgggggatgacccttcccagcctcaaactacaataaataaagaacaattttccaagagaaaaaatgacacactggatcctgaactgtttgttgaatgtacagagtgcggaagaaagatgcatcagatctgtgtccttcaccatgagatcatctggcctgctggattcgtctgtgatggctgtttaaagaaaagtgcacgaactaggaaagaaaataagttttctgctaaaaggttgccatctaccagacttggcacctttctagagaatcgtgtgaatgactttctgaggcgacagaatcaccctgagtcaggagaggtcactgttagagtagttcatgcttctgacaaaaccgtggaagtaaaaccaggcatgaaagcaaggtttgtggacagtggagagatggcagaatcctttccataccgaaccaaagccctctttgcctttgaagaaattgatggtgttgacctgtgcttctttggcatgcatgttcaagagtatggctctgactgccctccacccaaccagaggagagtatacatatcttacctcgatagtgttcatttcttccgtcctaaatgcttgaggactgcagtctatcatgaaatcctaattggatatttagaatatgtcaagaaattaggttacacaacagggcatatttgggcatgtccaccaagtgagggagatgattatatcttccattgccatcctcctgaccagaagatacccaagcccaagcgactgcaggaatggtacaaaaaaatgcttgacaaggctgtatcagagcgtattgtccatgactacaaggatatttttaaacaagctactgaagatagattaacaagtgcaaaggaattgccttatttcgagggtgatttctggcccaatgttctggaagaaagcattaaggaactggaacaggaggaagaagagagaaaacgagaggaaaacaccagcaatgaaagcacagatgtgaccaagggagacagcaaaaatgctaaaaagaagaataataagaaaaccagcaaaaataagagcagcctgagtaggggcaacaagaagaaacccgggatgcccaatgtatctaacgacctctcacagaaactatatgccaccatggagaagcataaagaggtcttctttgtgatccgcctcattgctggccctgctgccaactccctgcctcccattgttgatcctgatcctctcatcccctgcgatctgatggatggtcgggatgcgtttctcacgctggcaagggacaagcacctggagttctcttcactccgaagagcccagtggtccaccatgtgcatgctggtggagctgcacacgcagagccaggaccgctttgtctacacctgcaatgaatgcaagcaccatgtggagacacgctggcactgtactgtctgtgaggattatgacttgtgtatcacctgctataacactaaaaaccatgaccacaaaatggagaaactaggccttggcttagatgatgagagcaacaaccagcaggctgcagccacccagagcccaggcgattctcgccgcctgagtatccagcgctgcatccagtctctggtccatgcttgccagtgtcggaatgccaattgctcactgccatcctgccagaagatgaagcgggttgtgcagcataccaagggttgcaaacggaaaaccaatggcgggtgccccatctgcaagcagctcattgccctctgctgctaccatgccaagcactgccaggagaacaaatgcccggtgccgttctgcctaaacatcaagcagaagctccggcagcaacagctgcagcaccgactacagcaggcccaaatgcttcgcaggaggatggccagcatgcagcggactggtgtggttgggcagcaacagggcctcccttcccccactcctgccactccaacgacaccaactggccaacagccaaccaccccgcagacgccccagcccacttctcagcctcagcctacccctcccaatagcatgccaccctacttgcccaggactcaagctgctggccctgtgtcccagggtaaggcagcaggccaggtgacccctccaacccctcctcagactgctcagccaccccttccagggcccccacctgcagcagtggaaatggcaatgcagattcagagagcagcggagacgcagcgccagatggcccacgtgcaaatttttcaaaggccaatccaacaccagatgcccccgatgactcccatggcccccatgggtatgaacccacctcccatgaccagaggtcccagtgggcatttggagccagggatgggaccgacagggatgcagcaacagccaccctggagccaaggaggattgcctcagccccagcaactacagtctgggatgccaaggccagccatgatgtcagtggcccagcatggtcaacctttgaacatggctccacaaccaggattgggccaggtaggtatcagcccactcaaaccaggcactgtgtctcaacaagccttacaaaaccttttgcggactctcaggtctcccagctctcccctgcagcagcaacaggtgcttagtatccttcacgccaacccccagctgttggctgcattcatcaagcagcgggctgccaagtatgccaactctaatccacaacccatccctgggcagcctggcatgccccaggggcagccagggctacagccacctaccatgccaggtcagcagggggtccactccaatccagccatgcagaacatgaatccaatgcaggcgggcgttcagagggctggcctgccccagcagcaaccacagcagcaactccagccacccatgggagggatgagcccccaggctcagcagatgaacatgaaccacaacaccatgccttcacaattccgagacatcttgagacgacagcaaatgatgcaacagcagcagcaacagggagcagggccaggaataggccctggaatggccaaccataaccagttccagcaaccccaaggagttggctacccaccacagcagcagcagcggatgcagcatcacatgcaacagatgcaacaaggaaatatgggacagataggccagcttccccaggccttgggagcagaggcaggtgccagtctacaggcctatcagcagcgactccttcagcaacagatggggtcccctgttcagcccaaccccatgagcccccagcagcatatgctcccaaatcaggcccagtccccacacctacaaggccagcagatccctaattctctctccaatcaagtgcgctctccccagcctgtcccttctccacggccacagtcccagcccccccactccagtccttccccaaggatgcagcctcagccttctccacaccacgtttccccacagacaagttccccacatcctggactggtagctgcccaggccaaccccatggaacaagggcattttgccagcccggaccagaattcaatgctttctcagcttgctagcaatccaggcatggcaaacctccatggtgcaagcgccacggacctgggactcagcaccgataactcagacttgaattcaaacctctcacagagtacactagacatacactagagacaccttgtagtattttgggagcaaaaaaattattttctcttaacaagactttttgtactgaaaacaatttttttgaatctttcgtagcctaaaagacaattttccttggaacacataagaactgtgcagtagccgtttgtggtttaaagcaaacatgcaagatgaacctgagggatgatagaatacaaagaatatatttttgttatggctggttaccaccagcctttcttcccctttgtgtgtgtggttcaagtgtgcactgggaggaggctgaggcctgtgaagccaaacaatatgctcctgccttgcacctccaataggttttattattttttttaaattaatgaacatatgtaatattaatagttattatttactggtgcagatggttgacatttttccctattttcctcactttatggaagagttaaaacatttctaaaccagaggacaaaaggggttaatgttactttaaaattacattctatatatatataaatatatataaatatatattaaaataccagttttttttctctgggtgcaaagatgttcattcttttaaaaaatgtttaaaaaaaaaaaaaaactgcctttcttcccctcaagtcaacttttgtgctccagaaaattttctattctgtaagtctgagcgtaaaacttcaagtattaaaataatttgtacatgtagagagaaaaatgactttttcaaaaatatacaggggcagctgccaaattgatgtattatatattgtggtttctgtttcttgaaagaatttttttcgttatttttacatctaacaaagtaaaaaaattaaaaagagggtaagaaacgattccggtgggatgattttaacatgcaaaatgtccctgggggtttcttctttgcttgctttcttcctccttaccctaccccccactcacacacacacacacacacacacacacacacacacacacacactttctataaaacttgaaaatagcaaaaaccctcaactgttgtaaatcatgcaattaaagttgattacttataaatatgaactttggatcactgtatagactgttaaatttgatttcttattacctattgttaaataaactgtgtgagacagaca

SEQ ID NO: 295865 - DNA, 7245 bp, Artificial Sequence
  derived and/or modified sequence
atggctgaaaacgtggtagaaccgggtccgccatctgccaagcgtccaaaactatcttccccagccctctccgccagtgcttccgacggcaccgatttcggctccctatttgacctggagcacgaccttcccgatgagctgattaattccacggagttggggctgaccaatggaggtgacattaatcagctccagacgtccctcgggatggtgcaggatgcggcatccaagcacaaacagctgagtgagcttctgcgctccgggagctcacctaacctgaatatgggggtgggaggccccggccaggttatggccagccaggcccagcagtcctcccctggcctcggcttgattaatagcatggtaaaatcccccatgacccaggccgggcttactagtccaaatatgggaatgggaacctccggccctaatcagggccctactcaatcgacaggaatgatgaatagccccgtaaaccagcccgccatgggtatgaacaccgggatgaatgcaggtatgaatcctggaatgctggcagctggcaacggccagggtattatgcctaatcaggtgatgaatggatccatcggcgcagggaggggaagacaaaacatgcagtatcctaaccccggaatggggtccgcaggcaacctgctcacggaacctttgcaacaggggagcccacaaatgggcggccagacaggcctcagagggccacagccactgaaaatgggtatgatgaacaaccccaacccttatggctccccatatactcagaaccccgggcagcagataggagcctcaggcctgggtttacaaatacaaactaagactgtgctctccaacaacctttctcctttcgcaatggacaaaaaggcagtacctggcggaggaatgcccaacatgggccagcagcccgcccctcaggtacagcagcccggcctggtgactcctgtggcgcagggcatgggatcgggagcgcacaccgcggatcctgagaaaagaaaactcattcagcaacagttagtcctgttgttgcatgctcataagtgccagcggcgtgaacaggccaatggtgaggttagacagtgtaacctgccacattgcaggacgatgaagaacgtcctgaaccacatgactcactgtcaatccgggaaaagctgccaagtggctcactgtgcaagcagccgccagatcatctcacattggaaaaattgcacacgccacgattgtccagtttgcctgcccttgaaaaacgccggggacaaaagaaaccagcagccaatcctgaccggtgctcccgtgggattaggaaatccctctagtttgggagtgggacagcagagtgcacccaacctgtcgacagtttcccagatagaccccagcagcatagagcgcgcctatgccgccttaggcctcccatatcaggtcaatcaaatgccaactcagccccaggtccaggccaaaaatcagcagaaccagcaacccggtcagtcaccccaggggatgcggcccatgagtaacatgtcagcaagtcctatgggcgtgaatggcggtgtaggtgtgcaaacgccctcactcttgtctgacagtatgctacattccgcaataaacagtcagaatcccatgatgagtgagaacgcaagtgtaccaagcttgggcccaatgccaaccgccgcccagcccagcaccactggcatccgcaagcaatggcacgaagatatcacacaggatttgagaaatcatctggtccacaaactggtgcaagcaatttttcctacgccagatccggccgcccttaaggacagacgaatggagaatttggtggcatacgcaaggaaggtggagggcgacatgtatgagagcgcaaacaatcgagccgaatactaccacctgctggcggaaaaaatttataaaatacaaaaggaactcgaggaaaagcgccgcactagattacagaaacagaatatgctgcctaacgctgccggtatggtgccggtatctatgaacccagggccaaacatggggcagcctcagccagggatgaccagcaacggcccccttcctgacccctcgatgatcagaggcagcgttcccaaccagatgatgccccgcatcactccccagtcgggccttaaccagtttggacagatgtcaatggctcagcctcccatcgttccaagacagacccctcctctgcaacaccatggacagctggcacagcccggtgctctgaatcctccaatgggatatgggcctaggatgcagcagccatcaaatcagggacagttccttcctcagacccaattcccatcgcaggggatgaacgtcaccaacatcccgctcgcaccctcaagtgggcaggctccagtatcacaggcgcaaatgtcctcctctagttgccccgtgaactcccctattatgcctccaggaagccaggggtctcacattcactgtccacagcttccccagccagcattgcaccaaaattctccgagtccagtgccttcacgcacccctacccctcaccatacccctccctccatcggtgcccaacagcctcctgcaacaaccatcccggcgcctgtgcccaccccgcctgcaatgccacctggcccacagtcccaggccttacatccacccccgcggcaaactcctacccctccaacaacccaacttccccagcaggttcagccctccctgccagcagcacccagcgccgaccagccccagcaacaaccaaggtcacaacagtccactgctgcttctgtgcctactcctaccgcaccgcttttgccaccccagccagctaccccactctcccagccagctgtctccatagagggacaggtatctaatcccccaagcacatcttccacggaagttaactcacaggcaattgccgagaagcagccaagtcaagaggtcaagatggaagccaaaatggaggtcgaccaaccggagcccgccgatactcaacctgaggacatttcggaatccaaggttgaggactgtaaaatggagagcactgaaaccgaagaacggagtacagagcttaaaacggaaattaaggaagaggaagatcagcccagcacctcagccacccagtcatcccctgccccgggtcaaagcaaaaagaaaattttcaaacccgaggagttaagacaggctcttatgcccaccctggaggcactgtacagacaggaccccgagtccctgccattccgacaacccgtcgatccccaattgttgggcatacctgactacttcgatatagtaaagagtccgatggacctctcaaccatcaagcgaaagcttgacaccgggcagtaccaggaaccatggcagtatgtggatgacatctggcttatgttcaataatgcatggctgtacaacaggaagaccagcagagtgtataagtactgttcaaaactgagtgaggtttttgagcaggagatcgatcctgtgatgcaaagtttggggtactgttgtggacgcaaattagagttcagtcctcaaactttgtgttgttacggcaagcagttgtgcacgatccctcgggacgcgacctattacagctatcagaatagatatcacttctgcgagaaatgcttcaatgagatacagggagaatccgtgagccttggagacgacccaagccagcctcaaactaccattaataaagaacagttcagcaagcgcaaaaatgacactctggacccagaattattcgtggagtgtacagagtgtggcaggaagatgcaccagatctgtgttctgcatcacgagatcatttggcctgccggattcgtgtgcgacggatgtctcaagaaatctgctcggacacgtaaagaaaacaagttttcagcaaaacgactcccatcaacccgtttaggaacttttttggagaacagagtcaatgacttcctccgccgccagaaccatcccgaaagcggggaagtcaccgttagggtggtccatgcttcggacaagaccgtcgaggtcaagccaggcatgaaagctagattcgtggactcaggtgaaatggcggagtcatttccatataggaccaaggcgctgttcgctttcgaagaaatcgatggagttgacctgtgcttctttggcatgcacgtccaggaatatggttccgactgccccccaccgaaccagcgaagagtctatatttcctacttggacagcgtccattttttccgccccaagtgtctgaggaccgctgtgtatcacgagatcctaattggatatctggagtatgtcaagaaattgggctacacaacaggtcatatatgggcttgtcccccctccgagggtgatgactacatcttccactgccatcccccagaccagaagattcctaaacctaaacggctgcaggagtggtacaaaaagatgcttgacaaggcggtgtccgagcgcattgtgcacgattacaaagatatctttaagcaggcaacggaggaccgactgacgagcgctaaagaacttccctattttgaaggagacttttggccaaatgtcctggaggaatccattaaagagctggagcaggaggaagaggagaggaagagggaggagaatacgtccaatgaaagcactgacgtgaccaaaggggatagtaagaatgccaaaaagaaaaacaacaaaaaaacttcgaaaaacaaatcatcactgtcaaggggcaataagaagaaacccggcatgccgaatgtatctaacgacctgagtcagaaactctatgctacaatggaaaaacacaaggaggtattctttgtgatacggctgatagctggacccgcagcaaacagcttgccacccattgtggacccagaccccttgatcccctgcgatctgatggatggccgcgatgccttcctgacacttgccagggacaaacatctagaattctctagcctgaggcgggcacagtggtctacgatgtgtatgctagtggagcttcacactcaatcccaggacaggtttgtttacacatgtaacgaatgtaaacaccatgtggagacacggtggcattgcactgtgtgtgaggattatgatttgtgtattacgtgttataacacaaagaatcacgaccataagatggaaaaattgggcctgggccttgatgatgaatctaataaccaacaggctgccgcaactcagagcccaggagacagcaggaggttgagtatacagaggtgtattcagagcttagtccacgcatgccaatgccgaaatgccaattgcagtctgccctcctgccagaagatgaaacgagttgtgcagcacacgaaggggtgtaaaaggaaaaccaacggaggatgtcccatctgcaaacagttgatagctctctgctgctatcatgcaaagcattgtcaggagaataaatgccccgttcctttctgtctgaatataaaacagaaactcaggcagcagcagttgcagcacaggctgcagcaagctcagatgctgaggcgtcgcatggcatcaatgcagcgaactggcgtcgttggtcaacagcaagggttgccatcccccaccccagcaacgccgactacacccactgggcagcaacctacgactcctcaaacgccccagcctacttcccagccccagcccaccccacctaatagtatgcctccatacctcccgagaacacaggcagccggtcctgtgtcacaagggaaggccgccggccaggttacaccacccacgcctccacaaacggcgcaaccccctctgcctgggcccccacccgccgctgtggagatggccatgcagattcagcgcgccgcagaaacccagagacagatggctcacgtgcaaatttttcaacgcccgatccagcatcagatgcccccaatgacccctatggcacccatgggcatgaatcctccccctatgacaagagggccaagcggacacctggaacccggtatgggaccaaccggtatgcagcagcagcccccatggtctcagggagggctgccccagccccagcagttgcaatccgggatgcccaggccagcgatgatgagtgtggcacagcacggacagccactcaatatggctccacagcctggcctcggccaggtgggcatcagtcccctaaagcccggcacagtctcacagcaggcgctgcaaaatctgttacgtacattaagatcccctagttcacccctgcagcagcagcaagtcctgtcaatcttgcatgcaaacccgcaactcctcgctgcatttatcaaacaaagagcagccaagtacgcaaactcaaatcctcagccaatcccagggcaaccaggaatgccgcagggccagccgggcttacaaccccccacaatgccggggcagcagggagtacatagcaacccagcaatgcaaaacatgaacccgatgcaagccggggtgcagagagctggcctaccgcagcagcagccccagcagcagttgcagccgcccatgggaggaatgtccccccaagcgcaacagatgaatatgaatcataacaccatgccatcccagtttcgggatattcttagaaggcagcagatgatgcaacagcagcagcagcagggggccggacccgggatagggcctggtatggctaaccataaccaatttcagcaaccacagggggtgggctatccaccccagcaacaacagagaatgcagcatcatatgcagcaaatgcagcaggggaacatgggccagatcggccagcttccacaagccctgggcgccgaggcaggtgcaagcctgcaggcatatcagcagaggttgctgcagcaacagatgggatctccagtacagcccaaccctatgtcacctcagcagcacatgctgccaaatcaagcacaaagcccccacctgcaggggcagcagatccccaatagcctcagcaatcaggtgcgcagccctcagcctgtccccagtccgcggccccagtcccagccaccccactccagtccaagcccccggatgcagcctcagcctagcccccaccatgtgtcgccgcagacgtccagcccacacccaggcctcgtggccgctcaggccaaccctatggaacagggacattttgcctcaccagatcagaatagtatgctttcccagctggcctcaaatcctggaatggcgaacctccacggcgcaagcgccactgatctcggcctttcaactgataattctgacctaaacagtaatctgtcacagtctacactcgacatccattag

SEQ ID NO: 295866 - DNA, 7245 bp, Artificial Sequence
  derived and/or modified sequence
atggctgaaaatgtggtggagcccggcccccccagcgccaagaggcccaagctgagcagccctgccctgagcgccagcgccagtgatggaacagactttggcagcctgtttgacctggagcatgacctgcctgatgagctgatcaacagcacagagctgggcctgaccaatggaggagacatcaaccagctgcagaccagcctgggcatggtgcaggatgctgccagcaagcacaagcagctgtctgagctgctgcggagcggcagcagccccaacctgaacatgggcgtgggcggccctggccaggtgatggccagccaggcccagcagagcagccctggcctgggcctcatcaacagcatggtgaagagccccatgacccaggccggcctgaccagccccaacatgggcatgggcaccagcggccccaaccagggccccacccagagcacaggcatgatgaacagccctgtgaaccagcctgccatgggcatgaacacaggcatgaatgccggcatgaaccctggcatgctggccgctggaaatggccagggcatcatgcccaaccaggtgatgaatggcagcatcggggccggccggggccggcagaacatgcagtaccccaaccctggcatgggcagcgctggcaacctgctgacagagcccctgcagcagggcagcccccagatgggcggccagacaggcctgcggggcccccagcccctgaagatgggcatgatgaacaaccccaacccctacggcagcccctacacccagaaccctggccagcagattggagccagcggcctgggcctgcagatccagaccaagacagtgctgagcaacaacctgagcccctttgccatggacaagaaggctgtgcctgggggcggcatgcccaacatgggccagcagcctgccccccaggtgcagcagcccggcctggtgacccctgtggcccagggcatgggcagcggggcccacacagctgaccctgagaagaggaagctgatccagcagcagctggtgctgctgctgcacgcccacaagtgccagaggcgggagcaggccaacggggaggtgcggcagtgcaacctgccccactgcaggaccatgaagaatgtgctgaaccacatgacccactgccagagcggcaagagctgccaggtggcccactgtgccagcagccggcagatcatcagccactggaagaactgcaccaggcatgactgccctgtgtgcctgcccctgaagaatgctggggacaagaggaaccagcagcccatcctgactggagcccctgtgggcctgggcaaccccagcagcctgggcgtgggccagcagagcgcccccaacctgagcacagtgtcccagattgaccccagcagcattgaaagagcctatgctgccctgggcctgccctaccaggtgaaccagatgcccacccagccccaggtgcaggccaagaaccagcagaaccagcagcccggccagagcccccagggcatgaggcccatgagcaacatgtctgccagccccatgggcgtgaatggaggagtgggcgtgcagacccccagcctgctgagtgacagcatgctgcacagcgccatcaacagccagaaccccatgatgtctgaaaatgcctctgtgcccagcctgggccccatgcccacagctgcccagcccagcaccaccggcatcaggaagcagtggcatgaggacatcacccaggacctgaggaaccacctggtgcacaagctggtgcaggccatcttccccaccccagaccctgctgccctgaaggacaggaggatggagaacctggtggcctatgccaggaaggtggagggggacatgtatgagagcgccaacaacagagctgagtactaccacctgctggccgagaagatctacaagatccagaaggagctggaggagaagaggaggacccggctgcagaagcagaacatgctgcccaatgctgctggcatggtgcctgtgtccatgaaccctggccccaacatgggccagccccagcccggcatgaccagcaatggccccctgcctgaccccagcatgatccggggctctgtgcccaaccagatgatgccccgcatcaccccccagagcggcctgaaccagtttggccagatgtccatggcccagccccccatcgtgccccggcagaccccacccctgcagcaccacggccagctggcccagcccggggccctgaacccccccatgggctacggccccaggatgcagcagcccagcaaccagggccagttcctgccccagacccagttccccagccagggcatgaatgtgaccaacatccccctggcccccagcagcggccaggcccctgtgtcccaggcccagatgagcagcagcagctgccctgtgaacagccccatcatgcctcctggcagccagggcagccacatccactgcccccagctgccccagcctgccctgcaccagaacagccccagccctgtgcccagcaggacccccaccccccaccacaccccacccagcattggagcccagcagcccccagccaccaccatcccagcccctgtgcccaccccaccagccatgcctcctggcccccagagccaggccctgcaccccccaccccggcagacccccaccccacccaccacccagctgccccagcaggtgcagcccagcctgcctgctgcccccagcgctgaccagccccagcagcagcccaggagccagcagagcacagctgcctctgtgcccacccccacagcccccctgctgcccccccagcctgccacccccctgagccagcctgctgtgtccattgagggccaggtgagcaacccccccagcaccagcagcacagaggtgaacagccaggccatcgccgagaagcagcccagccaggaggtgaagatggaggccaagatggaggtggaccagcctgagcctgctgacacccagcctgaggacatcagcgagagcaaggtggaggactgcaagatggagagcacagaaacagaggagaggagcacagagctgaagacagagatcaaggaggaggaggaccagcccagcaccagcgccacccagagcagccctgcccctggccagagcaagaagaagatcttcaagccagaggagctgcggcaggccctgatgcccaccctggaggccctgtaccggcaggaccctgagagcctgcccttccggcagcctgtggacccccagctgctgggcatcccagactactttgacatcgtgaagagccccatggacctgagcaccatcaagaggaagctggacaccggccagtaccaggagccctggcagtatgtggatgacatctggctgatgttcaacaatgcctggctgtacaacaggaagaccagccgggtgtacaagtactgcagcaagctgtctgaggtgtttgagcaggagattgatcctgtgatgcagagcctgggctactgctgcggcaggaagctggagttcagcccccagaccctgtgctgctacggcaagcagctgtgcaccatccccagagatgccacctactacagctaccagaaccgctaccacttctgtgagaagtgcttcaatgagatccagggcgagagcgtgtccctgggagatgaccccagccagccccagaccaccatcaacaaggagcagttcagcaagaggaagaatgacaccctggaccctgagctgtttgtggagtgcacagaatgtggcaggaagatgcaccagatctgtgtgctgcaccacgagatcatctggccagctggctttgtgtgtgatggctgcctgaagaagagcgcccggaccaggaaagaaaacaagttcagcgccaagaggctgcccagcacccggctgggcaccttcctggagaacagagtgaatgacttcctgcggcggcagaaccaccctgagagcggggaggtgacagtgcgggtggtgcacgccagtgacaagacagtggaggtgaagccaggcatgaaggccaggtttgtggacagcggggagatggccgagagcttcccctaccgcaccaaggccctgtttgcctttgaggagattgatggagtggacctgtgcttcttcggcatgcacgtgcaggagtatggcagtgactgccccccacccaaccagaggagagtgtacatctcctacctggacagcgtgcacttcttccggcccaagtgcctgaggacagctgtgtaccacgagatcctgattggctacctggagtatgtgaagaagctgggctacaccaccggccacatctgggcctgccccccatctgaaggagatgactacatcttccactgccaccccccagaccagaagatccccaagcccaagaggctgcaggagtggtacaagaagatgctggacaaggctgtgtctgaaagaattgtgcatgactacaaggacatcttcaagcaggccacagaggaccggctgaccagcgccaaggagctgccctactttgaaggagacttctggcccaacgtgctggaggagagcatcaaggagctggagcaggaggaggaggagaggaagcgggaggagaacaccagcaatgaaagcacagatgtgaccaagggggacagcaagaatgccaagaagaagaacaacaagaagaccagcaagaacaagagcagcctgagccggggcaacaagaagaagccaggcatgcccaacgtgtccaatgacctgagccagaagctgtatgccaccatggagaagcacaaggaggtgttcttcgtcatccggctgattgctggccctgctgccaacagcctgccccccatcgtggaccctgaccccctcatcccctgtgacctgatggatggaagagatgccttcctgaccctggcccgggacaagcacctggagttcagcagcctgcggcgggcccagtggagcaccatgtgcatgctggtggagctgcacacccagagccaggacagatttgtgtacacctgcaatgaatgcaagcaccacgtggagacccgctggcactgcaccgtgtgtgaagattatgacctgtgcatcacctgctacaacaccaagaaccacgaccacaagatggagaagctgggcctgggcctggatgatgagagcaacaaccagcaggccgccgccacccagagccctggggacagccggcggctgagcatccagcgctgcatccagagcctggtgcacgcctgccagtgcagaaatgccaactgcagcctgcccagctgccagaagatgaagagggtggtgcagcacaccaagggctgcaagaggaagaccaacggcggctgccccatctgcaagcagctgattgccctgtgctgctaccacgccaagcactgccaggagaacaagtgccctgtgcccttctgcctgaacatcaagcagaagctgcggcagcagcagctgcagcaccggctgcagcaggcccagatgctgcggcggaggatggcctccatgcagaggactggagtggtgggccagcagcagggcctgcccagccccaccccagccacccccaccacccccaccggccagcagcccaccaccccccagaccccccagcccaccagccagccccagcccaccccacccaacagcatgccaccctacctgcccaggacccaggccgccggccctgtgtcccagggcaaggccgccggccaggtgaccccacccaccccaccccagacagcccagccccccctgcccggccccccacctgctgctgtggagatggccatgcagatccagagagctgctgagacccagaggcagatggcccacgtgcagatcttccagaggcccatccagcaccagatgccacccatgacccccatggcccccatgggcatgaaccccccacccatgacccggggccccagcggccacctggagcccggcatgggccccaccggcatgcagcagcagcccccctggagccagggcggcctgccccagccccagcagctgcagagcggcatgcccaggcctgccatgatgtctgtggcccagcacggccagcccctgaacatggccccccagcccggcctgggccaggtgggcatcagccccctgaagccaggcaccgtgtcccagcaggccctgcagaacctgctgcggaccctgcggagccccagcagccccctgcagcagcagcaggtgctgagcatcctgcacgccaacccccagctgctggccgccttcatcaagcagagagctgccaagtatgccaacagcaacccccagcccatccctggccagcccggcatgccccagggccagcccggcctgcagccccccaccatgcctggccagcagggcgtgcacagcaacccagccatgcagaacatgaaccccatgcaggccggcgtgcagagagctggcctgccccagcagcagccccagcagcagctgcagccccccatgggcggcatgagcccccaggcccagcagatgaacatgaaccacaacaccatgcccagccagttccgggacatcctgcggcggcagcagatgatgcagcagcagcagcagcagggcgccggccctggcatcggccctggcatggccaaccacaaccagttccagcagccccagggcgtgggctacccaccccagcagcagcagaggatgcagcaccacatgcagcagatgcagcagggcaacatgggccagatcggccagctgccccaggccctgggcgctgaggccggggccagcctgcaggcctaccagcagaggctgctgcagcagcagatgggcagccctgtgcagcccaaccccatgagcccccagcagcacatgctgcccaaccaggcccagagcccccacctgcagggccagcagatccccaacagcctgagcaaccaggtgcgcagcccccagcctgtgcccagcccccggccccagagccagcccccccacagcagccccagccccaggatgcagccccagcccagcccccaccacgtgagcccccagaccagcagcccccaccctggcctggtggccgcccaggccaaccccatggagcagggccactttgccagcccagaccagaacagcatgctgagccagctggccagcaaccctggcatggccaacctgcacggggccagcgccacagacctgggcctgagcacagacaacagcgacctgaacagcaacctgagccagagcaccctggacatccactag

SEQ ID NO: 295867 - DNA, 7245 bp, Artificial Sequence
  derived and/or modified sequence
atggccgagaacgtggtggagcccggcccccccagcgccaagcggcccaagttgtccagccccgccctctctgcttctgcaagcgatggcaccgatttcggctccctgttcgatctcgagcacgacttgccagatgaacttataaacagcaccgaacttgggttgaccaatggcggcgacattaaccagcttcaaacctctctggggatggtgcaggatgccgcctcaaagcacaagcagttgtccgagttgttgcgaagtggaagtagtcccaatctgaacatgggagtggggggccccggccaggtcatggcgtcccaggctcagcaaagctcacccggcctgggccttattaattccatggtgaagagccccatgactcaagccgggctgacatctccaaatatgggcatgggcacaagcgggcccaaccaaggtcctactcagtctacgggaatgatgaatagccctgtgaatcagcctgcaatgggcatgaatacaggtatgaatgccggaatgaaccccgggatgctggccgcaggaaatggacaggggataatgccaaaccaggtcatgaatgggtccatcggagccgggcgcggcaggcagaatatgcagtacccaaatcccggaatggggtccgcaggcaacctgctaaccgagccgctccagcagggctctccccagatggggggccaaacgggcttgcggggccctcagccactgaagatggggatgatgaataatcctaatccatatggaagtccatatactcagaatcctgggcagcagattggcgcaagtggtctgggtttacagatccaaactaaaacagtgctgagcaacaacttgagcccttttgccatggataagaaagccgtgcccggaggggggatgccaaacatgggacagcaaccagcaccacaggtgcagcaacccggcttggtaaccccagtggcacaagggatgggttccggggcccatacagcagaccccgaaaagagaaagcttatccaacagcagttagtactgttattgcacgcccacaagtgccagcggcgcgagcaggctaacggggaggtgcggcagtgtaatctgccacactgtagaaccatgaagaatgtgcttaaccacatgactcactgccagagcgggaaaagttgtcaggtggcacattgtgcgagtagcagacagattatctctcattggaagaactgcaccaggcatgattgcccagtctgtctgcctctcaagaacgctggagataaacggaatcagcagcccattctgactggtgcgccagtgggtctgggtaatccaagcagcctgggcgtgggccaacaatccgcacctaatttgagtacagtatctcagatagaccctagctcaattgagcgcgcatacgccgctctgggcttaccgtaccaagttaatcagatgccaacgcaaccgcaggtgcaggccaagaatcagcagaatcagcagccgggacagtcccctcagggaatgaggccaatgtcaaatatgtccgcgagtccaatgggcgtgaatggcggcgtcggcgtacagaccccaagcctattaagcgatagcatgctccactccgccattaatagtcagaatcctatgatgtctgaaaacgccagtgtgccttcacttggcccaatgcctaccgctgcacagcctagtaccacggggattcgtaagcagtggcatgaggatattactcaggatctacggaaccacctggtgcataagctcgttcaggcaatattcccaacacccgatcccgccgccctcaaggatagaagaatggaaaacttagtggcttacgcccgcaaagtggagggggatatgtacgagtccgccaataaccgcgccgagtattatcaccttctcgcagagaaaatatacaaaatccagaaggagctggaggaaaagagaaggacccgacttcagaaacaaaacatgcttcccaacgccgcggggatggtcccagttagcatgaaccctggccctaatatgggacaacctcagcccggtatgacttcaaatggcccactgcctgatccctcaatgattcgtgggagcgtacccaatcagatgatgccccggatcaccccccagtccggcttaaatcaattcggacaaatgtccatggctcagccaccaattgtacccaggcagacacctccccttcagcatcacggtcagcttgctcagcccggagcgctcaacccgccaatgggctacggtccacgcatgcagcagccttctaaccagggtcaatttcttccccagacccagtttccatctcagggcatgaatgtgacaaatatacctttggccccgtcctctgggcaggccccagttagccaggcacaaatgagcagttcttcttgtcctgtaaatagccccatcatgcctcctggatcccaggggtcccacatccactgccctcaacttccacagccagccttacaccaaaattcaccctctccagtgccctctcgaacacccacacctcaccacactcctcccagtatcggggctcagcaaccccccgctacaaccatccctgcccctgtccctaccccaccggccatgccacctgggccccaaagtcaagcattacacccccctcccaggcagaccccgacacctcctacaacacagctgccccagcaggtgcagcctagcctccctgccgccccttccgcagatcagccacagcaacagccaaggagtcagcagagtaccgcggcgagcgtgcccaccccgacagccccactgttgccaccccagcctgctacacctctctcccaaccggctgtttctattgaaggtcaggtgagcaatcctccctctacatcatctacggaagttaattctcaggcaatcgcagaaaaacagccgtcgcaggaggtgaagatggaggctaaaatggaagtggatcagccggagccagccgacacccagcccgaagatatctctgagtctaaggtcgaagattgtaagatggagagcaccgaaactgaagagcggtcaacagagctgaagacagagattaaggaggaggaagatcaacctagcaccagtgcgactcaatccagccctgcgcctggccaaagcaaaaagaagatcttcaaacccgaggagctccggcaggcccttatgcctacactggaggccctttaccgccaggaccccgagtctctcccctttagacagccggtggacccacagctgctcgggattcctgactacttcgacatcgtcaaaagccccatggatctgtccacaataaagaggaaactggacacaggccagtaccaagagccatggcagtacgtagatgatatctggctcatgtttaacaacgcgtggttatataatcggaaaacctctagagtttacaagtactgctccaagctcagtgaggtttttgagcaggagattgaccctgtgatgcagtctctaggatactgttgtgggcgtaagctcgagttttctccccaaacactgtgttgttatggtaagcagctttgcaccattccaagagatgcgacatattactcttaccaaaacaggtaccatttttgcgaaaagtgttttaatgagatccagggagagtcggtaagcctgggcgatgatccgtcccagcctcaaactacaataaataaggaacagttcagcaagcggaagaacgacacactggatccagaattgttcgtggagtgcaccgagtgtggcagaaagatgcaccagatttgtgtgcttcaccacgagataatttggcccgcaggttttgtgtgcgatggatgtttgaaaaaaagcgcccggacccgaaaggaaaacaagttttctgcaaagcgactacccagtacccgactcggcacattcttagaaaacagggtcaacgatttcttgcgtaggcagaaccacccagagtcaggcgaggtcaccgtcagggtcgtgcatgccagcgacaaaaccgtggaagttaagccgggcatgaaggctcgatttgtggacagcggcgagatggccgaatcgttcccttataggacaaaggcgctcttcgcctttgaagaaattgacggcgtggacctctgctttttcggaatgcatgtccaggaatacgggagcgactgcccgcccccaaatcaacgtagagtgtatatctcctacctcgattcagtgcatttttttaggcctaaatgcctgcgcaccgccgtgtaccacgaaatactgattggataccttgaatatgttaagaagctgggatacactactggtcacatttgggcctgtccacccagcgagggcgatgactatattttccattgtcaccctccagaccagaaaattcctaagccgaagcgactccaggagtggtataagaaaatgttagacaaagcagtatccgaacgcatcgtgcacgattataaagatatctttaagcaagccactgaggatcgcctaacctcagccaaagaactcccttattttgaaggggatttttggcccaacgtgttagaggagagtatcaaagagctggaacaggaagaagaagagagaaaaagagaagaaaatacaagcaacgaatctactgatgtgaccaaaggcgatagcaagaacgctaagaaaaaaaataacaagaagaccagcaaaaacaagtcctccctgtcaagggggaataagaaaaaacccggaatgccgaatgtatctaacgatctaagccaaaagctctatgctaccatggaaaagcataaagaggtctttttcgtaattagactgatcgcaggccctgccgcaaatagcctgccgcctattgtggatcctgaccctttgatcccctgcgacttgatggacggccgggacgcttttctgacactggcacgagataagcatcttgagttcagttctctgagaagagctcagtggagtaccatgtgtatgctggtggaacttcacactcaaagccaggaccgctttgtctacacatgcaatgaatgcaaacaccatgtggaaacacgttggcattgtaccgtgtgtgaggattatgacttgtgcatcacctgttataacaccaagaatcatgatcacaaaatggaaaagctgggactgggattagacgacgaatccaacaatcagcaggcagccgctacccagagtcctggggactcccggaggctctcaatccagcgatgtattcagtccttagtccatgcttgccagtgtaggaacgcaaactgcagcctccccagctgccagaaaatgaagcgagtagtacagcacacgaaaggctgcaagcggaaaactaacgggggatgccccatctgtaaacagcttattgccctgtgttgctaccatgctaaacactgtcaggaaaacaagtgtcccgtccccttttgtctgaatatcaaacaaaagctgcgtcagcagcagctccaacaccgcctgcagcaggcacagatgttgcggcgtcggatggcatccatgcagcggaccggtgtggtcggccagcagcaggggctgccctctcccacacccgccacccctacaaccccaactggtcagcagcctactacaccccaaacaccacaacctacttcgcaacctcagcccactcccccaaacagcatgccaccatatctgccccggactcaggcggctggccctgtgtcccagggcaaggcagcaggtcaagttaccccgcctacccctcctcaaactgctcaaccaccccttccggggccacctcctgcagctgtggagatggccatgcaaattcaacgagccgccgagacacagaggcagatggcccacgttcaaatcttccagcggccaatacagcaccagatgcccccgatgacacctatggccccaatggggatgaatcccccaccaatgacccggggccctagtggacatctagaacccgggatgggtcccactggtatgcaacagcagcctccatggtcacagggcggactgccgcagccgcagcagttgcagtccggaatgccccggcccgcaatgatgtctgtagcacagcatggccagccacttaatatggcgcctcagcctggtctgggacaggtgggtattagtcccctgaagcctggaactgtgtcgcagcaagctctccaaaacctgctgcggactctgcgatcaccctctagtccacttcagcagcagcaagtcctgtctattctccatgctaaccctcagctcttagcagctttcataaaacaaagggctgcaaaatacgctaactcaaacccccagcctatccccggccaacccggaatgccacaggggcagccaggcctgcagcccccgacaatgcctggccagcagggtgtgcattcaaacccagcaatgcaaaacatgaacccaatgcaagcaggtgtgcaaagggccggtctgccacagcagcagccgcagcagcagctgcagcccccaatgggcggcatgagtccacaagcccagcagatgaatatgaatcataacacaatgccatcccagttcagagatatactgcgcagacagcagatgatgcagcagcagcagcagcagggcgcaggccctggaattgggcctggcatggccaaccacaatcaattccaacagccccaaggagtgggatatccacctcagcagcaacagagaatgcagcatcatatgcagcagatgcaacagggcaatatgggccaaatcggacagctgccacaggcactgggggccgaggcgggggcgtccctgcaggcctatcagcaacgtctgctgcagcaacagatgggttcccccgtgcaaccgaaccccatgtctccacaacagcacatgctgcccaatcaggcgcagtcccctcatctgcagggccagcaaataccaaactcactctccaatcaggtgcggtctccccagccggtgcccagtcccagaccacagtcccaaccgccgcacagttcccctagccctcggatgcagccccagccttcaccgcatcatgtctctcctcagacgagttccccccatcccggtcttgtggccgcccaggcaaatcctatggaacaggggcacttcgcctccccggatcagaacagcatgctttctcagctcgcttctaaccccggtatggccaacctgcacggcgcatctgctaccgatctgggcctttctacagacaatagcgatctgaacagtaacctgagccaatccacactggacatccactag

SEQ ID NO: 295868 - DNA, 7245 bp, Artificial Sequence
  derived and/or modified sequence
atggcggaaaacgttgtggagcctggacccccttccgcaaagagaccaaaattgagtagtccagcactgagtgccagtgcgtctgacgggacagactttggctccttgttcgatttagaacatgacctgcctgatgaactgatcaactcgacggagctgggactaacgaatggcggagatatcaatcaactgcagacatccctgggcatggtccaggatgctgcttcaaagcataaacagctgtcagagctgttgagatcgggctctagcccaaacctaaatatgggggtgggtggcccagggcaggttatggcctcgcaggctcagcagtcatctcctggcctgggactgatcaacagtatggtgaagagcccaatgacacaggccggactaacatcccctaatatgggcatggggacctctggaccaaaccaggggcctacgcagagcacagggatgatgaacagtcccgtgaaccaaccagccatgggaatgaataccggcatgaacgcaggtatgaacccaggaatgcttgcagccggaaacggacagggtatcatgccaaaccaagtcatgaacggatccattggcgctggaagaggacgacagaacatgcagtaccccaaccccggaatggggagcgcaggaaacttgctgaccgagccactacagcagggctcaccgcagatgggcggtcagacagggttgcgaggccctcagcctctgaagatgggaatgatgaacaatccaaacccttatgggagcccgtacactcaaaacccgggtcaacagatcggggcttccggtttgggtcttcagattcagaccaaaactgtcctctcaaataacctgtcaccttttgccatggacaaaaaagctgttcctgggggtggtatgcctaatatgggccagcagccagctccccaggtccagcagcctggactcgtcactccagttgcccagggtatggggtcaggcgctcacacggcagacccagaaaagcggaaattaatccagcagcaactggtcctgcttctgcatgcgcataaatgtcagaggagagagcaggccaatggcgaggtcaggcagtgcaatttacctcactgccgtaccatgaagaacgtgctgaatcacatgacgcattgccagtccgggaagtcatgccaggtggcccactgtgcttcatctcgacagatcatatcccattggaagaactgtacgcgacacgattgtcccgtttgcctgccactgaaaaatgctggcgataaacgaaaccagcagcccatcttaacgggcgcacctgttggactcggcaatccttcctcactgggtgttggtcagcagagcgccccaaatttgtctaccgtgagccagattgaccccagctcgattgagagggcgtatgccgctctaggcctgccttaccaagtgaaccaaatgcctacacagccacaggtccaggcaaaaaaccagcagaaccagcagccaggacagtctcctcagggcatgcgccctatgtccaacatgtcagccagccccatgggagtgaatggaggagtgggggtccagactccatcccttctgtctgattcaatgctacacagtgctattaattcccagaacccaatgatgagtgaaaacgcatcagtgccaagcctgggcccaatgccgactgctgcacagccatccacaaccggcatacgtaaacagtggcatgaagacattactcaggatttgcgcaatcacctggtccacaagctcgtccaggctatattcccgacaccggacccggcagcacttaaggaccgccgaatggaaaatctggtggcctacgctcggaaagtggagggtgacatgtatgaatccgctaataatcgagcagaatactatcatctccttgccgagaaaatttacaaaatccaaaaagaactagaagaaaaaagaaggactagactgcagaaacaaaacatgctccccaatgctgccggtatggtcccagtgagcatgaatcctggcccaaatatgggacagccacagccaggaatgacttctaacgggccattacctgatcccagcatgatccgaggtagcgtccctaaccagatgatgccaagaataacacctcaatcaggcctgaatcaattcggtcaaatgtctatggcccagccacctattgtgccacggcagacaccccctctgcagcatcacgggcaactcgctcagcctggtgccctgaaccctcccatgggctacggccctagaatgcagcagccaagcaatcagggccaattcctgccacaaacacaattcccaagccagggtatgaacgtcacgaacatccctctggcaccttccagtggacaggcgccagtgtcacaagcacagatgtcaagcagcagctgccctgttaacagccctatcatgccaccaggctcccaaggttcacatatacactgcccacagcttccacaacctgcactccaccaaaactcaccctcacccgtgccctcacggacccccactccccatcatactccgcctagcatcggggctcagcaaccacccgcaacgacaatccccgcacccgtccctaccccaccagcaatgcctcctgggcctcagagtcaggccctgcatccaccgccacgccagacacctacacctcccaccacacagcttccccagcaggtccagccctcactaccggctgcccctagtgcagatcagccccagcaacagcccagatctcaacagtctacagcggcttccgtccctaccccaacagctcccttgctcccaccacagcctgccacccccctttcccagcccgcagtgagcatagagggccaggtgagcaacccccctagcacctcaagcacagaagttaacagccaggcaatcgcagagaaacagccgagtcaagaggtaaaaatggaggcaaaaatggaagtcgatcagcccgaacccgctgacactcagcccgaggacatctcagaaagcaaagttgaggactgtaagatggagagcacggagacagaggaacggagtacagagctgaaaacagaaattaaagaagaggaggaccagccttctacgtccgccactcaatcgtccccagcaccgggacagtcaaaaaaaaagatctttaagccagaagaactgcgccaggccttaatgcccacactggaggccctgtaccgccaggatcccgagagcctgcctttccggcagcccgtggatcctcagcttctcggcattcccgattattttgatatcgtcaagtcgcctatggatttaagcacaataaagcgcaaactggataccggacagtaccaggaaccctggcagtatgtggacgacatttggctgatgtttaacaacgcctggctctacaatcggaagacaagcagagtctacaaatattgcagcaagttgagtgaggtatttgagcaagagattgaccctgtgatgcaatctctgggttattgctgcgggaggaagttagagttctctccacagactctgtgttgttacgggaaacagctctgtacgatccccagggacgcaacctactacagctaccagaacaggtatcacttctgcgaaaagtgctttaacgagattcagggcgagagtgtctctctgggcgacgatccctcccagcctcagaccacaatcaacaaggagcagttcagcaagagaaagaatgatacactggaccctgaactcttcgtggagtgcactgaatgtggaagaaaaatgcaccagatatgcgtcctgcatcatgaaattatttggccagctggcttcgtttgtgacggctgtctgaaaaagtctgcgagaacacggaaagaaaacaagttctccgcgaaacggttgccctcgacaaggcttggcacttttctcgaaaatagagtcaacgactttcttcggagacagaaccatcctgagagcggtgaggtaacagtgagagtcgtacacgccagcgataagaccgtcgaagtcaaacctggaatgaaagctagatttgttgattctggggagatggctgagtcttttccctacaggacgaaggctctttttgccttcgaggaaatcgatggcgtggacctctgcttcttcggcatgcacgttcaggagtacgggagcgactgccctcccccaaaccagcggcgagtctacattagctatctggatagcgtacatttctttagaccgaagtgtcttcggactgctgtgtatcacgaaatactgataggctaccttgagtacgtgaagaagttaggctacaccacaggacatatttgggcctgtcctccttctgagggcgatgactacatctttcactgtcacccacctgaccagaaaatcccaaaacccaagcgcctccaggagtggtataaaaagatgctggataaagccgtcagcgaaaggatcgtccatgactataaagatattttcaaacaggcaaccgaggaccggctgacctcagctaaggagctgccttactttgagggcgatttttggccgaacgtactcgaagagagcattaaagagctggagcaagaagaagaagaacgcaaacgcgaagagaatacctctaacgagagtactgacgttactaaaggtgacagtaaaaatgctaaaaaaaaaaataacaaaaaaacctcaaaaaacaagagctccctatcgcgtggtaacaaaaaaaaacccggaatgccgaacgtgtcaaatgatctgtctcagaagctgtatgctacgatggaaaagcacaaagaagtgtttttcgttattcgattaatcgctggccctgccgctaactccttgcctccaatagtggacccagatccacttattccttgtgatctcatggatggaagagatgcctttctgactctggctcgcgacaagcacttggagttctccagccttagacgggcacagtggtccacaatgtgtatgttagtcgagctgcacacacagtcccaggatagattcgtctatacttgcaacgagtgcaaacatcatgtcgagactagatggcattgcacggtctgtgaggactatgatctgtgtattacatgttacaacaccaaaaaccacgaccacaagatggagaagctgggattgggcctggacgatgagtccaataaccagcaggcagccgcaacccaatcgcccggtgactctcgacgactctcaatccaaaggtgcatacaatctttggtgcacgcctgtcagtgtcgcaatgccaactgcagcctgccgagttgtcagaaaatgaagcgggtggttcaacacacaaagggctgcaaacggaaaactaacggaggatgcccgatatgtaagcagctcatcgccttgtgttgctaccacgctaagcactgtcaggagaacaagtgtcctgttcccttctgcctgaatatcaaacagaagttgaggcagcagcaactgcagcatcgcttgcaacaagctcagatgctaaggcgacgcatggcatcaatgcaaaggaccggtgttgtcggccagcagcaggggctgccatcccctaccccagcaactcccacgacgcctactgggcagcagcccacaacccctcagacaccacagcctactagccagccacagcccacgcctcctaactccatgcctccttatctgccccgtacacaggctgcaggtcctgtgagtcaaggaaaggccgctggccaggtaaccccccctacccctcctcagaccgcccagccaccgctccccggacctcctccagccgctgtcgagatggccatgcagatccagcgggctgccgaaactcaacgccagatggcccacgtgcagatattccaacgcccaatacagcaccaaatgccccctatgaccccgatggcccctatggggatgaacccaccccctatgacacgcggaccttccgggcacctggaacccggaatggggcctaccggcatgcaacagcagccaccatggtctcagggcggtctccctcagccccaacagctgcagagcgggatgccgcgacctgccatgatgtctgtagcgcagcacgggcagcccctgaacatggcaccgcaaccgggtctcgggcaggtcggtatcagccccctgaagccgggaaccgtgtcgcagcaagccctccagaacctgttgaggactctcagatccccaagtagccccctccagcaacaacaggtcttatcaatactgcatgcaaatcctcagctgctggccgcattcatcaaacagcgggcagcaaagtatgctaactctaatccccagcccatccccggtcagcccggtatgccccaggggcaaccaggacttcaacccccaacgatgccaggccaacagggcgtgcatagcaaccccgctatgcagaatatgaaccccatgcaagccggtgtgcaacgtgccggtctcccccagcagcagccacaacagcaactgcaacccccaatgggaggaatgtctccgcaggctcaacagatgaacatgaatcacaatactatgccatcccagttcagagatatcctccgaagacagcagatgatgcaacagcagcagcagcaaggagccggacccggaatcgggcctggtatggcaaatcataatcagttccaacagccacagggggtgggctatccccctcagcagcagcaacggatgcagcatcacatgcagcaaatgcagcagggtaacatgggtcagataggtcagttgcctcaggcccttggcgctgaggccggagccagcctccaggcgtaccaacaaaggctgttgcaacagcagatgggtagtcccgttcagccaaatcccatgtcccctcagcagcacatgctccccaaccaggcccagtccccccacctgcaaggtcaacagatcccaaacagtctctctaaccaagtgcgctctccccaacccgtgcctagcccaaggcctcagtctcagccgccacacagcagccccagtccgagaatgcagccacagccgagcccgcaccatgtgtccccccagacgtcgagcccgcacccgggtctggtggcagcccaggccaaccccatggagcaggggcacttcgcctcccctgatcagaattccatgctgagccagctagcctctaacccaggaatggctaatcttcacggagcttctgcaaccgacttaggcctctctaccgataatagcgacttgaacagcaatctgagccagtctactctggatattcactat

SEQ ID NO: 295869 - DNA, 456 bp, Artificial Sequence
  derived and/or modified sequence
atgctgcgctggtttgtgcagcagcccaccagctgcagccacgcccagcccctgcccccaccccacggcacagccagcctgagccccctggtgcccagctgtggcagcgctgcctggcccagcctgcactacctgggcagccctgctgacagcggctgcagccggggccagagggccctgcctgctgtgtggccacccagctgctacagccagtgcccccagggccggcccccccaccctgtgcccaggagcccccggcggggcagccgggacctgggcaaggagcccggggaggaggccgccccctggcccagcccctgtgacagccggctgcaccgccaccccatgcccaggacccccctgagcgccagcgctggctgtgaccccagcctcatccagcccagcccccaccccaccccaccccagcagggctgtgtgacccccttccacaggtag

SEQ ID NO: 295870 - DNA, 180 bp, Artificial Sequence
  derived and/or modified sequence
atggccagcgagggcctggccggcgccctggccagcgtgctggccggacagggcagctccgttcatagttgcgatagtgctcctgcgggagaaccccccgcccctagagcaggatgcggacggacgtgtgcaacctggtgttggccctgcagttctgccagtagaatgcgatgctactag

SEQ ID NO: 295871 - protein, 578 aa, Artificial Sequence
  derived and/or modified sequence
MLRRLDKIRFRGHKRDDFLDLAESPNASDTECSDEIPLKVPRTSPRDSEELRDPAGPGTLIMATGVQDFNRTEFDRLNEIKGHLEIALLEKHFLQEELRKLREETNAEMLRQELDRERQRRMELEQKVQEVLKARTEEQMAQQPPKGQAQASNGAERRSQGLSSRLQKWFYERFGEYVEDFRFQPEENTVETEEPLSARRLTENMRRLKRGAKPVTNFVKNLSALSDWYSVYTSAIAFTVYMNAVWHGWAIPLFLFLAILRLSLNYLIARGWRIQWSIVPEVSEPVEPPKEDLTVSEKFQLVLDVAQKAQNLFGKMADILEKIKNLFMWVQPEITQKLYVALWAAFLASCFFPYRLVGLAVGLYAGIKFFLIDFIFKRCPRLRAKYDTPYIIWRSLPTDPQLKERSSAAVSRRLQTTSSRSYVPSAPAGLGKEEDAGRFHSTKKGNFHEIFNLTENERPLAVCENGWRCCLINRDRKMPTDYIRNGVLYVTENYLCFESSKSGSSKRNKVIKLVDITDIQKYKVLSVLPGSGMGIAVSTPSTQKPLVFGAMVHRDEAFETILSQYIKITSAAASGGDS

SEQ ID NO: 295872 - DNA, 4316 bp, Artificial Sequence
  derived and/or modified sequence
cgtcatgttagggtgaagcagaggacctcagtgctgaacatgctaaggaggttggacaaaatcaggttcagaggtcacaagagagatgacttcctcgatctagcggagtctccaaatgcctcggacaccgaatgcagcgacgaaatccccctgaaggtaccgcggacctcgccccgggacagcgaggagctgagggaccctgctggtccagggaccctcatcatggccacaggagtccaggactttaaccggacagagtttgatcgactgaatgagatcaaaggtcacctggaaattgccttattggaaaaacatttcttacaggaggagctccggaagctgcgagaagaaaccaacgcggagatgctgcggcaggagctggaccgcgagcggcagcggcggatggagctggagcagaaggtgcaggaggtgctgaaggccagaaccgaggagcagatggctcagcagcccccaaaagggcaggcccaggccagcaatggagcagagcgccggagccaggggctgtcctcgcgcctgcagaagtggttctacgagcggtttggggagtacgtggaggacttccggttccagcccgaggagaacactgtggagacagaggaacccctgagcgcccgcaggttaactgaaaatatgagacggctcaagcgcggtgccaagccggtcactaactttgtgaagaacctctctgccttatccgactggtactccgtctacacgtctgccattgccttcaccgtgtacatgaatgccgtgtggcatggctgggccatcccattgttcttatttctagcaattctgaggttatccctcaattacctcatcgccagggggtggcggatacagtggagcatcgtgcccgaagtgtctgagcccgtggaacctccaaaggaagacctgactgtgtctgagaagttccagctggtgctggacgtcgcccagaaagcccagaaccttttcgggaagatggctgacatcctggagaagatcaagaacttgttcatgtgggtccagccggagatcacacagaagctgtatgtggcgctctgggctgccttcctggcctcctgcttcttcccctaccgcctggtggggcttgccgtgggactctatgctggtatcaagttcttcctcattgatttcatctttaaacgctgcccgaggctgcgcgccaagtacgacacgccctatatcatctggaggagtctccccaccgacccgcagctcaaggagcgctccagcgccgcagtctcacgcaggctgcagacgacctcgtcacggagctacgtacccagcgcaccggccggcctgggtaaagaggaggacgccggtcgcttccacagcaccaagaagggcaatttccacgagatcttcaatctgacagaaaacgagcgtccgctggcggtgtgcgagaatggctggcgctgctgcctcatcaacagggaccggaagatgcccacggactacatcaggaacggggtgctctacgtcacggagaattacttgtgcttcgaaagctccaaatctgggtcctcaaagaggaacaaagtcatcaagctagtggacatcacggacatccagaagtacaaggtcctgtctgtcctcccaggctcaggcatggggattgccgtgtcgacgccatccacccagaaaccgctcgtgtttggtgccatggtgcacagggatgaggccttcgagaccattctcagccagtacatcaagatcacctcagcggcagcgtctggcggggacagctagtattgacttgcccaggacgttgctggaattttctttttctttttctttttctttttttttttttacgatttggtagtggaaacaattggacatcctcatgagcttttgcaataattctcctggacctgtggttctattgtgttgacctctgcgttttatcgaccaagaaggggccagggctcacagggacgggggtgcccctctcccacagggcacgtcaggtgcctctgagggccacccgcagactgggggagggggcagaggccctcgggggcccgtggagaagacacacaggacccctggccctgcccttctccgttccagcctggacagagaaacctctccagccaccccaagaggttctcgcaaccttgtgtcccgctctccagaggccagaagctcgtccaccaccaaagccatagctgaagagtgcggggcccttcctcctggggacagaaagatgtcgtcaaggagggacatgggggcctttcaccaaccaccgagaaacgggcctggcggccctccttcctcttacatgagaccctcctgtggcatttgcccttggtgccgggctggggccgggcgcagtgaccctgcctgcgctccacactcgctccacgggaacagagagggtgagaagggcccacccctcgcctgccctcagtgtctttggtggcaccttccttgctggcctccagggcgctcagcaccgcgtctgtaagggcctgcctgctgctctcggcctgacacgccggccaggaggtctgtagctggggaccagtaagggcacaggatggtgcaggtaaaagcacatctttctcacactttgctctttggaaggcccaggagaacatccgcgaaggctgttggaggtgctccgagcactgtggcatgtctggcacatggcccccaggctgcggttgcctgggttggttgggggaggaagtggggaggagtgttccgggaccatggtggcccaggctgcagccgcctttgggccatccgagaggctctggcagcccctgtgctttagggagcaaccgtgagccgagcccagaggcctgggcctgcactgcctgcagccgacatgcgacagcgttccctcccccgcgtgcctagccggtgccggtccgggcacagacccccccagcccccgccctgccccagggaagcctgggcttcccgggaacaaggtggcatttgtggagggagcgcccgcaggcctggtctgctggggccgcctgcgctgggctgaagggagggaaaggcggcttgggcctcctggaaggaggtggccaccccgcgggcctgcgtgtctgctggggcggatcccgcagctccctcagcttgtcctgagtcccttgggtgtcgttgagattgttgttttttgaagaaacagaagattctattttttacagcgagcaagctggttttcttatttttgtatcctttttcagatgtaatttttatctttgctccgatcctcatttgctggtgtgggtgagggatccggcggcatgggctggtttcacccccttcacgaggggccgcagagtcacacgctggtgccgggggtgctttggggggagctgcgccgatcaccagattaagcacatgtcctatcccaggcggtggagcggagcccccgtggctctggactgcgcggacgttggcgtcaggatgaccacacggcggcctttcccgaatggggacagaacccgctctgagccgtgggtctggctcctgtaggggactggctctcttggtgcaccaggggagggggacatatcccagtgaaccccaccttggcgcctgaggcaacacagggtgggcactgacccacccccaggggcggctgcagaggcagtgcccgcagacaatggccacacctctctccccagggcccggcagtgcccaaggatgggtccggggcctcggggccaatgagcgcctcttcctaggtgctgggattcagtccccaaacacagcgggaggggtccctggggcagatggggctttaccagcgtcgggtggtttagttcgagtcccttttgtggagaaagggagatgaaaactgaccacgtgccaggtgtggccgaagcccccagggagggccacattcggggagcggggggtcgggggagggccaccgactggctctgctgccagcacaggcccctccctggaagtcctcgggagcggagcgcggatcggcacgggctctgggctccccgtggagagaagctgtagtttttaccaaattgtgtacatctgggcagatgtttaatttctgtgactaatcactgaactagacgaatgttaaattttttatgtctgaagcctgagtctattttggatctgtaaataatcattgccagtgtgacttttgttcaacaaaaggattgtactgtattaagaaccgatgaaaaaaattctcctgtaacatttttttaagaaaactttgtttgtttaaagaaaaagtattgtataaattataatttttatttaaataaacctaaaatgctttgtgctaaggctca

SEQ ID NO: 295873 - DNA, 4484 bp, Artificial Sequence
  derived and/or modified sequence
ctccaggctccagggcagcagacaccaccctctccgtgcctgctggtgttgggcggcttggaggctatggttcctgggtcctcgtagcacatcctggttctgggccaggacctgaaggagccacagtgaaagagtgtttctggatgtatctgagacagacggagggaacccgagcgtcatgttagggtgaagcagaggacctcagtgctgaacatgctaaggaggttggacaaaatcaggttcagaggtcacaagagagatgacttcctcgatctagcggagtctccaaatgcctcggacaccgaatgcagcgacgaaatccccctgaaggtaccgcggacctcgccccgggacagcgaggagctgagggaccctgctggtccagggaccctcatcatggccacaggagtccaggactttaaccggacagagtttgatcgactgaatgagatcaaaggtcacctggaaattgccttattggaaaaacatttcttacaggaggagctccggaagctgcgagaagaaaccaacgcggagatgctgcggcaggagctggaccgcgagcggcagcggcggatggagctggagcagaaggtgcaggaggtgctgaaggccagaaccgaggagcagatggctcagcagcccccaaaagggcaggcccaggccagcaatggagcagagcgccggagccaggggctgtcctcgcgcctgcagaagtggttctacgagcggtttggggagtacgtggaggacttccggttccagcccgaggagaacactgtggagacagaggaacccctgagcgcccgcaggttaactgaaaatatgagacggctcaagcgcggtgccaagccggtcactaactttgtgaagaacctctctgccttatccgactggtactccgtctacacgtctgccattgccttcaccgtgtacatgaatgccgtgtggcatggctgggccatcccattgttcttatttctagcaattctgaggttatccctcaattacctcatcgccagggggtggcggatacagtggagcatcgtgcccgaagtgtctgagcccgtggaacctccaaaggaagacctgactgtgtctgagaagttccagctggtgctggacgtcgcccagaaagcccagaaccttttcgggaagatggctgacatcctggagaagatcaagaacttgttcatgtgggtccagccggagatcacacagaagctgtatgtggcgctctgggctgccttcctggcctcctgcttcttcccctaccgcctggtggggcttgccgtgggactctatgctggtatcaagttcttcctcattgatttcatctttaaacgctgcccgaggctgcgcgccaagtacgacacgccctatatcatctggaggagtctccccaccgacccgcagctcaaggagcgctccagcgccgcagtctcacgcaggctgcagacgacctcgtcacggagctacgtacccagcgcaccggccggcctgggtaaagaggaggacgccggtcgcttccacagcaccaagaagggcaatttccacgagatcttcaatctgacagaaaacgagcgtccgctggcggtgtgcgagaatggctggcgctgctgcctcatcaacagggaccggaagatgcccacggactacatcaggaacggggtgctctacgtcacggagaattacttgtgcttcgaaagctccaaatctgggtcctcaaagaggaacaaagtcatcaagctagtggacatcacggacatccagaagtacaaggtcctgtctgtcctcccaggctcaggcatggggattgccgtgtcgacgccatccacccagaaaccgctcgtgtttggtgccatggtgcacagggatgaggccttcgagaccattctcagccagtacatcaagatcacctcagcggcagcgtctggcggggacagctagtattgacttgcccaggacgttgctggaattttctttttctttttctttttctttttttttttttacgatttggtagtggaaacaattggacatcctcatgagcttttgcaataattctcctggacctgtggttctattgtgttgacctctgcgttttatcgaccaagaaggggccagggctcacagggacgggggtgcccctctcccacagggcacgtcaggtgcctctgagggccacccgcagactgggggagggggcagaggccctcgggggcccgtggagaagacacacaggacccctggccctgcccttctccgttccagcctggacagagaaacctctccagccaccccaagaggttctcgcaaccttgtgtcccgctctccagaggccagaagctcgtccaccaccaaagccatagctgaagagtgcggggcccttcctcctggggacagaaagatgtcgtcaaggagggacatgggggcctttcaccaaccaccgagaaacgggcctggcggccctccttcctcttacatgagaccctcctgtggcatttgcccttggtgccgggctggggccgggcgcagtgaccctgcctgcgctccacactcgctccacgggaacagagagggtgagaagggcccacccctcgcctgccctcagtgtctttggtggcaccttccttgctggcctccagggcgctcagcaccgcgtctgtaagggcctgcctgctgctctcggcctgacacgccggccaggaggtctgtagctggggaccagtaagggcacaggatggtgcaggtaaaagcacatctttctcacactttgctctttggaaggcccaggagaacatccgcgaaggctgttggaggtgctccgagcactgtggcatgtctggcacatggcccccaggctgcggttgcctgggttggttgggggaggaagtggggaggagtgttccgggaccatggtggcccaggctgcagccgcctttgggccatccgagaggctctggcagcccctgtgctttagggagcaaccgtgagccgagcccagaggcctgggcctgcactgcctgcagccgacatgcgacagcgttccctcccccgcgtgcctagccggtgccggtccgggcacagacccccccagcccccgccctgccccagggaagcctgggcttcccgggaacaaggtggcatttgtggagggagcgcccgcaggcctggtctgctggggccgcctgcgctgggctgaagggagggaaaggcggcttgggcctcctggaaggaggtggccaccccgcgggcctgcgtgtctgctggggcggatcccgcagctccctcagcttgtcctgagtcccttgggtgtcgttgagattgttgttttttgaagaaacagaagattctattttttacagcgagcaagctggttttcttatttttgtatcctttttcagatgtaatttttatctttgctccgatcctcatttgctggtgtgggtgagggatccggcggcatgggctggtttcacccccttcacgaggggccgcagagtcacacgctggtgccgggggtgctttggggggagctgcgccgatcaccagattaagcacatgtcctatcccaggcggtggagcggagcccccgtggctctggactgcgcggacgttggcgtcaggatgaccacacggcggcctttcccgaatggggacagaacccgctctgagccgtgggtctggctcctgtaggggactggctctcttggtgcaccaggggagggggacatatcccagtgaaccccaccttggcgcctgaggcaacacagggtgggcactgacccacccccaggggcggctgcagaggcagtgcccgcagacaatggccacacctctctccccagggcccggcagtgcccaaggatgggtccggggcctcggggccaatgagcgcctcttcctaggtgctgggattcagtccccaaacacagcgggaggggtccctggggcagatggggctttaccagcgtcgggtggtttagttcgagtcccttttgtggagaaagggagatgaaaactgaccacgtgccaggtgtggccgaagcccccagggagggccacattcggggagcggggggtcgggggagggccaccgactggctctgctgccagcacaggcccctccctggaagtcctcgggagcggagcgcggatcggcacgggctctgggctccccgtggagagaagctgtagtttttaccaaattgtgtacatctgggcagatgtttaatttctgtgactaatcactgaactagacgaatgttaaattttttatgtctgaagcctgagtctattttggatctgtaaataatcattgccagtgtgacttttgttcaacaaaaggattgtactgtattaagaaccgatgaaaaaaattctcctgtaacatttttttaagaaaactttgtttgtttaaagaaaaagtattgtataaattataatttttatttaaataaacctaaaatgctttgtgctaa

SEQ ID NO: 295874 - protein, 407 aa, Artificial Sequence
  derived and/or modified sequence
MIRIAALNASSTIEDDHEGSFKSHKTQTKEAQEAEAFALYHKALDLQKHDRFEESAKAYHELLEASLLREAVSSGDEKEGLKHPGLILKYSTYKNLAQLAAQREDLETAMEFYLEAVMLDSTDVNLWYKIGHVALRLIRIPLARHAFEEGLRCNPDHWPCLDNLITVLYTLSDYTTCLYFICKALEKDCRYSKGLVLKEKIFEEQPCLRKDSLRMFLKCDMSIHDVSVSAAETQAIVDEALGLRKKRQALIVREKEPDLKLVQPIPFFTWKCLGESLLAMYNHLTTCEPPRPSLGKRIDLSDYQDPSQPLESSMVVTPVNVIQPSTVSTNPAVAVAEPVVSYTSVATTSFPLHSPGLLETGAPVGDISGGDKSKKGVKRKKISEESGETAKRRSARVRNTKCKKEEK

SEQ ID NO: 295875 - DNA, 1224 bp, Artificial Sequence
  derived and/or modified sequence
atgatacgtattgccgcactgaacgcttcttcaacaattgaagacgatcatgaaggttcattcaagtctcacaagacccagacaaaggaagcccaggaagcagaggcatttgcgctgtaccacaaggcactagacctccagaaacatgaccgctttgaggagagtgccaaagcttatcatgagctcctggaagcctccctgctccgcgaagctgtgagctcaggagacgagaaggaagggctgaagcaccctggtctgatattgaagtattcaacttataaaaacctggcacagctggcagcccagagagaggatctggagactgctatggaattttatctcgaagctgtcatgctcgattccaccgatgtaaacctgtggtacaaaatcggccatgtggccctgagactgatcagaatccctttggcaagacatgccttcgaggagggtctccgctgcaatcccgatcactggccatgtcttgacaacctgataacggtgttgtacacattgtctgactacacaacatgcctatacttcatttgtaaagcattagagaaagattgcagatattccaaaggcctcgtccttaaggaaaagattttcgaggagcagccatgtttgagaaaggattctcttcgaatgttcctcaagtgtgatatgtctatccacgatgtgagcgtatcagccgccgagacgcaagctattgtggacgaagccttaggcttaaggaagaagcgacaagccttgatcgtccgcgaaaaagagccagatctgaaactggtgcagcccatcccattctttacttggaagtgtctgggcgagtcccttctcgccatgtacaaccatctgactacatgcgaaccccctaggccgtctctagggaaacgcatagacctttccgactatcaggaccccagccaacccctagaatcttctatggtggtgacaccggtgaatgttatccagccctctacggtctctactaatccagccgtggccgttgcggaacctgtcgtgagttacacttctgtcgcgacaacctccttcccactccattctcctgggttattagaaaccggagctccagtgggggatatttccggaggcgataaatccaagaagggcgtcaagcgtaaaaaaatttcagaagagtctggggaaaccgccaagagaaggtcggctagagtgagaaacactaagtgcaaaaaggaggaaaagtag

SEQ ID NO: 295876 - DNA, 1224 bp, Artificial Sequence
  derived and/or modified sequence
atgatcagaattgctgccctgaatgccagcagcaccattgaagatgaccacgagggcagcttcaagagccacaagacccagaccaaggaggcccaggaggccgaggcctttgccctgtaccacaaggccctggacctgcagaagcatgacagatttgaggagagcgccaaggcctaccacgagctgctggaggccagcctgctgcgggaggccgtgtcctctggagatgagaaggagggcctgaagcaccctggcctcatcctgaagtacagcacctacaagaacctggcccagctggccgcccagcgggaggacctggagacagccatggagttctacctggaggccgtgatgctggacagcacagatgtgaacctgtggtacaagattggccacgtggccctgcggctcatccgcatccccctggcccggcatgcctttgaggagggcctgcgctgcaacccagaccactggccctgcctggacaacctgatcaccgtgctgtacaccctgagtgactacaccacctgcctgtacttcatctgcaaggccctggagaaggactgccgctacagcaagggcctggtgctgaaggagaagatctttgaggagcagccctgcctgaggaaggacagcctgaggatgttcctgaagtgtgacatgagcatccatgatgtgtctgtgtctgctgctgagacccaggccatcgtggatgaggccctgggcctgaggaagaagaggcaggccctgattgtgcgggagaaggagccagacctgaagctggtgcagcccatccccttcttcacctggaagtgcctgggggagagcctgctggccatgtacaaccacctgaccacctgtgagcccccccggcccagcctgggcaagagaattgacctgagtgactaccaggaccccagccagcccctggagagctccatggtggtgacccctgtgaatgtcatccagcccagcacagtgtccaccaacccagctgtggccgtggccgagcctgtggtgtcctacacctctgtggccaccaccagcttccccctgcacagccctggcctgctggagaccggggcccctgtgggggacatcagcggcggggacaagagcaagaagggcgtgaagaggaagaagatcagcgaggagagcggggagacagccaagagaagaagtgcccgggtgaggaacaccaagtgcaagaaggaggagaagtag

SEQ ID NO: 295877 - DNA, 1224 bp, Artificial Sequence
  derived and/or modified sequence
atgatccggatcgccgccctgaacgccagcagcaccatcgaggacgaccacgagggttcttttaaatcgcacaagacccagaccaaggaagcacaggaggccgaggcctttgccctatatcacaaggccttggatctgcagaagcacgatcggttcgaagaatcggccaaagcctaccatgagctcctggaggccagcctcctgcgtgaggccgtatccagcggggacgagaaagagggccttaaacatcctggcctgatcctcaaatactcaacctataaaaatctggcacaacttgctgctcagcgtgaagacttagagactgcaatggagttttacctcgaagctgttatgctcgacagcaccgacgtgaacctgtggtacaagatcggtcacgtagctctcaggctaatccgtattccgctcgcccgacacgcatttgaagaaggccttcgctgtaacccagaccattggccgtgcttagataacttgatcaccgtgctgtacacgctctccgattacacgacttgtctatatttcatatgcaaggcactcgagaaagattgtcgttattcaaagggactggttctaaaagagaaaatctttgaagagcagccttgtcttagaaaggattcactacgtatgttcttgaagtgtgatatgagcatccacgacgtttccgtttcagccgccgaaacccaagccatcgtggatgaggccttagggcttcgtaaaaagcgccaggcgcttatcgtgagagagaaagagcctgatctgaaactcgtgcagcctatccccttcttcacttggaaatgcttgggagagtctctgctggcaatgtacaatcaccttaccacttgcgagcctcctcgtcccagtttgggaaagcgaatcgacttaagcgattaccaggaccctagccagcctctggagtcaagcatggtagtcacacctgtgaacgtgattcaaccatcaactgtgtctaccaatcccgccgtggctgtggccgaacccgtggtttcatacacttcggtggcaaccacgtccttcccactgcattctcccgggctgttggagaccggagcaccggtgggcgacatatctgggggggacaaatcaaaaaagggcgtgaaacgcaagaaaattagcgaagaaagcggggagacagccaagagacgctccgcccgcgtgcggaacaccaagtgtaaaaaagaggaaaaatag

SEQ ID NO: 295878 - DNA, 1224 bp, Artificial Sequence
  derived and/or modified sequence
atgatacggatcgccgctcttaatgcttcctcgacaattgaggacgatcatgaaggatctttcaagtcccataaaacacagaccaaggaggctcaggaggctgaggcatttgcgctgtatcataaggctctcgacttgcaaaaacacgacaggttcgaagagagcgcaaaagcataccacgagctgctagaggcctcgttgctgagagaggctgtttcctccggagatgagaaggaggggctaaaacatcccggtttgatccttaaatactcaacatataagaacctcgcccaactggcggctcaaagagaggacttggagaccgccatggagttctaccttgaggcagtgatgttggatagtacggacgtgaatctttggtacaagataggacacgtggctctgagattgattagaattccactcgctagacatgcatttgaggagggcttgcgatgcaatcctgatcactggccatgtctggacaatcttatcactgtactgtacactctctctgattataccacttgtctctacttcatctgtaaagccctggaaaaagactgtagatattccaaaggccttgtgttgaaggaaaagatatttgaggagcagccttgtcttcgcaaagattcactcagaatgttcttgaaatgtgatatgtccatacatgacgtcagtgtcagtgcagcagaaacccaggccattgttgacgaggctctgggactgcggaagaaacgccaggcacttatcgtgagagagaaggagcctgatctcaaactggttcagccgataccattttttacttggaagtgtctgggagagtcactcctcgctatgtataatcacctcacaacttgcgagccaccgaggccatccctgggcaagcgcattgatctgagcgattaccaggacccaagtcagcccctcgagagctccatggtcgtgacacctgtaaatgttattcagccaagtacagttagtaccaaccctgcagtggccgtggccgaaccagtggtgagttacacctccgtcgccaccacatcctttcccctccacagccccggactgctagagaccggtgcccctgtgggcgatattagcggcggtgacaagagcaagaagggagtgaagagaaaaaagatttcggaggagtcgggtgagacggctaaaagacgatcagctagggtgcggaataccaaatgtaaaaaagaggaaaaatag

SEQ ID NO: 295879 - DNA, 1606 bp, Artificial Sequence
  derived and/or modified sequence
ctcagcagagcccggggcacaggccggaggggctgcaggcgcgaggctgggttacgtgaggaagctgggggtttcgcgggcagctttagagccccagtcagggaaaccgaggccgggcttcctggctgcctcgcgagcctcttcatggctctcgccgccgccctgaggtgcctagaatgggttccggcctccggggaggttcccagtaaccgcaggagccaccattgatttggcgtctgctgggtgcaaagcccagcgcgctaaccctttactcgcgacctttcgcttcaccttcacagcagccctgcgaggagagttgtggactggggcaacctttgccagtgatgagaagtgatgctcgtggcagtgctgaatctctctgaatatgattcgaattgcagccttaaatgccagctccaccattgaggatgatcatgaaggaagctttaaaagtcacaaaacccagacaaaggaggctcaggaagcagaggcttttgcattgtaccacaaggcccttgatctgcagaaacatgaccggtttgaggagtctgccaaagcctaccatgagctcttggaggcgagcctgctgcgggaggcagtttcatccggtgatgagaaagaggggttgaaacaccctgggctgatactgaaatattccacttataagaacttggcccagctggcagcccagcgggaggatctggagacagccatggagttctacttagaggcagtgatgctggactccacagatgtcaacctctggtataagattggacatgtggccctgaggctcatccggatccccctggctcgccatgcttttgaggaagggctgcggtgcaatcctgaccactggccctgtttggataacctaatcactgtcctgtacaccctcagtgattacacaacatgtctgtacttcatctgcaaagctttggagaaggattgccggtacagcaaagggctggtcctcaaggagaagatttttgaggagcagccttgtctccggaaggactctctcagaatgttcctcaaatgtgacatgtcgattcacgatgtttcggtgagtgcagctgagacacaggcgattgtagatgaggccttggggctgcgaaaaaagaggcaagcgctgattgtgcgggagaaggagccggacctgaaacttgtgcagcccattcctttcttcacctggaagtgcctcggagagagcttgctggccatgtacaatcatctcaccacctgtgagcccccacgtcccagccttggcaaaaggattgatttgtcggactaccaggaccccagccagcctcttgagtcctccatggtggtgacgccagttaacgtgatccagccaagcactgtcagcaccaacccagctgtggctgtcgccgagcctgtggtctcctacacctctgtggctacaaccagcttcccactgcacagtcctggtctgttggagacaggcgctcctgtgggtgatatttctgggggagataaatccaagaaaggggtaaaacggaagaagatttcagaagagagtggagaaacagcaaagcggcggtctgcccgtgtccgaaacaccaagtgcaaaaaagaagagaaa

SEQ ID NO: 295880 - DNA, 1224 bp, Artificial Sequence
  derived and/or modified sequence
atgatcagaatcgccgccctgaacgccagcagcaccatcgaggacgaccacgagggcagcttcaagagccacaagacccagaccaaggaggcccaggaggccgaggccttcgccctgtaccacaaggccctggacctgcagaagcacgacagattcgaggagagcgccaaggcctaccacgagctgctggaggccagcctgctgagagaggccgtgagcagcggcgacgagaaggagggcctgaagcaccccggcctgatcctgaagtacagcacctacaagaacctggcccagctggccgcccagagagaggacctggagaccgccatggagttctacctggaggccgtgatgctggacagcaccgacgtgaacctgtggtacaagatcggccacgtggccctgagactgatcagaatccccctggccagacacgccttcgaggagggcctgagatgcaaccccgaccactggccctgcctggacaacctgatcaccgtgctgtacaccctgagcgactacaccacctgcctgtacttcatctgcaaggccctggagaaggactgcagatacagcaagggcctggtgctgaaggagaagatcttcgaggagcagccctgcctgagaaaggacagcctgagaatgttcctgaagtgcgacatgagcatccacgacgtgagcgtgagcgccgccgagacccaggccatcgtggacgaggccctgggcctgagaaagaagagacaggccctgatcgtgagagagaaggagcccgacctgaagctggtgcagcccatccccttcttcacctggaagtgcctgggcgagagcctgctggccatgtacaaccacctgaccacctgcgagccccccagacccagcctgggcaagagaatcgacctgagcgactaccaggaccccagccagcccctggagagcagcatggtggtgacccccgtgaacgtgatccagcccagcaccgtgagcaccaaccccgccgtggccgtggccgagcccgtggtgagctacaccagcgtggccaccaccagcttccccctgcacagccccggcctgctggagaccggcgcccccgtgggcgacatcagcggcggcgacaagagcaagaagggcgtgaagagaaagaagatcagcgaggagagcggcgagaccgccaagagaagaagcgccagagtgagaaacaccaagtgcaagaaggaggagaagtag

SEQ ID NO: 295881 - protein, 200 aa, Artificial Sequence
  derived and/or modified sequence
MSSDSMDQPRNPCENEPLTPGYHGFPARDSQGNQEPTTTPDAMVQPFTTIPFPPPPQNGIPTEYGVPHTQDYAGQTGEHNLTLYGSTQAHGEQSSNSPSTQNGSLTQTEGGAQTDGQQSQTQSSENSESKSTPKRLHVSNIPFRFRDPDLRQMFGQFGKILDVEIIFNERGSKGFGFVTFENSADADRAREKLHGTVVEG

SEQ ID NO: 295882 - DNA, 663 bp, Artificial Sequence
  derived and/or modified sequence
atggtagctgtgtgcaaggggagagcagcagggtttagaattccaggaaggaagagagagtgatgtcatcagattccatggaccagcccaggaacccctgtgagaacgagcctctgactccaggttatcatggattcccagcgcgggacagccagggtaaccaggagccgacaacaactcctgacgcaatggttcagccttttactaccatcccatttccaccacctccgcagaatggaattcccacagagtatggggtgccacacactcaagactatgccggccagaccggtgagcataacctgacactctacggaagtacgcaagcccacggggagcagagcagcaactcacccagcacacaaaatggatctcttacgcagacagaaggtggagcacagacagacggccagcagtcacagacacaaagtagtgaaaattcagagagtaaatctaccccgaaacggctgcatgtctctaatattcctttccgcttccgggaccctgacctccggcagatgtttgggcagtttggcaaaatcctagatgtagaaataatctttaatgaacgtggctctaagggattcgggttcgtaactttcgagaatagtgctgatgcagacagggccagggagaaattacacggcaccgtggtagagggcc

SEQ ID NO: 295883 - DNA, 603 bp, Artificial Sequence
  derived and/or modified sequence
atgagcagcgacagcatggaccagcccagaaacccctgcgagaacgagcccctgacccccggctaccacggcttccccgccagagacagccagggcaaccaggagcccaccaccacccccgacgccatggtgcagcccttcaccaccatccccttccccccccccccccagaacggcatccccaccgagtacggcgtgccccacacccaggactacgccggccagaccggcgagcacaacctgaccctgtacggcagcacccaggcccacggcgagcagagcagcaacagccccagcacccagaacggcagcctgacccagaccgagggcggcgcccagaccgacggccagcagagccagacccagagcagcgagaacagcgagagcaagagcacccccaagagactgcacgtgagcaacatccccttcagattcagagaccccgacctgagacagatgttcggccagttcggcaagatcctggacgtggagatcatcttcaacgagagaggcagcaagggcttcggcttcgtgaccttcgagaacagcgccgacgccgacagagccagagagaagctgcacggcaccgtggtggagggctag

SEQ ID NO: 295884 - DNA, 603 bp, Artificial Sequence
  derived and/or modified sequence
atgtcctcagatagcatggatcaaccccggaatccatgtgaaaacgaaccgctgactcctgggtatcacggtttccccgcacgggattcacagggcaatcaggagcccactaccacacctgacgcaatggtgcagcctttcaccactattcccttccctccccctcctcagaacgggataccaactgagtatggagttccacatacacaggactatgctgggcagacaggagaacacaatctcacactttatggttcgactcaggcccatggtgaacaatcatcgaacagcccttctacccagaacggatctctgacacaaacggaagggggagcccagaccgatgggcagcagtcccagactcaatccagcgaaaacagcgagtctaagagcacgccaaagcgtctgcacgtcagcaacataccctttcgttttagggatcccgatcttaggcagatgtttgggcagtttggaaagatattggatgtagaaatcatcttcaatgagcgagggtccaaggggttcggctttgtgacttttgagaattctgcggatgcggaccgtgcaagagaaaaactacacgggaccgtagtggaaggttag

SEQ ID NO: 295885 - DNA, 603 bp, Artificial Sequence
  derived and/or modified sequence
atgagcagtgacagcatggaccagcccaggaacccctgtgaaaatgagcccctgaccccaggctaccacggcttccctgcccgggacagccagggcaaccaggagcccaccaccaccccagatgccatggtgcagcccttcaccaccatccccttccccccaccaccccagaatggcatccccacagaatatggagtgccccacacccaggactatgccggccagacaggagagcacaacctgaccctgtatggcagcacccaggcccacggggagcagagcagcaacagccccagcacccagaatggcagcctgacccagacagagggcggggcccagacagatggccagcagagccagacccagagcagtgaaaattctgagagcaagagcacccccaagaggctgcacgtgagcaacatccccttccgcttccgggaccctgacctgcggcagatgtttggccagtttgggaagatcctggatgtggagatcatcttcaatgaaagaggcagcaaaggatttggatttgtgacctttgaaaattctgcagatgctgaccgggcccgggagaagctgcacggcaccgtggtggagggctag

SEQ ID NO: 295886 - DNA, 603 bp, Artificial Sequence
  derived and/or modified sequence
atgagcagcgacagcatggaccagccccggaacccctgcgagaacgaacctctcactcccggctaccacgggttccctgctagagacagtcaggggaaccaggaacctaccactacgccagacgcaatggtgcagcctttcacaaccatccccttcccaccaccacctcagaacggaattcctactgaatacggcgtcccccatacccaggactacgccggacagacaggagagcacaacctgacgctctatggcagcacgcaggcacatggggagcagtcctcaaactccccctcgactcaaaatggtagtctcacacaaactgaggggggagctcagacagacgggcagcagagccaaacacagtcttcggagaacagcgagtctaagtcgaccccaaagcgcctgcatgtgtccaacatccccttcaggtttcgggatccagatctgagacagatgttcgggcagtttggaaaaattctggacgtggagattatttttaacgagaggggctctaaagggttcggcttcgtgacttttgagaactcagcggacgccgatcgggccagagagaaacttcacggtacagtggtggagggctag

SEQ ID NO: 295887 - DNA, 603 bp, Artificial Sequence
  derived and/or modified sequence
atgtcttcagactctatggatcagccacggaatccctgcgagaacgaacctctgacaccaggataccatggattcccagcccgagatagccagggtaatcaggaaccaaccacaaccccagacgctatggtgcagccgttcacaaccattccgttccctcctccaccccagaacggtatccccactgagtacggcgtgccacatacacaggattacgccggtcagacaggcgagcacaatcttaccttgtatggctctacgcaggctcatggcgagcagtcttccaactcaccatctacgcaaaacggcagcttgactcagacagagggcggagctcagacagacgggcagcagtcccagacccagtcgtccgaaaattcagaatcaaaatccacccccaaaaggctgcatgtgtctaacattccttttagattcagagatcccgatttgaggcagatgttcgggcaattcgggaagatcctggatgttgaaataatctttaatgagcgagggtcgaaaggcttcggtttcgtcacatttgagaactcagccgatgctgatcgggcacgcgaaaagctccatggaaccgtcgttgaggggtag

SEQ ID NO: 295888 - protein, 166 aa, Artificial Sequence
  derived and/or modified sequence
MAQRLLLRRFLASVISRKPSQGQWPPLTSRALQTPQCSPGGLTVTPNPARTIYTTRISLTTFNIQDGPDFQDRVVNSETPVVVDFHAQWCGPCKILGPRLEKMVAKQHGKVVMAKVDIDDHTDLAIEYEVSAVPTVLAMKNGDVVDKFVGIKDEDQLEAFLKKLIG

SEQ ID NO: 295889 - DNA, 501 bp, Artificial Sequence
  derived and/or modified sequence
atggcccagagactgctgctgagaagattcctggccagcgtgatcagcagaaagcccagccagggccagtggccccccctgaccagcagagccctgcagaccccccagtgcagccccggcggcctgaccgtgacccccaaccccgccagaaccatctacaccaccagaatcagcctgaccaccttcaacatccaggacggccccgacttccaggacagagtggtgaacagcgagacccccgtggtggtggacttccacgcccagtggtgcggcccctgcaagatcctgggccccagactggagaagatggtggccaagcagcacggcaaggtggtgatggccaaggtggacatcgacgaccacaccgacctggccatcgagtacgaggtgagcgccgtgcccaccgtgctggccatgaagaacggcgacgtggtggacaagttcgtgggcatcaaggacgaggaccagctggaggccttcctgaagaagctgatcggctag

SEQ ID NO: 295890 - DNA, 501 bp, Artificial Sequence
  derived and/or modified sequence
atggctcagcggctcctgttgcgccgctttttggcaagtgtgatctcccgcaaaccatcccagggccagtggccaccgttaacctctcgggctctgcaaactccacagtgtagtcccggaggccttactgtgaccccgaacccggcccgaaccatttacacaacaagaatctccctcacaacattcaatatccaagatggaccggattttcaagatcgcgttgtaaactccgaaacccccgtcgtggtggatttccatgctcaatggtgtggcccatgtaaaatcctcggccctcggcttgaaaaaatggtggcaaaacagcacggcaaggtagtcatggctaaagtggatattgacgaccacaccgatctggctatagagtacgaggtgtccgccgtgccgactgtgctcgctatgaaaaatggcgatgtcgttgacaaatttgttggaatcaaggacgaagatcaactggaagcgtttctgaagaaactcatcgggtag

SEQ ID NO: 295891 - DNA, 501 bp, Artificial Sequence
  derived and/or modified sequence
atggcccagaggctgctgctgcggcgcttcctggccagcgtcatcagcaggaagcccagccagggccagtggccacccctgaccagccgggccctgcagaccccccagtgcagccctgggggcctgactgtgacccccaacccagcccggaccatctacaccacccgcatcagcctgaccaccttcaacatccaggacggccctgacttccaggacagagtggtgaacagcgagacccctgtggtggtggacttccacgcccagtggtgtggcccctgcaagatcctgggcccccggctggagaagatggtggccaagcagcacggcaaggtggtgatggccaaggtggacattgatgaccacacagacctggccatcgagtatgaggtgtctgctgtgcccaccgtgctggccatgaagaatggagatgtggtggacaagtttgtgggcatcaaggatgaggaccagctggaggccttcctgaagaagctgattggatag

SEQ ID NO: 295892 - DNA, 501 bp, Artificial Sequence
  derived and/or modified sequence
atggcccagcggctgctgctgcggcggttcctggccagcgtgatcagccggaagccttcgcaaggtcagtggccgccattgacttctcgggctctgcagaccccccagtgctcaccgggcggcctgaccgtgacccctaacccggccagaacaatttatacaacgaggataagcctgactaccttcaatatccaggatggtcctgacttccaggatagggtggttaacagtgagactcccgtggtagtggactttcatgcacagtggtgtgggccatgcaaaattcttggcccacgcttagaaaaaatggtggccaagcagcatgggaaagtggtgatggcaaaggtagatatcgacgaccacactgatctggcaatcgagtacgaggtgtcagctgtcccaactgtccttgccatgaaaaatggggatgtagtggacaagtttgtcgggatcaaggacgaagatcagctggaagccttccttaaaaagttgattggctag

SEQ ID NO: 295893 - DNA, 501 bp, Artificial Sequence
  derived and/or modified sequence
atggcacaacggttgctcttgcgaagattcctggcatccgtgatttctcgtaagccctcccagggacaatggcccccactcacatctagagctttgcagactcctcagtgcagtccagggggactcactgtgacccctaaccccgcacggacgatctatacaactcgcatcagtctgactactttcaacattcaagatggacctgatttccaggaccgtgtagtcaattctgagacacccgttgtggtcgactttcatgcgcagtggtgtggaccatgtaagattttaggcccacgattagaaaagatggtggcaaagcagcatggcaaagttgtgatggccaaggttgatatagacgaccacaccgacctggccattgagtatgaagtgtccgcagtcccgaccgtgttggccatgaaaaacggcgacgttgtggataaatttgtgggcatcaaggacgaagatcaattagaggcttttttaaagaaactaattggttag

SEQ ID NO: 295894 - DNA, 501 bp, Artificial Sequence
  derived and/or modified sequence
atggcccagcggctgctgttgagacggttcctagcatcagtaatctctagaaagccatcacagggccagtggccccctcttacgtccagagccttgcaaactccacagtgtagtcccggaggtctcactgtgacccccaacccggcccggaccatttacacaacccgcatcagtctgacaacattcaatattcaggatggccccgacttccaggaccgggttgtcaacagcgagactcccgttgtagtggacttccatgcacaatggtgtggaccgtgcaaaattctaggcccacggcttgagaaaatggtggctaaacaacatggaaaagtggttatggccaaggttgacatcgacgaccacaccgacttggctatcgaatatgaagtgtcagcagtccctactgtactggccatgaaaaatggagacgtggtggataagtttgtcggcatcaaggacgaggatcaactggaggcattcctgaaaaagctgatcggctag

SEQ ID NO: 295895 - DNA, 501 bp, Artificial Sequence
  derived and/or modified sequence
atggcccagcggctgctgctgcggcggttcctggccagcgtgatcagccggaaaccttctcagggacagtggcctccactgaccagccgcgcattacagacaccacagtgtagccccggcggattgactgtgacaccaaatccagcccgtactatttacacaaccagaatcagcctgactacctttaacatccaagacggccccgactttcaggaccgcgtagtcaactcagaaacccctgtggttgtcgacttccacgcacagtggtgcggcccttgtaaaattctcggaccccgcctcgaaaagatggtcgctaagcagcatggaaaggttgtgatggccaaggttgatatcgacgaccatacagacctggctatcgaatatgaagtctcagccgtgcctacggtactggctatgaagaatggagatgtggtggacaaattcgtgggaatcaaggacgaagaccagcttgaagccttcctaaaaaagctgatcgggtag

SEQ ID NO: 295896 - DNA, 501 bp, Artificial Sequence
  derived and/or modified sequence
atggcccagaggctgctgctaaggaggttcctagcaagcgtcatctctcgaaagccgtcacaagggcagtggcctcccctgacttcgcgggctctgcagacaccccagtgcagtcctgggggtctgaccgtcactcctaacccagctcggactatttataccactcggatatccctgactacatttaatattcaggacggacctgatttccaggatcgggtggtgaattccgagactcccgtggttgttgattttcacgctcagtggtgcggtccctgcaaaattctgggaccccgactggagaagatggtcgcaaaacaacacggtaaggttgtaatggccaaagttgatatcgacgaccacacggatttagcaatcgaatatgaagtgtctgctgtgccaacagtcttggcaatgaaaaacggtgacgtggtcgacaagttcgttgggattaaggacgaggaccagctggaggcttttttgaagaagctcatcggttag

SEQ ID NO: 295897 - protein, 778 aa, Artificial Sequence
  derived and/or modified sequence
MPRSPGTRLKPAKYIPVATAAALLVGSSTLFFVFTCPWLTRAVSPAVPVYNGIIFLFVLANFSMATFMDPGVFPRADEDEDKEDDFRAPLYKNVDVRGIQVRMKWCATCHFYRPPRCSHCSVCDNCVEDFDHHCPWVNNCIGRRNYRYFFLFLLSLSAHMVGVVAFGLVYVLNHAEGLGAAHTTITMAVMCVAGLFFIPVIGLTGFHVVLVTRGRTTNEQVTGKFRGGVNPFTRGCCGNVEHVLCSPLAPRYVVEPPRLPLAVSLKPPFLRPELLDRAAPLKVKLSDNGLKAGLGRSKSKGSLDRLDEKPLDLGPPLPPKIEAGTFSSDLQTPRPGSAESALSVQRTSPPTPAMYKFRPAFPTGPKVPFCGPGEQVPGPDSLTLGDDSIRSLDFVSEPSLDLPDYGPGGLHAAYPPSPPLSASDAFSGALRSLSLKASSRRGGDHVALQPLRSEGGPPTPHRSIFAPHALPNRNGSLSYDSLLNPGSPGGHACPAHPAVGVAGYHSPYLHPGATGDPPRPLPRSFSPVLGPRPREPSPVRYDNLSRTIMASIQERKDREERERLLRSQADSLFGDSGVYDAPSSYSLQQASVLSEGPRGPALRYGSRDDLVAGPGFGGARNPALQTSLSSLSSSVSRAPRTSSSSLQADQASSNAPGPRPSSGSHRSPARQGLPSPPGTPHSPSYAGPKAVAFIHTDLPEPPPSLTVQRGRIGTCTRGWGRRGQPWVPPGLHLCHLGRPEDRPPLRAPWSQAAGAPPRGAMCRLHLAASSLFPSLSGP

SEQ ID NO: 295898 - DNA, 2337 bp, Artificial Sequence
  derived and/or modified sequence
atgcccagaagccccggcaccagactgaagcccgccaagtacatccccgtggccaccgccgccgccctgctggtgggcagcagcaccctgttcttcgtgttcacctgcccctggctgaccagagccgtgagccccgccgtgcccgtgtacaacggcatcatcttcctgttcgtgctggccaacttcagcatggccaccttcatggaccccggcgtgttccccagagccgacgaggacgaggacaaggaggacgacttcagagcccccctgtacaagaacgtggacgtgagaggcatccaggtgagaatgaagtggtgcgccacctgccacttctacagaccccccagatgcagccactgcagcgtgtgcgacaactgcgtggaggacttcgaccaccactgcccctgggtgaacaactgcatcggcagaagaaactacagatacttcttcctgttcctgctgagcctgagcgcccacatggtgggcgtggtggccttcggcctggtgtacgtgctgaaccacgccgagggcctgggcgccgcccacaccaccatcaccatggccgtgatgtgcgtggccggcctgttcttcatccccgtgatcggcctgaccggcttccacgtggtgctggtgaccagaggcagaaccaccaacgagcaggtgaccggcaagttcagaggcggcgtgaaccccttcaccagaggctgctgcggcaacgtggagcacgtgctgtgcagccccctggcccccagatacgtggtggagccccccagactgcccctggccgtgagcctgaagccccccttcctgagacccgagctgctggacagagccgcccccctgaaggtgaagctgagcgacaacggcctgaaggccggcctgggcagaagcaagagcaagggcagcctggacagactggacgagaagcccctggacctgggcccccccctgccccccaagatcgaggccggcaccttcagcagcgacctgcagacccccagacccggcagcgccgagagcgccctgagcgtgcagagaaccagcccccccacccccgccatgtacaagttcagacccgccttccccaccggccccaaggtgcccttctgcggccccggcgagcaggtgcccggccccgacagcctgaccctgggcgacgacagcatcagaagcctggacttcgtgagcgagcccagcctggacctgcccgactacggccccggcggcctgcacgccgcctacccccccagcccccccctgagcgccagcgacgccttcagcggcgccctgagaagcctgagcctgaaggccagcagcagaagaggcggcgaccacgtggccctgcagcccctgagaagcgagggcggcccccccaccccccacagaagcatcttcgccccccacgccctgcccaacagaaacggcagcctgagctacgacagcctgctgaaccccggcagccccggcggccacgcctgccccgcccaccccgccgtgggcgtggccggctaccacagcccctacctgcaccccggcgccaccggcgacccccccagacccctgcccagaagcttcagccccgtgctgggccccagacccagagagcccagccccgtgagatacgacaacctgagcagaaccatcatggccagcatccaggagagaaaggacagagaggagagagagagactgctgagaagccaggccgacagcctgttcggcgacagcggcgtgtacgacgcccccagcagctacagcctgcagcaggccagcgtgctgagcgagggccccagaggccccgccctgagatacggcagcagagacgacctggtggccggccccggcttcggcggcgccagaaaccccgccctgcagaccagcctgagcagcctgagcagcagcgtgagcagagcccccagaaccagcagcagcagcctgcaggccgaccaggccagcagcaacgcccccggccccagacccagcagcggcagccacagaagccccgccagacagggcctgcccagcccccccggcaccccccacagccccagctacgccggccccaaggccgtggccttcatccacaccgacctgcccgagcccccccccagcctgaccgtgcagagaggcagaatcggcacctgcaccagaggctggggcagaagaggccagccctgggtgccccccggcctgcacctgtgccacctgggcagacccgaggacagaccccccctgagagccccctggagccaggccgccggcgccccccccagaggcgccatgtgcagactgcacctggccgccagcagcctgttccccagcctgagcggcccctag

SEQ ID NO: 295899 - DNA, 2337 bp, Artificial Sequence
  derived and/or modified sequence
atgccccgcagccctgggacaagactcaaaccggcgaagtacattcccgttgcgactgcagctgcactgttagttggaagttctacgctattcttcgtgtttacttgcccttggctgacccgtgctgtttcaccagcagtgccagtttacaacggaatcatttttctgtttgtgctggccaacttttctatggctacatttatggaccccggagtttttccacgcgccgacgaagatgaggacaaggaggatgatttccgggctcccttgtataagaacgtcgacgtgcgtggtatccaggtgcgcatgaaatggtgtgcaacatgtcacttctatcgtccacctaggtgcagccactgttccgtgtgtgacaattgcgtagaggactttgaccaccattgcccatgggtcaataactgcatcggaaggcggaactaccggtattttttcttgtttctcctgtctctgtccgcccatatggttggagttgtggcctttggtcttgtgtatgtgctgaatcatgctgaagggctaggcgcagctcataccaccattaccatggccgttatgtgcgtcgctggcttgttctttatcccggtaatcggcttgacgggcttccacgttgttttggtcacgaggggcagaacgaccaatgagcaggtgaccggcaaattccggggcggcgtcaacccttttacaagaggatgctgcggaaacgtggagcacgtgctgtgttcaccattggctccgaggtacgtcgtggaacctccgcggcttcctctcgctgttagcctgaagccgccatttcttagaccagagctgctggatcgagcagcccccctgaaggtgaagctgtcggataatggcctgaaggctggccttggtcgatctaaaagcaagggaagcctggatcgactcgatgagaagcccctcgacctgggaccccctctgcctcctaaaatcgaagccgggacattcagcagcgatctccagacgccaagacctggctccgctgagtctgccttaagtgtgcagaggacatcacccccaacgcctgctatgtacaagtttcggccagcatttcctacaggccccaaagttcctttctgtggccctggagagcaggtgccgggccccgatagcttaactctgggcgatgactccatcagatctctggactttgtgagcgaaccatctttagatttgccagactacggaccaggaggactacacgcagcatacccccccagccctcctctgagcgcttcagacgcatttagcggtgccttgaggtccctatcgctgaaggcgtcttccagacgtggcggggaccacgttgctctccagccgctgcgttctgagggagggccgcccacacctcatcgtagtatcttcgccccccatgcactgcccaaccgaaatggatctctcagttacgattctctcctgaacccagggagtcctggcgggcacgcatgccccgcacaccccgcagtgggagtggccgggtaccactccccatatctgcatccaggggctaccggagatccgcctagaccactgcctaggagcttttcccctgtcctgggacctagacctagagagcccagccccgtccggtatgataatctatctcggaccatcatggcaagcatccaagaacgaaaagaccgtgaggagcgcgaaaggctgctgaggtcccaggctgacagcttgttcggcgattcaggtgtttacgacgcaccttcctcttattctctccaacaggccagcgttctctccgagggccccagagggcctgccctgcggtatggcagtagagatgatctggttgccggcccagggttcggtggggcaaggaatcccgcattgcaaacgagcttgtcgtcgctgagctcgtcagtttccagagccccacgaaccagctcgagtagcctgcaagctgaccaggcaagcagcaatgcacccggcccgcgcccatcttccgggtcccatagatcaccagcccggcagggtctgcccagcccacctggcaccccacatagcccgagctacgctggccccaaggcagtcgcctttattcacacagatctgcctgaaccccctccaagcctaaccgttcagcgcggcaggatcggcacctgcacccggggatggggcagacgaggccagccatgggtgccacctggtctacatctgtgccacctgggccggcctgaggaccgcccaccgctgcgagctccttggtcacaagctgccggagcccctcctagaggcgccatgtgccggcttcatctggccgcatcttcactgttccccagcctgagtggcccatag

SEQ ID NO: 295900 - DNA, 2337 bp, Artificial Sequence
  derived and/or modified sequence
atgcccaggagccctggcacccggctgaagccagccaagtacatccctgtggccacagctgctgccctgctggtgggcagcagcaccctcttctttgtgttcacctgcccctggctgaccagggctgtgtccccagctgtgcctgtgtacaacggcatcatcttcctgtttgtgctggccaacttctccatggccaccttcatggaccccggggtcttccccagggcagatgaagatgaggacaaggaggatgacttccgggcccccctgtacaagaatgtggatgtgcggggcatccaggtgaggatgaagtggtgtgccacctgccacttctaccggcccccacgctgcagccactgcagcgtgtgtgacaactgtgtggaggactttgaccaccactgcccctgggtgaacaactgcattggaagaagaaactaccgctacttcttcctgttcctgctgagcctgagcgcccacatggtgggcgtggtggccttcggcctggtgtatgtgctgaaccacgccgagggcctgggcgccgcccacaccaccatcaccatggctgtgatgtgtgtggccggcctcttcttcatccctgtgattggcctgaccggcttccacgtggtgctggtgacccggggccgcaccaccaatgagcaggtgacaggcaagttccggggcggcgtgaaccccttcacccggggctgctgcggaaatgtggagcacgtgctgtgcagccccctggccccccgctacgtggtggagcccccccggctgcccctggccgtgtccctgaagccacccttcctgcggcctgagctgctggaccgggccgcccccctgaaggtgaagctgagtgacaatggcctgaaggccggcctgggccgcagcaagagcaagggcagcctggaccggctggatgagaagcccctggacctgggcccccccctgccccccaagattgaagctggcaccttcagcagtgacctgcagacccccaggcctggcagcgctgagagcgccctgtctgtgcagaggaccagcccccccaccccagccatgtacaagttccggcctgccttccccaccggccccaaggtgcccttctgtggccctggagagcaggtgcccggccctgacagcctgaccctgggagatgacagcatccgcagcctggactttgtgtctgagcccagcctggacctgcctgactatggccctgggggcctgcacgccgcctacccacccagcccccccctgagcgccagtgatgccttcagcggggccctgcggagcctgagcctgaaggccagcagccggcggggcggggaccacgtggccctgcagcccctgcggtctgagggcggcccccccaccccccacaggagcatctttgccccccacgccctgcccaacagaaatggcagcctgtcctatgacagcctgctgaaccctggcagccctgggggccacgcctgcccagcccaccctgctgtgggcgtggccggctaccacagcccctacctgcaccctggggccaccggggaccccccccggcccctgcccaggagcttcagccctgtgctgggcccccggccccgggagcccagccctgtgcgctatgacaacctgagcaggaccatcatggccagcatccaggagaggaaggaccgggaggagcgggagcggctgctgcggagccaggccgacagcctgtttggagacagcggcgtgtatgatgcccccagcagctacagcctgcagcaggcctctgtgctgtctgagggcccccggggccctgccctgcgctatggcagcagagatgacctggtggccggccctggctttggaggagccaggaacccagccctgcagaccagcctgagcagcctgagcagctctgtgtcccgggcccccaggaccagcagcagcagcctgcaggccgaccaggccagcagcaatgcccctggcccccggcccagcagcggcagccacaggagccctgcccggcagggcctgcccagccccccaggcaccccccacagccccagctatgccggccccaaggctgtggccttcatccacacagacctgcctgagcccccacccagcctgactgtgcagaggggccgcatcggcacctgcacccggggctggggcagaagaggccagccctgggtgcccccaggcctgcacctgtgccacctgggccggcctgaggacaggcctcccctgcgggccccctggagccaggccgccggggccccacccaggggggccatgtgccgcctgcacctggccgccagcagcctcttccccagcctgagcggcccctag

SEQ ID NO: 295901 - DNA, 2337 bp, Artificial Sequence
  derived and/or modified sequence
atgccccggagccccggcacccggctgaagcccgccaagtacatcccggtcgccacagcagccgcactattagtcggtagttcgaccctcttctttgtcttcacgtgcccatggctgactcgagccgtgagcccggccgtacctgtttataatggcattatttttctgttcgtgctggccaacttttctatggctacttttatggaccccggcgtctttccaagagcggatgaggacgaagacaaggaggatgatttcagagcaccactatataaaaatgtggatgtgaggggcatccaagtccgcatgaagtggtgtgccacctgtcatttttatcgacccccaaggtgtagtcactgctccgtttgtgataattgtgtagaagacttcgaccaccactgcccctgggtcaacaattgcattggccgtagaaattaccgttacttttttttattcctgctatctctttccgctcatatggttggggtggtggcgtttggattagtgtacgttttgaatcacgcagagggcctgggggccgctcatacaactattacaatggcagtgatgtgcgtggctggactcttctttatcccagtgatcggactgacaggttttcacgtagtgctcgtaaccagaggtcgcaccacgaatgagcaggtcactggtaagtttaggggaggtgtgaacccctttactagaggctgttgcggcaatgtggagcacgtgctctgcagcccgctagcacctagatacgtggttgaacccccaaggctgccgttagccgttagcttaaagcctcccttcttgaggccagaactcttggacagggctgctccccttaaggtcaaactgtccgacaacggccttaaggccggacttggcaggagtaaatctaaagggtccctagataggctcgatgagaagcctcttgaccttggtccaccgctaccccccaagatcgaagctggtaccttttctagcgatctgcagacccctaggcctggttcagctgagtccgctctgtcagtgcaaagaacatcaccacctacacccgcaatgtataaatttcgtcctgcctttcctacaggcccaaaggtgcctttctgtggtccgggcgagcaggtccctggaccggactcccttaccctgggagatgattctataaggtcgttggactttgtcagcgaaccatccctggacctgccagactatggccccggcggattgcacgcagcctaccctccatcccctcctctgtccgcctctgacgcattttctggagccttgaggtcgctttcactcaaggcctctagcaggcgagggggggaccatgttgctctgcaacccctcagatcagagggagggcctccaacacctcatcgatctatatttgcaccccacgccttaccaaataggaacgggtcactctcatacgattccctgcttaacccaggctcacctggtggacatgcatgtccggcccaccccgcagtgggcgtggccgggtaccattcaccctatcttcacccaggagcgaccggcgatcctccccgacccctgccccgaagtttctcccccgttctgggtcctcggccgagggagccaagccccgtcaggtatgataatctctcacgcacaatcatggcttcaatccaggaacgcaaggaccgcgaggaacgtgagcgcttacttaggtcacaggcagacagcctctttggcgactccggggtgtatgacgctcccagcagttactctctgcagcaggcgtctgtcctgtcagaagggcctaggggacccgccctgaggtacggaagtagggacgacctggtggcaggccctggatttggaggggcacgaaaccccgcgcttcagaccagcctctcttctctctccagcagcgtctccagagccccccggacgagttcatctagcctccaggcggatcaggccagttccaatgcccccggcccaagacctagttccggttctcaccggtccccagctcggcagggcttgccctctcctccagggaccccacactcacccagctacgcgggtcccaaagcggtagcattcattcacaccgaccttcctgagccgcccccatccttaacagtccagcggggcaggattggaacttgtacaaggggatggggcagacggggacaaccttgggtaccgcctggtctgcacctgtgccatctcgggcgtcctgaagatcgcccgccacttcgcgccccttggtctcaagcagctggggcccctccaaggggggctatgtgtcggctgcaccttgcggcaagctctctgttcccctctctgtccggtccttag

SEQ ID NO: 295902 - DNA, 2337 bp, Artificial Sequence
  derived and/or modified sequence
atgcccagatctccaggcaccaggctgaagcctgctaaatacatcccggtcgccaccgcggctgccctcctcgtggggtcatcaaccctgtttttcgtctttacttgcccatggttgactagggcagtatcccctgccgtgcctgtgtataatgggatcattttcctgtttgtgctggctaactttagtatggcgactttcatggaccctggagttttcccaagggcagacgaagacgaagataaagaggacgattttagggcgccactgtataagaacgtggatgtcagagggatacaagtgagaatgaagtggtgtgctacatgccacttttatcgcccaccacgatgcagccactgtagcgtgtgtgataactgtgtggaagacttcgaccatcactgtccgtgggtgaacaactgcataggtcgcaggaactatcgttatttttttctcttccttctgtccctgtccgctcacatggtcggggtggttgctttcgggcttgtctatgtgctcaaccacgccgagggccttggagcagcccacaccacgataacgatggctgtgatgtgtgtagccggactctttttcatcccggtgattggactaaccggcttccacgtggtgttagtgaccagaggtaggacgaccaacgaacaggtgactggcaaattccgcggaggagttaatccgtttaccaggggatgctgcggcaacgtggaacatgtgctatgttcgccccttgcgccaaggtatgtcgtcgaaccccctaggcttcctctggccgtatctctcaagcctccctttctgaggcctgaactgctcgatcgagccgctcctcttaaggtgaaactgagtgacaacggtctcaaagccggactgggccgttccaagtccaaaggcagtctggacagactagacgagaaacctctcgacctggggccacccctgccaccaaaaatcgaagccggtacattcagttctgaccttcagactcctaggcccggtagtgcagagtcagcgctgagcgtgcagcggacctccccaccgacacctgccatgtataagttcaggccagcctttccaacaggcccaaaggtcccattttgcggaccaggagaacaggtaccgggaccagatagtttaacactgggggatgattccattcgcagccttgacttcgtgagcgagccctccctcgatctgcccgattatggcccaggcggactgcatgcagcctacccaccatcacccccactttctgctagtgacgcgtttagcggcgctctccgttcactcagtctgaaagccagctcacggaggggcggtgaccatgtcgctttgcaaccactgcggtccgagggaggtccacccacaccacaccgatctatctttgccccacatgcattaccgaatcggaacggctcacttagttacgattccttgttgaatccaggctcccccggtggacatgcctgcccagcacaccctgctgtgggagtggcaggctatcatagcccttacttgcaccccggagctaccggcgatccccctcgccctctccccagaagctttagcccagtgttaggacctcggcctagggagccatcgccagtgcgctatgataatctgagccggactatcatggcttctattcaggagaggaaggaccgggaggagcgcgagcgactcctgcggtcacaggctgatagcttgtttggcgactcaggggtctatgacgctccctcttcttactcattacagcaagcctctgttctcagcgaagggcctcgcggtccagccctacgatacgggtcaagagatgatctggttgccggaccaggcttcggaggcgcaagaaatccagccctccaaacctcactatcctctctttcctcttcggtctctcgcgctccacgtacctcctcttccagtttgcaggcagatcaggcttccagtaacgcacctgggcctcgcccatcttctggcagtcatagatcacctgccaggcagggactgccaagtccacccggaaccccgcactcccccagttacgctggccctaaggctgtcgcatttatccatacggacctgcctgagccaccaccctccctcaccgtgcagagggggagaattggcacttgcacacgaggttgggggcgaagaggacagccttgggtacctcctggcttgcatttatgccaccttgggcgaccggaggacagaccgcctctaagggctccttggtcgcaagctgcgggtgcccctcctcgaggagctatgtgccggttacacctggccgctagttccctgtttccgtcattgagtggaccttag

SEQ ID NO: 295903 - DNA, 3112 bp, Artificial Sequence
  derived and/or modified sequence
atgccccgcagccccgggacgcgcctcaaacccgccaagtacatcccggtggccacggccgccgcgctgctggtcggctccagcaccctcttcttcgtgttcacgtgcccgtggttgacacgagctgtgtccccagctgttcccgtctacaatggcatcatcttcctctttgtcctggccaacttcagcatggccactttcatggaccctggtgttttcccccgagcggatgaggatgaggacaaggaggacgacttccgggctccgctgtacaagaacgtggatgtgcgaggtatccaggtccgcatgaagtggtgtgccacgtgccacttctaccgcccgccgcgctgctcccactgcagcgtctgtgacaactgtgtagaggactttgaccaccactgcccctgggtcaacaactgcatcgggcgtcgaaactatcgctacttcttcctgttcctgctgtcactcagtgcacacatggtgggcgtcgtggccttcggcctggtctacgtgctgaaccacgctgaggggctgggagccgcgcacaccaccatcaccatggctgtcatgtgtgtggccggcctcttcttcatccctgtcattggcctcactggcttccatgtggtgctggtcactcgggggcgcaccaccaacgagcaggtgactgggaagttccgcgggggtgtgaaccctttcacccgaggctgctgtgggaatgtggagcacgtgctgtgtagccccctggcgccccggtacgtggtggagccaccccggctgccgctcgcggtgagtttgaagccgcctttccttaggcctgaactcctggaccgagctgcaccgctcaaggtcaagcttagtgacaacgggctgaaggctggcctgggccgtagcaagtccaagggcagcctggaccggctggatgagaagccactggacttggggccaccactgccccccaagatagaggctggcacgttcagcagtgacctgcagaccccgcgcccaggcagtgctgagagtgccctgtcggtgcagaggaccagccccccgacacctgccatgtacaagtttaggccggctttccccacgggtcccaaggtgcccttctgtggaccaggcgagcaggttccaggccctgattccctgaccctgggggacgacagcatccgtagcctggactttgtgtccgagccgagcctggacctccctgactatgggccagggggcctgcatgcagcctacccgccatccccaccgctcagcgcctctgatgccttctcgggcgctttgcgctccctgagcctcaaggcctcgagccggcggggcggggatcatgtggccctgcagcccctgcgctctgagggggggccccccacgccccaccgtagcatttttgccccccatgcactgcccaaccgcaacggcagcctgtcctatgacagcctgctcaatcctggctcgcctggtggccacgcctgccctgcccacccagcagttggcgtggccggataccactcaccctacctgcatcctggggcaacgggcgacccgccacggcccctaccccgcagcttcagccccgtgctgggcccccgcccccgggagccctcgcctgtgcgctacgacaacctgtccaggaccatcatggcatccatccaggagcgcaaggacagggaggagcgtgagcgcctgctgcgctcccaggccgactcactcttcggcgactcaggcgtctatgacgctcccagctcctacagcctgcagcaggccagtgtgctgtccgagggcccccgaggtcccgcgctgcgctatggctccagagacgaccttgtggctgggcccggcttcggtggcgcccgcaaccctgccctgcagacgtcactgtcctcgctgtccagctccgtgagccgtgcaccgcggacgtcgtcctcctccctgcaggctgatcaggccagcagcaacgccccggggccccggcccagcagtggctcacacaggtcacctgcacgccagggcctgccctccccgcccggcactccccactcaccatcctacgcgggccccaaagctgtcgccttcatccacacggacctcccagagccaccgccctcgctgaccgtgcagagggggcggattggcacctgcacccgtggatgggggcggcgtggccagccttgggtgcctcctgggctgcacctgtgccaccttggccgcccggaggaccgcccaccactgcgggccccctggagccaggccgccggggcacccccacgcggggccatgtgccgcctgcacttggctgcctccagtcttttccccagcctctcggggccctagcaggatgacaagtaggcggctctggggcccaggacagcccagctggggacccaggaggtcagactgcagtggaccctggggcagggctgggggtgggctgggctctctgctccaccagccacagcttgacagattcccagcctgccagggcctgagaccctgtgtccacatgacctcagggagtcccccacctgctgcagggggtccagcaccccacaggggggcagtcccagagctgtggggaccggcacgacctttgcccagcctccctacccaaccaagcactttagactaagccacttcctcctcggggagcccaggcctccgtgggttgggctgggtggggggggggtctcaggttgcccctgaaggtctctgcactcctcctgcccttcccctgacacatgaacagatgccttaacttcctggagccaccagcctggtgagccattggcctctgcctgccaccaaggtcctgtggtcttggccagctccgcctgggccccactggggctgcctgcacccagagacgatgccggcgggatctcagagggcctgaggcccaagccctgtgtcctccagcagtggtacggcctgcggcagggtggcactccggccagcccttctccgtcacagggtccctgtccctgggtccaccctgggctgtggctctacatctcccatttggggacgagaaagccacaaaaccattctctattgttcttaagggtacccctgctaattaattccccaaataaaatttttggtgttgatc

SEQ ID NO: 295904 - protein, 231 aa, Artificial Sequence [sequence omitted]

SEQ ID NO: 295905 - protein, 374 aa, Artificial Sequence
  derived and/or modified sequence
MNSSGITTWGSTGLRWRWRTRPRPSGEEVLQDIQVMLKSDASPSSIRSLKSDMMSHLVKIPGIIIAASAVRAKATRISIQCRSCRNTLTNIAMRPGLEGYALPRKCNTDQAGRPKCPLDPYFIMPDKCKCVDFQTLKLQELPDAVPHGEMPRHMQLYCDRYLCDKVVPGNRVTIMGIYSIKKFGLTTSRGRDRVGVGIRSSYIRVLGIQVDTDGSGRSFAGAVSPQEEEEFRRLAALPNVYEVISKSIAPSIFGGTDMKKAIACLLFGGSRKRLPDGLTRRGDINLLMLGDPGTAKSQLLKFVEKCSPIGVYTSGKGSSAAGLTASVMRDPSSRNFIMEGGAMVLADGGVVCIDEFDKHREAAQAPLCHWLPGV

SEQ ID NO: 295906 - DNA, 696 bp, Artificial Sequence
  derived and/or modified sequence
atgagcggcttcgacgaccccggcatcttctacagcgacagcttcggcggcgacgcccaggccgacgagggccaggccagaaagagccagctgcagagaagattcaaggagttcctgagacagtacagagtgggcaccgacagaaccggcttcaccttcaagtacagcctggcccccagcctgatcgagcacctgctgcccgccagatactgcagcggctgctgggccgccgccctgaagctggacctggcccccgccagcagagacgagctgaagagacactacaacctgggcgagtactggatcgaggtggagatggaggacctggccagcttcgacgaggacctggccgactacctgtacaagcagcccgccgagcacctgcagctgctggaggaggccgccaaggaggtggccgacgaggtgaccagacccagacccagcggcgaggaggtgctgcaggacatccaggtgatgctgaagagcgacgccagccccagcagcatcagaagcctgaagagcgacatgatgagccacctggtgaagatccccggcatcatcatcgccgccagcgccgtgagagccaaggccaccagaatcagcatccagtgcagaagctgcagaaacaccctgaccaacatcgccatgagacccggcctggagggctacgccctgcccagaaagtgcaacacctag

SEQ ID NO: 295907 - DNA, 1125 bp, Artificial Sequence
  derived and/or modified sequence
atgaacagcagcggcatcaccacctggggcagcaccggcctgagatggagatggagaaccagacccagacccagcggcgaggaggtgctgcaggacatccaggtgatgctgaagagcgacgccagccccagcagcatcagaagcctgaagagcgacatgatgagccacctggtgaagatccccggcatcatcatcgccgccagcgccgtgagagccaaggccaccagaatcagcatccagtgcagaagctgcagaaacaccctgaccaacatcgccatgagacccggcctggagggctacgccctgcccagaaagtgcaacaccgaccaggccggcagacccaagtgccccctggacccctacttcatcatgcccgacaagtgcaagtgcgtggacttccagaccctgaagctgcaggagctgcccgacgccgtgccccacggcgagatgcccagacacatgcagctgtactgcgacagatacctgtgcgacaaggtggtgcccggcaacagagtgaccatcatgggcatctacagcatcaagaagttcggcctgaccaccagcagaggcagagacagagtgggcgtgggcatcagaagcagctacatcagagtgctgggcatccaggtggacaccgacggcagcggcagaagcttcgccggcgccgtgagcccccaggaggaggaggagttcagaagactggccgccctgcccaacgtgtacgaggtgatcagcaagagcatcgcccccagcatcttcggcggcaccgacatgaagaaggccatcgcctgcctgctgttcggcggcagcagaaagagactgcccgacggcctgaccagaagaggcgacatcaacctgctgatgctgggcgaccccggcaccgccaagagccagctgctgaagttcgtggagaagtgcagccccatcggcgtgtacaccagcggcaagggcagcagcgccgccggcctgaccgccagcgtgatgagagaccccagcagcagaaacttcatcatggagggcggcgccatggtgctggccgacggcggcgtggtgtgcatcgacgagttcgacaagcacagagaggccgcccaggcccccctgtgccactggctgcccggcgtgtag

SEQ ID NO: 295908 - DNA, 696 bp, Artificial Sequence
  derived and/or modified sequence
atgagtgggttcgacgatcccggaattttttatagcgactccttcggtggcgatgcacaggccgacgagggccaggcaaggaagagccagctgcagcgtaggtttaaggagttcctgagacaataccgggttggcaccgaccgcacgggctttactttcaaatattcactcgcccctagtctgatcgagcatcttctgcccgcccggtattgcagcggctgctgggcagcagctctgaaactggacctggccccagcatcccgggacgaattgaaacggcactacaacctaggggaatattggatagaagttgaaatggaagatctggcttcctttgacgaagacctggcggactatctctataagcaacccgcggagcacctgcagctcctggaagaggcagccaaggaggtggccgatgaggtcacacgaccacggccttcgggcgaagaggtcctgcaggatattcaagtaatgctcaaaagcgatgcgtcaccgagttccatccgctccttgaagtccgatatgatgtcacatctggtgaagatacccggaattattatcgctgcttcggctgtgcgagcgaaagctacccgaatcagtatccagtgtagaagttgccggaatacgttaacgaacattgccatgcgtcctgggctggagggatatgccttaccccgtaagtgtaacacatag

SEQ ID NO: 295909 - DNA, 1125 bp, Artificial Sequence
  derived and/or modified sequence
atgaattccagtggaatcacaacatggggaagtacaggacttcggtggcgctggaggacaaggcccagaccctctggcgaggaggttttacaggatattcaggtcatgctgaaatcagacgctagcccatctagcattaggtctctgaagagcgatatgatgtctcacttggtgaagattcctgggattataatcgccgcctccgccgtaagggctaaggcaacacgaattagtattcagtgccgctcgtgtcgcaacacactcactaatattgctatgagacccggactcgaaggctacgcgctgcctcgaaagtgtaacacagatcaggctggaagaccaaagtgcccgttagacccctatttcatcatgcccgacaagtgtaagtgcgtagatttccagaccctgaaactgcaggagctgcctgatgctgttccacacggggagatgccccgccacatgcagttatactgcgacaggtacttatgcgataaagtcgtcccaggaaatagggtcactataatgggcatttactccatcaaaaaattcgggctcacaacgagtcgtgggcgggatagggtgggtgtcgggatcaggagcagctatatccgggttttaggcatccaggtcgacacagacggcagtggccgaagcttcgctggggcagtttccccccaggaagaggaggagttccggaggcttgccgctctgccaaatgtctacgaagttatctctaaaagtattgccccttcaatcttcggtggcaccgacatgaaaaaggcaatagcatgtctgctgttcggggggagccgaaaacgccttccagatggcctcactagaagaggagatatcaatctgctaatgttgggtgaccctggcacagccaaatcccaactgttgaaattcgtggagaagtgtagtcctatcggggtctacacatcagggaagggctcatctgctgctggtcttactgcctccgttatgcgagacccatcgagtagaaattttatcatggagggaggtgccatggtccttgcagatggcggagttgtctgtatcgatgagttcgacaagcaccgggaggctgcacaagcacccttgtgccattggctgcctggagtgtag

SEQ ID NO: 295910 - DNA, 696 bp, Artificial Sequence
  derived and/or modified sequence
atgagcggctttgatgatcctggcatcttctacagcgacagctttggaggagatgcccaggctgatgagggccaggccaggaagagccagctgcagaggcgcttcaaggagttcctgcggcagtacagagtgggcacagacagaacaggcttcaccttcaagtacagcctggcccccagcctcatcgagcacctgctgcctgcccgctactgcagcggctgctgggccgccgccctgaagctggacctggccccagccagcagagatgagctgaagaggcactacaacctgggggagtactggattgaggtggagatggaggacctggccagctttgatgaggacctggccgactacctgtacaagcagcctgctgagcacctgcagctgctggaggaggccgccaaggaggtggctgatgaggtgacccggccccggcccagcggggaggaggtgctgcaggacatccaggtgatgctgaagagtgatgccagccccagcagcatccgcagcctgaagagtgacatgatgagccacctggtgaagatccctggcatcatcatcgccgccagcgctgtgcgggccaaggccacccgcatcagcatccagtgccgcagctgcaggaacaccctgaccaacatcgccatgaggcctggcctggagggctacgccctgcccaggaagtgcaacacctag

SEQ ID NO: 295911 - DNA, 1125 bp, Artificial Sequence
  derived and/or modified sequence
atgaacagcagcggcatcaccacctggggcagcacaggcctgcgctggcgctggaggacccggccccggcccagcggggaggaggtgctgcaggacatccaggtgatgctgaagagtgatgccagccccagcagcatccgcagcctgaagagtgacatgatgagccacctggtgaagatccctggcatcatcatcgccgccagcgctgtgcgggccaaggccacccgcatcagcatccagtgccgcagctgcaggaacaccctgaccaacatcgccatgaggcctggcctggagggctacgccctgcccaggaagtgcaacacagaccaggccggccggcccaagtgccccctggacccctacttcatcatgccagacaagtgcaagtgtgtggacttccagaccctgaagctgcaggagctgcctgatgctgtgccccatggagagatgcccaggcacatgcagctgtactgtgaccgctacctgtgtgacaaggtggtgcccggcaacagagtgaccatcatgggcatctacagcatcaagaagtttggcctgaccaccagccggggccgggacagagtgggcgtgggcatccgcagcagctacatccgggtgctgggcatccaggtggacacagatggcagcggccgcagctttgctggagctgtgagcccccaggaggaggaggagttccggcggctggccgccctgcccaacgtgtatgaagtcatcagcaagagcatcgcccccagcatctttggaggaacagacatgaagaaggccatcgcctgcctgctgtttggaggcagcaggaagaggctgcctgatggcctgacccggcggggggacatcaacctgctgatgctgggggaccccggcacagccaagagccagctgctgaagtttgtggagaagtgcagccccatcggcgtgtacaccagcggcaagggcagcagcgctgctggcctgacagcctctgtgatgagggaccccagcagcaggaacttcatcatggagggcggggccatggtgctggctgatggaggagtggtgtgcattgatgaatttgacaagcaccgggaggccgcccaggcccccctgtgccactggctgcccggggtgtag

SEQ ID NO: 295912 - DNA, 739 bp, Artificial Sequence
  derived and/or modified sequence
tcttgtctcccctggtttgtgaagtgcggaaaaccagaggcgcagtcatgtcgggattcgacgatcctggcattttctacagcgacagcttcgggggcgacgcccaggccgacgaggggcaggcccgcaaatcgcagctgcagaggcgcttcaaggagttcctgcggcagtaccgagtgggcaccgaccgcacgggcttcaccttcaaatacagtcttgcaccttcattgattgagcacctgctgcctgccagatactgttctgggtgctgggctgcagcactgaagctggacctggctcctgcttctagggatgaactcaagcggcattacaacctgggggagtactggattgaggtggagatggaggatctggccagctttgatgaggacctggccgactacttgtacaagcagccagccgagcacctgcagctgctggaggaagctgccaaggaggtagctgatgaggtgacccggccccggccttctggggaggaggtgctccaggacatccaggtcatgctcaagtcggacgccagcccttccagcattcgtagcctgaagtcggacatgatgtcacacctggtgaagatccctggcatcatcatcgcggcctctgcggtccgtgccaaggccacccgcatctctatccagtgccgcagctgccgcaacaccctcaccaacattgccatgcgccctggcctcgagggctatgccctgcccaggaagtgcaacac

SEQ ID NO: 295913 - DNA, 1369 bp, Artificial Sequence
  derived and/or modified sequence
gcgaaactcggcggctgagcgtggaggttcttgtctcccctggtttgtgaagtgcggaaaaccagaggcgcagtcatgtcgggattcgacgatcctggcattttctacagcgacagcttcgggggcgacgcccaggccgacgaggggcaggcccgcaaatcgcagctgcagaggcgcttcaaggagttcctgcggcagtaccgagtgggcaccgaccgcacgggcttcaccttcaaatacagggatgaactcaagcggcattacaacctgggggagtactggattgaggtggagatggaggacccggccccggccttctggggaggaggtgctccaggacatccaggtcatgctcaagtcggacgccagcccttccagcattcgtagcctgaagtcggacatgatgtcacacctggtgaagatccctggcatcatcatcgcggcctctgcggtccgtgccaaggccacccgcatctctatccagtgccgcagctgccgcaacaccctcaccaacattgccatgcgccctggcctcgagggctatgccctgcccaggaagtgcaacacagatcaggctgggcgccccaaatgcccattggacccgtacttcatcatgcccgacaaatgcaaatgcgtggacttccagaccctgaagctgcaggagctgcctgatgcagtcccccacggggagatgcccagacacatgcagctctactgcgacaggtacctgtgtgacaaggtcgtccctgggaacagggttaccatcatgggcatctactccatcaagaagtttggcctgactaccagcaggggccgtgacagggtgggcgtgggcatccgaagctcctacatccgtgtcctgggcatccaggtggacacagatggctctggccgcagctttgctggggccgtgagcccccaggaggaggaggagttccgtcgcctggctgccctcccaaatgtctatgaggtcatctccaagagcatcgccccctccatctttgggggcacagacatgaagaaggccattgcctgcctgctctttgggggctcccgaaagaggctccctgatggacttactcgccgaggagacatcaacctgctgatgctaggggaccctgggacagccaagtcccagcttctgaagtttgtggagaagtgttctcccattggggtatacacgtctgggaaaggcagcagcgcagctggactgacagcctcggtgatgagggacccttcgtcccggaatttcatcatggagggcggagccatggtcctggccgatggtggggtcgtctgtattgacgagtttgacaagcatcgagaagcagctcaagcgccgctttgccattggctcccaggtgtctga

SEQ ID NO: 295914 - DNA, 696 bp, Artificial Sequence
  derived and/or modified sequence
atgagcggcttcgacgaccccggcatcttctacagcgacagcttcgggggcgacgcacaggcagacgaggggcaagctagaaagtcacagcttcaaaggcggttcaaggaattcctgcgccaatatcgcgtaggaacggataggaccgggtttacttttaagtacagcctggcgccctccctgatcgaacacttgctgcctgccaggtactgcagcggctgttgggctgctgcgctgaagctggatctcgcccctgccagtagagacgaactaaaaaggcattacaatcttggtgaatattggatagaggtcgaaatggaggacctggcaagcttcgacgaagatctggctgattacctgtataagcagcctgccgagcacctgcagttactagaggaagcagcgaaagaggtggccgacgaggttacaagaccgcgcccttcaggcgaggaggtgcttcaggacattcaagtgatgctcaaatctgatgctagtccttcctcaattagatccttgaagtcggacatgatgagccacctcgtgaaaatcccaggaattattattgccgcctccgcagttagagcaaaagcaactagaatcagtattcaatgtcgatcatgccggaacactctgactaacatagcaatgcgccccgggctggaaggctatgctcttccccgcaaatgcaacacgtag

SEQ ID NO: 295915 - DNA, 1125 bp, Artificial Sequence
  derived and/or modified sequence
atgaacagcagcggcatcaccacctggggcagcaccggcctgcggtggcgttggagaacaaggccacggccctctggtgaggaagtgttgcaggacatccaggtcatgctcaagtctgatgcatcgccctctagcatacgaagtttaaagagtgacatgatgtcccacctggtcaagattcctgggattatcatcgccgcatctgccgtacgcgccaaagcaacacggataagtattcagtgccgatcctgtcggaatacactcaccaacatcgccatgcgccccggcttagaaggctatgcgctacctcgcaaatgtaacactgaccaagcgggccgcccaaagtgccccctggatccatatttcattatgccagataagtgtaagtgcgttgattttcagactttaaaattgcaagaactgccagacgccgtgccacacggcgaaatgccgaggcacatgcagctgtattgcgataggtacttatgcgacaaagtagtacccggtaaccgtgtgaccattatgggcatttactctattaaaaaatttggtctgacaacctctcgcggccgggatagggtaggtgtagggattcggtcatcatacataagagtgctcggcatacaggtggataccgatggctccggacgcagctttgccggcgccgtgagtccacaagaggaggaggagttccgaaggctggcagcgctgcccaacgtgtatgaggttatcagcaagtcaattgcaccttccattttcggcgggaccgacatgaagaaggccatagcttgcctgctctttggcggctctcgcaagcgcttgcctgatgggctcacaagaagaggggacataaacctgcttatgctgggcgacccaggcacagcaaagagtcaactgctgaagtttgtggagaagtgttcaccaatcggagtgtatacatcggggaaaggctcctcagccgccggcctgacagctagcgtgatgagagatcctagcagccggaacttcattatggagggaggggccatggtccttgccgatgggggagttgtgtgcattgatgaatttgacaagcatagggaggctgctcaagcccctctctgtcactggcttcccggagtttag

SEQ ID NO: 295916 - DNA, 696 bp, Artificial Sequence
  derived and/or modified sequence
atgagcgggttcgacgatccaggtatattttacagcgacagcttcgggggtgacgctcaggctgacgaggggcaggccagaaaatcacaactgcagcggagattcaaggagttcctgcggcagtatcgtgtgggcactgataggacaggttttaccttcaagtacagtcttgcccctagcctgattgaacacctgttaccagcccgttattgtagcggatgctgggctgccgctctgaaactcgatctggctccggcaagcagagacgagctcaagagacactacaatctgggtgagtattggatcgaggtggagatggaggatctggcatctttcgacgaggatttggccgactacctgtataagcagccagctgagcacttgcagttgttggaggaggctgccaaagaggtcgccgacgaagtgactaggccaaggccctctggcgaggaggtgttgcaggatatccaggtgatgcttaagagtgacgcttctccttcgagcatacgctccctgaagtccgacatgatgagtcaccttgtgaagattccagggatcatcatcgctgcgtctgccgttagggcaaaggccacccgaatttcgatccaatgcaggtcatgcagaaatacactgaccaatattgctatgaggccgggtctggaaggctatgccctcccacggaaatgtaatacctag

SEQ ID NO: 295917 - DNA, 1125 bp, Artificial Sequence
  derived and/or modified sequence
atgaacagctctgggattactacatggggtagtaccggtttgcgttggaggtggaggactaggccccgtcctagcggagaagaggtgctccaagacatacaggtaatgctcaagagcgacgcctctccctcttcgatcaggtcccttaagagcgatatgatgagccacctggtgaagatcccgggtattattatcgcggctagcgctgtgcgggctaaagccaccagaatcagtattcagtgcaggtcatgtcggaatacactaaccaacattgcaatgcgccctggattggagggatacgctctacccaggaaatgcaacactgaccaggccggaagacccaagtgtcccctcgacccttatttcatcatgcccgataagtgtaagtgcgtggactttcagaccctgaagcttcaggagctgccagacgctgtcccccacggcgagatgccacgccacatgcagctatactgcgacaggtatctgtgcgacaaggttgtccctggtaatagagtgacgattatgggtatttactcgatcaaaaagtttggcctcactacaagccgaggaagggacagagttggagtgggaataagatcatcctatattcgcgtgctcggaattcaggtggatactgatggctccgggaggagctttgctggcgcagtgagccctcaagaagaagaagaattcaggaggttagcggctctgcccaatgtgtacgaagtcattagtaaatctatcgccccttccatctttggtggaacggacatgaaaaaggccatagcttgtctgctgttcggaggttcgagaaagaggctacccgatggtttaactcgtcggggtgatataaacttgctgatgttgggggatccaggcaccgctaagagccaactcctgaaatttgtggagaaatgttctcctattggcgtgtacacgtccgggaagggctcctcggccgctggcctcacagcctcagttatgagagacccatcaagtcgtaatttcataatggagggtggcgcaatggtcctggccgatggaggcgtggtttgtattgatgagtttgataagcacagagaggctgcccaggccccactctgccattggctgcctggggtctag

SEQ ID NO: 295918 - DNA, 414 bp, Artificial Sequence
  derived and/or modified sequence
atgactagccccttagtgtttgccagtctcagccctgacgctatggccaagatgctggaaatggccgctctaaatgtgggcacaatcaggatctccctgaatacagaaccgcggcctcccgttatcacgcagctagcgccatcacccgagaccctgccgttctgcccggaatggggggcggagaatcaatcgagacatcttaagctgccccccttctttatttgtcgatgtcggggcccgctgtaccaggaggagtcactgtctgaaattcattgccactcaggcttgtttcttgaccagctgagtttgccaacacccttttcaagtttgtccgtaagtctgatccattggacatttatttccactaaatacgtccccggtatcatgcttgcttttggtgggactaacaaatag

SEQ ID NO: 295919 - protein, 899 aa, Artificial Sequence
  derived and/or modified sequence
MPAELRQEQSPGSQASLATMPEAPDVLEETVTVEEDPGTPTSHVSIVTSEDGTTRRTETKVTKTVKTVTTRTVRQVPVGPDGLPLLDGGPPLGPFADGALDRHFLLRGGGPVATLSRAYLSSGGGFPEGPEPRDSPSYGSLSRGLGMRPPRAGPLGPGPGDGCFTLPGHREAFPVGPEPGPPGGRSLPERFQAEPYGLEDDTRSLAADDEGGPELEPDYGTATRRRPECGRGLHTRAYEDTADDGGELADERPAFPMVTAPLAQPERGSMGSLDRLVRRSPSVDSARKEPRWRDPELPEVLAMLRHPVDPVKANAAAYLQHLCFENEGVKRRVRQLRGLPLLVALLDHPRAEVRRRACGALRNLSYGRDTDNKAAIRDCGGVPALVRLLRAARDNEVRELVTGTLWNLSSYEPLKMVIIDHGLQTLTHEVIVPHSGWEREPNEDSKPRDAEWTTVFKNTSGCLRNVSSDGAEARRRLRECEGLVDALLHALQSAVGRKDTDNKSVENCVCIMRNLSYHVHKEVPGADRYQEAEPGPLGSAVGSQRRRRDDASCFGGKKAKEEWFHQGKKDGEMDRNFDTLDLPKRTEAAKGFELLYQPEVVRLYLSLLTESRNFNTLEAAAGALQNLSAGNWMWATYIRATVRKERGLPVLVELLQSETDKVVRAVAIALRNLSLDRRNKDLIGSYAMAELVRNVRNAQAPPRPGACLEEDTVVAVLNTIHEIVSDSLDNARSLLQARGVPALVALVASSQSVREAKAASHVLQTVWSYKELRGTLQKDGWTKARFQSAAATAKGPKGALSPGGFDDSTLPLVDKSLEGEKTGSRDVIPMDALGPDGYSTVDRRERRPRGASSAGEASEKEPLKLDPSRKAPPPGPSRPAVRLVDAVGDAKPQPVDSWV

SEQ ID NO: 295920 - DNA, 2700 bp, Artificial Sequence
  derived and/or modified sequence
atgcccgccgagttgcgacaggaacaaagccccgggagccaggcttcccttgccactatgccggaggcacccgacgtgctggaggagacagttaccgttgaggaggacccaggtacaccaacgagccacgtgagcatcgtcacctctgaggatggaaccacaagaaggaccgagactaaggtcaccaagacggttaagactgtcaccacacggaccgttcgccaagtacctgtggggcccgatggactgccattgttggatggtggcccgcccttgggacctttcgcggatggggctctcgaccgacacttcctgcttaggggcgggggcccggtggccacactgagtcgcgcttatctgtcatctggtggcgggttcccagagggccccgagcctcgagactctcctagttatggatctttaagccgtggactcggcatgcgacccccgcgggctgggcccttaggccctggccccggcgatgggtgctttacacttcctggccacagagaggctttcccagtgggtccagagcctgggcctcccggagggaggtcgctgcccgaaagatttcaggcggagccatacggtttggaggacgatacacgatccttggcggccgacgatgagggaggcccagaactcgaacctgactatggcactgctacgaggcggagacccgagtgtgggagaggcctccacacccgtgcatacgaagatactgccgatgacggcggagagctagcagatgaacgacccgcttttcccatggtgaccgctcctctggctcagcctgagcgcgggtcaatggggtcactcgaccgcctcgtgaggagaagtcctagcgtagattccgcaagaaaggagcctagatggcgcgaccccgaactcccagaggtgctggcgatgctgcgccatcccgtcgaccccgtcaaagccaatgctgcggcctatcttcagcacctttgcttcgagaatgaaggtgtgaagcggcgtgtccgacagctgagaggactccctctgctggtagccttactggaccatcccagagccgaggtaagacgtagagcctgcggcgcccttaggaatctctcttatggtcgcgataccgataacaaggccgccatacgggattgtggtggagttcccgccctcgtgagactgttaagggctgccagagacaacgaggtccgggaactggtgacagggaccctgtggaaccttagctcctacgaaccactgaagatggtgattatcgaccacgggctgcagacccttacacatgaggttattgtcccacacagtggttgggagagagagcccaatgaagattcgaaacctcgagacgccgaatggactactgtctttaaaaatacatctgggtgcctcagaaatgtgtcatctgacggcgccgaggcacggcgccgtctgcgggaatgcgaagggctagtcgatgcactgcttcacgccttgcagtcagcagtcgggagaaaggacacagacaacaaaagtgtggagaactgcgtgtgtatcatgcgcaacctttcataccacgtgcataaggaggtcccaggggcagatagatatcaggaggccgagcccgggcctcttggcagtgctgtgggatcccagcgcagaaggagggatgatgcctcctgttttgggggcaagaaggcaaaggaagagtggtttcatcaggggaaaaaggacggtgaaatggacagaaacttcgatacactggatttacctaaacgcacggaggccgccaaggggtttgaactgctgtaccagccggaagttgtgcgtctctacttatccctgctgacagagtcaagaaactttaatacactggaggcggcagctggagcattgcagaacctcagcgctggtaattggatgtgggctacctatatcagagccacggtgcgtaaggagcgaggcctccctgtgttagtggagctgctccaaagtgagactgataaagtggtgcgcgccgtggctattgcgctccgtaacttaagtctagataggagaaacaaagatttaatcggctcctacgcaatggctgagctggtgagaaatgtccgcaatgcccaggcccctcctcggcctggtgcatgtcttgaggaggacacagttgtggcagtgcttaatactattcatgagatcgtatcagatagcctagacaacgcccgctccctacttcaagcccggggagttcctgcccttgtggctctggtcgcctctagccaaagcgtgcgcgaggctaaggcggctagccatgtcctccagactgtgtggtcatataaagaactcagaggaacgctgcagaaagacgggtggactaaggcgcgctttcagtctgcagctgccacagcgaaaggacccaaaggcgctctgagccccggaggcttcgacgactcaacactcccacttgttgataagagcctcgaaggtgagaaaacagggtcacgcgacgttataccgatggatgctctggggccagatgggtatagtacagtagaccgccgggagcgaaggccgagaggggcatcgtcagccggcgaggccagtgaaaaggagccgctcaagttggatccctcccggaaggctcccccacccggaccctcacgacctgcggtacgtctggttgatgcggtgggcgatgctaaaccccagcccgtggattcctgggtatag

SEQ ID NO: 295921 - DNA, 2700 bp, Artificial Sequence
  derived and/or modified sequence
atgcccgctgagctcaggcaggagcagagccccgggagccaggcaagtctggctacaatgccagaggccccagatgtgctcgaagaaacggtgacggtcgaggaagatccaggaacgcccacatcccatgtttcaatagtgaccagcgaagatggcaccacaagaaggaccgagaccaaggtgaccaaaacggttaagactgttaccacgcgaaccgtgcgccaagttcctgtcgggcccgacgggctccccctacttgacggcggccccccactcggtccttttgccgacggtgcgctggatagacacttcctgcttagggggggcggcccggtagcgactctctctagggcatacttgtcatcaggcggaggatttcccgaggggcccgaacctagagactcaccctcttatggctctctgagcagaggtttaggcatgagaccgccgcgtgccggaccgttgggaccaggacccggcgatggctgctttacccttccgggccaccgtgaagcgttccccgtgggaccggaacccgggcctccaggcggtagaagcttgccagagagatttcaggctgagccttatgggttagaagacgatacaaggtctctggctgcggatgacgagggaggacctgagcttgagccggactacggcacggctaccaggcgtaggcctgagtgtgggcggggccttcacacaagggcctatgaagatactgccgatgacggaggcgagcttgctgacgagaggcccgcttttccaatggtaactgcccctctcgcacagccggagaggggatcgatggggtcactggacaggctggtacgccgatctccttctgtagacagtgccagaaaagagcctcgctggagggacccagagctgcccgaggttctggcaatgctgagacatccagtggaccctgtcaaggcgaacgcagccgcttatctccagcacctctgttttgaaaacgagggagtgaagcggcgggtacggcagctgagaggtctgcctctcctggttgccttgcttgaccaccctcgcgcagaagtcagacggcgggcatgtggcgctctacgcaacctgtcctatggcagggatactgataacaaagccgcaatcagagactgcggtggcgttcccgcactcgtacggctgttgcgggccgcgagagataatgaagttcgcgagctcgtgactggaacactgtggaatttatcctcttatgagccccttaagatggtgattatagaccacggcctccagaccctcacacatgaggttattgttccacattctggctgggagagggagccgaatgaggacagcaaaccgcgcgatgccgagtggaccacggtgtttaaaaacacatcaggctgtctgcgcaatgtttcgtcagatggcgcagaggcacggagaagactcagggagtgtgagggtctggtcgacgccctgttgcatgccctacagtctgcagtcggtagaaaagataccgacaataaaagtgtcgagaactgtgtgtgcattatgcgtaatctgtcatatcacgttcacaaggaggtgccaggtgctgacagatatcaagaggcagagccaggtcccctggggtctgctgtgggctcacagcggcggcggagagacgatgcttcatgtttcggggggaagaaggccaaggaggagtggtttcaccaaggcaaaaaggacggtgagatggatagaaatttcgatacgctggacttgcctaagagaacagaggccgccaagggcttcgagttgctttatcagcccgaagtagtgcgtttgtaccttagtctgctgaccgaatcccgcaactttaatacactagaggctgctgctggcgctctgcagaacttgagtgctggtaattggatgtgggcaacttacatccgggctacggttcgtaaggaacggggtctccccgtacttgtcgagcttctgcagtccgagactgacaaagttgttagggcagtagccattgccctgcgaaatctcagcctggatagacgtaacaaggacctgatcggcagttatgcgatggctgaacttgtgagaaatgtgcgcaacgcacaagctcccccaagacctggcgcctgcctggaagaggacactgttgtggcggttttaaacaccattcacgagatcgtttctgactccctcgacaatgcacgatcactcctacaggctaggggggttccagctctggtggcgcttgtagcctcctcccagagtgtacgtgaggccaaggccgctagccatgtgcttcagacagtctggtcatacaaggaactccgtggtaccctgcaaaaggacggctggactaaagcgcgatttcagtcggcagctgctaccgcaaaggggcccaagggcgcgctaagtcccggggggtttgatgatagcacactccctctcgtcgataagtctctcgagggtgagaaaacaggcagccgagacgttattccgatggatgccctggggcctgacgggtattctacagtggaccgcagagagcggcgtccacgcggcgcctccagtgcaggtgaagctagcgaaaaggaaccgctcaagctggacccttcccgaaaggcacccccacctggaccctccaggcccgccgttcgcctggtggacgccgtgggagatgcgaagcctcaacccgtggacagctgggtgtag

SEQ ID NO: 295922 - DNA, 2700 bp, Artificial Sequence
  derived and/or modified sequence
atgcctgctgagctgcggcaggagcagagccctggcagccaggccagcctggccaccatgcctgaggccccagatgtgctggaggagaccgtgacagtggaggaggaccccggcacccccaccagccacgtgtccatcgtgaccagtgaagatggcaccaccaggagaacagagaccaaggtgaccaagacagtgaagacagtgaccaccaggacagtgcggcaggtgcctgtgggcccagatggcctgcccctgctggatggcggcccccccctgggcccctttgctgatggagccctggacagacacttcctgctgcggggcggcggccctgtggccaccctgagccgggcctacctgagcagcggcggcggcttccctgagggccctgagccccgggacagccccagctatggcagcctgagccggggcctgggcatgaggcctccccgggccggccccctgggccctggccctggagatggctgcttcaccctgcccggccaccgggaggccttccctgtgggccctgagcccggccccccaggcggccgcagcctgcctgagcgcttccaggccgagccctacggcctggaggatgacaccaggagcctggccgcagatgatgaaggaggccctgagctggagccagactatggaacagccaccaggagaagaccagaatgtggccggggcctgcacacccgggcctatgaggacacagcagatgatggaggagagctggctgatgagaggcctgccttccccatggtgacagcccccctggcccagcctgagcggggctccatgggcagcctggaccggctggtgcggcgcagccccagcgtggacagcgccaggaaggagccccgctggagggaccctgagctgcctgaggtgctggccatgctgcggcaccctgtggaccctgtgaaggccaatgctgctgcctacctgcagcacctgtgctttgaaaatgaaggagtgaagagaagagtgcggcagctgcggggcctgcccctgctggtggccctgctggaccaccccagggctgaggtgagaagaagagcctgtggggccctgaggaacctgtcctatggccgggacacagacaacaaggccgccatccgggactgtggcggcgtgcctgccctggtgcggctgctgcgggccgcccgggacaatgaggtgcgggagctggtgacaggcaccctgtggaacctgagcagctatgagcccctgaagatggtgatcatcgaccacggcctgcagaccctgacccatgaggtgattgtgccccacagcggctgggagcgggagcccaatgaagacagcaagcccagagatgctgagtggaccaccgtcttcaagaacaccagcggctgcctgagaaatgtgtccagtgatggagctgaggcccggcggcggctgagagaatgtgagggcctggtggatgccctgctgcacgccctgcagagcgctgtgggcaggaaggacacagacaacaagtctgtggagaactgtgtgtgcatcatgaggaacctgagctaccacgtgcacaaggaggtgcctggagctgaccgctaccaggaggccgagcccggccccctgggcagcgctgtgggcagccagaggagaagaagagatgatgccagctgcttcggcggcaagaaggccaaggaggagtggttccaccagggcaagaaggatggagagatggacaggaactttgacaccctggacctgcccaagaggacagaggccgccaagggctttgagctgctgtaccagcctgaggtggtgcggctgtacctgagcctgctgacagagagcaggaacttcaacaccctggaggccgctgctggggccctgcagaacctgtctgctggcaactggatgtgggccacctacatccgggccaccgtgaggaaggagcggggcctgcctgtgctggtggagctgctgcagagcgagacagacaaggtggtgcgggctgtggccatcgccctgaggaacctgagcctggacagaagaaacaaggacctgattggcagctatgccatggccgagctggtgagaaatgtgagaaatgcccaggccccacccaggcctggggcctgcctggaggaggacacagtggtggccgtgctgaacaccatccatgaaattgtgtctgacagcctggacaatgcccggagcctgctgcaggcccggggcgtgcctgccctggtggccctggtggccagcagccagagcgtgcgggaggccaaggccgccagccacgtgctgcagacagtgtggagctacaaggagctgcggggcaccctgcagaaggatggctggaccaaggcccgcttccagagcgctgctgccacagccaagggccccaagggggccctgagccctgggggctttgatgacagcaccctgcccctggtggacaagagcctggagggggagaagacaggcagcagagatgtgatccccatggatgccctgggcccagatggctacagcacagtggacagaagagagcggcggcccaggggggccagcagcgctggggaggccagcgagaaggagcccctgaagctggaccccagcaggaaggcccctcctcctggccccagcaggcctgctgtgcggctggtggatgctgtgggagatgccaagccccagcctgtggacagctgggtgtag

SEQ ID NO: 295923 - DNA, 2700 bp, Artificial Sequence
  derived and/or modified sequence
atgcccgccgagctgcggcaggagcagagccccggcagccaggcctcacttgccacgatgcctgaagctccagatgtgctcgaggagactgttacagttgaggaggatccgggcacgcccacatcacacgtgagtattgtgacttcagaggatgggactacaagacgtacagagacgaaagttaccaagactgtgaagaccgtgacaacaagaaccgtgcgccaagtgcctgtcgggcccgatggacttcctttgctcgatgggggccctccactgggtcccttcgcagacggtgcattggacagacatttcttgcttcgggggggcggccctgtggcaactctctcacgcgcctaccttagtagtggagggggcttcccggaaggcccggaacctagagactctccaagttacgggagtctttctcggggattgggcatgcgaccccctcgagctggaccgttaggcccaggccccggggacggatgtttcactctcccaggccatcgcgaggcctttcccgttggacccgagcctggcccccctggcggtcgttcactgccagaacggtttcaagcggagccatatggcttggaagacgacacgcgctccctggctgccgacgatgaaggaggtccggagctggaacccgactacgggaccgctacccggcggaggcctgagtgcgggagaggtctgcacactagagcttacgaagataccgccgatgatgggggagagctggcagatgagagacccgcttttcccatggttacagcaccgctggcacagccagaaagggggagcatgggcagcctcgacaggctggtgcggcggagcccttctgtggattcggctcgcaaggaaccacggtggagggatcctgaacttcctgaagtgctcgccatgctgagacatccagtcgatccggtaaaggctaatgcagccgcgtacttgcagcatctgtgcttcgaaaatgagggagtgaaacgaagggtacgtcaactccggggactacctcttcttgtggcgctgctcgatcacccaagggcagaggtacgccgacgcgcctgcggtgcattgcggaacctgtcttacggcagggacactgacaataaggcagccatccgggactgcggtggagtacccgcactcgtgcgactccttcgggccgcccgggacaacgaggtgagagaactagtcactggcactctgtggaaccttagtagctatgaaccactgaagatggttatcatcgatcatggcctgcagaccctcactcacgaagtgatcgtgccacattcggggtgggagcgggaacccaatgaagatagtaagccgagggacgcagagtggacgaccgtctttaagaacacatccggttgtttaaggaacgtttccagcgatggagccgaagccaggagacgactgagagaatgtgagggattggttgacgccctactccacgcactccagtctgccgtcggcaggaaagacactgacaacaaatctgtcgaaaactgcgtatgcatcatgcgcaatctctcctatcatgtacacaaggaagtgcctggagccgataggtaccaggaggccgaaccgggcccccttggctctgccgttggcagccagcgacgacgcagggacgatgcgtcctgttttgggggcaagaaggccaaggaggaatggtttcatcaggggaagaaggacggggaaatggaccgaaatttcgatactctggatctgccaaaacggaccgaggcagccaaaggcttcgaactattgtaccagcctgaggtggttaggttgtacctgtcactgttgacggaaagccggaacttcaacaccttggaggccgctgccggtgccctccagaatctgtccgccggaaactggatgtgggctacgtacatacgggcgacggtgcgcaaggaaaggggcctacctgttctggtggagctcctgcagagcgagacggacaaagtcgtgagggccgtcgccattgcgctcaggaatctgtctttagaccgacgtaataaggacttgataggcagttacgcaatggctgagctagttcggaacgtcagaaatgctcaggcaccccccagacccggcgcctgcctggaggaggacaccgtcgtagctgtgctgaacacaattcacgagatcgtctctgactccttggacaacgcacgctcactcctccaggcacgcggtgtgcccgcactggttgctctggtggcaagcagtcagagcgtccgggaggccaaggctgcgtcccacgtgttgcagacagtttggtcgtacaaagagctccgtggcacattgcagaaggatggctggaccaaggctaggtttcagagcgcagccgccactgctaaaggcccgaaaggagcccttagccccggcggttttgacgacagtaccctgccccttgtagacaaatctcttgagggtgagaagacaggctcccgtgacgtcataccaatggacgcgcttggtccagatggctactcaacggtggataggagggagcgcaggcctcgcggggctagttctgctggagaagccagcgaaaaagaacccttgaaactggacccttccagaaaggctccacctcccggccccagcaggcccgcagtgagactagtggatgccgtgggagatgccaagccacagcccgtggattcttgggtctag

SEQ ID NO: 295924 - DNA, 2700 bp, Artificial Sequence
  derived and/or modified sequence
atgcccgccgagctgcggcaggagcagagccccggcagccaggcctcgctcgcaactatgccagaggccccagacgtgcttgaagagactgttacagtagaagaggatcccggtacacccaccagtcatgtctccattgttaccagtgaggacggcacaacacgcaggacagaaacaaaagtaacaaagactgtcaaaaccgtaacaactcgcaccgtgagacaggttcctgttggacctgacggcttgcctctcttagatggcggaccaccgctaggccccttcgccgacggcgcactcgacaggcactttttactgagagggggcgggcctgttgccactctcagcagggcctacttgagctcaggaggcggtttccctgagggccctgaaccccgcgactcaccgagctatggctcgctgtcccggggccttggaatgagaccacccagagctgggcccttaggccccgggcctggcgatggctgtttcaccttacctggccaccgcgaggccttccctgtgggacccgaacccggtccccctggcgggcgctctctgccagagaggttccaagccgaaccctatgggttagaggacgatacgcggagcctggctgccgatgatgagggcgggccagagttggaaccagactacggcacggccacgcggcgccggccagaatgtggcaggggactgcatacccgcgcgtacgaggacaccgcagatgatggcggcgagctggcggatgagcgcccggccttcccgatggtgaccgccccacttgcccagcctgagagaggttcaatgggctcattagatcggctggtgaggaggagtccaagcgtggattcggctaggaaggagccccgttggcgtgatcccgaattaccagaggtgttagctatgctgagacatcccgtcgatcctgttaaagcaaacgctgccgcctatcttcagcacctgtgctttgagaacgagggcgtcaaacgcagggtgcggcagttaaggggtctgccactgctggtggccctcctggaccatccacgagccgaagtgcggagacgggcctgcggcgctctccgcaacctgtcctacggtcgcgataccgataacaaggctgcaattagggactgtgggggcgttccagcacttgtccgccttctgcgggccgcaagagataacgaggtgcgtgaactcgtgaccgggactctgtggaatctgtcgtcatatgagcccctgaaaatggtcatcattgatcacggactccaaacactgacccacgaggtgattgttccgcactcaggctgggagagagagcccaatgaggactccaagcctcgcgacgcagaatggacaacggtgttcaagaatactagtggatgtctccgtaatgtgtctagcgacggtgctgaggcacggcgcaggctgcgtgagtgtgaaggcctggtggacgccctgctacacgcattgcagagcgcggtgggtcggaaggacactgataataagagcgtcgaaaattgtgtgtgcatcatgagaaatctgtcctaccacgtacataaagaagtgccaggtgcggatagataccaggaagctgaaccgggacccttaggaagtgctgtgggttctcaacgacgcagaagggatgacgcatcttgtttcggcggtaaaaaagctaaagaagagtggtttcatcaagggaaaaaagacggggagatggacaggaacttcgacaccttggacttgcctaagcggactgaggctgcaaaaggttttgaactgctttatcagccggaggtggtgaggctgtacttgagcctgctgaccgagagtcgcaacttcaacacattagaagccgcagctggagctctccagaacctgtctgccggaaactggatgtgggcaacttatattcgggccacggtccgcaaagaacgtggtctccctgtactggtggaattgctgcagtccgaaaccgataaggtggttcgggccgtggccattgcactgaggaatctctctctggaccggcgcaacaaagacttgatcggatcgtatgctatggctgagctcgtcaggaatgtgagaaatgcccaagctcccccacgccccggagcatgtttggaggaagacacagtcgtggcggtactcaacaccattcatgaaattgttagcgactcactggacaacgctagaagtttgctgcaggcacggggagttcccgcactggttgcactcgtggcctcctcccagtccgtccgtgaggccaaggcggcgagtcacgtgctacaaaccgtgtggagttacaaagaactgcgcggtacgttgcagaaggatggctggacgaaggctaggtttcaatctgctgcagccacagcaaaaggccccaagggggcgctctcccctggaggttttgatgactccacactgcctctggtggacaagtccctagagggcgagaaaactggtagccgcgatgtgatccccatggatgccctaggaccagatggctattccactgttgacaggcgcgaaagaagaccaaggggcgccagttccgctggcgaggccagcgagaaggagccactgaagttggatccttcacggaaggcaccacccccaggtccatcacgcccagccgtgaggttggtggacgccgtcggggacgcaaagcctcagcccgtcgattcctgggtgtag

SEQ ID NO: 295925 - DNA, 2700 bp, Artificial Sequence
  derived and/or modified sequence
atgcctgctgagctcagacaagaacagtctcctggctctcaggcctcactcgcaactatgcctgaggccccagacgtgctggaggagactgtgacagtggaagaagatccaggtacaccaaccagccacgtgagtattgtaacaagtgaagacgggacaacaagacgtaccgagacgaaggtgaccaaaaccgtgaaaacagtgactacaagaacagtgaggcaggttccagtcgggcctgatggtttgccactgctggacggcggtccccctcttgggccattcgccgatggcgcattggatagacatttcctactgcggggtggcggacctgtagccacgttgtcccgggcttacttaagtagtggcggtggcttccctgagggcccagaacccagagattcaccgtcctatggaagcctgagtagaggacttgggatgcgcccacccagagcaggccctctggggccaggacccggtgacgggtgcttcacacttccaggccatcgagaggctttcccagtggggcctgagcccggaccacctggcggacggtcattacccgagcgatttcaggccgagccttatgggctggaggacgatacacgttcattggccgctgacgatgaaggcggaccagagctggaacccgactacggcaccgctacacgcaggcgacctgaatgcggcagagggttgcacactagagcctatgaggatactgcagatgacgggggagagctagcagacgagcgccctgcttttcccatggtaacagctccactggctcagccagaacgaggctccatgggcagcctcgacagactggtgcgccgttccccaagcgttgactctgcaaggaaagaacctcgctggagggaccctgagttgcccgaggtacttgccatgcttcgccatccagtggatccagtcaaagccaatgccgcagcttatctccagcatctgtgtttcgagaacgagggcgtgaagaggcgcgtccggcagttacgtggtctacccctgctggtggctttgctggatcatcctagggccgaagtgcgccgtcgcgcatgcggagccctgaggaacctcagttacgggagagacaccgacaataaagctgccataagagactgcggtggggtgccagccctggtgcggctgctccgggcagctcgcgataacgaagtgcgtgagctcgtcactgggacactctggaatctttccagctacgagccactgaagatggtcatcatagatcatgggttgcaaaccttaacccatgaggtgatagttccccattctggttgggagcgcgaaccaaacgaagattcaaaaccaagggatgctgagtggacaactgtgtttaaaaacacaagcggctgtttgaggaacgtgagctcagatggggctgaagcacgaaggcggcttcgggagtgcgagggcctggtcgacgcattactgcacgcgctgcaatccgctgtaggacggaaagacactgataacaaaagcgtagagaactgtgtctgtattatgcggaacttgagctaccacgttcacaaagaagtgccaggagccgatagatatcaggaggcagagcctgggcctctggggagcgctgtgggatctcagcgaaggcggagagatgacgcatcctgcttcggaggcaagaaggctaaggaggagtggtttcaccagggaaaaaaagacggggagatggatcggaattttgacaccctggatttgcctaaacggacagaagccgcaaagggttttgagctgctatatcaaccagaggtcgtcaggttgtatctgtcgcttctaaccgaaagcaggaattttaacacactggaagctgcagcgggtgcattgcagaacctctccgccggaaactggatgtgggcaacgtatatacgtgcgaccgtccgtaaagagcggggtctgcctgtcttggtggagttactacagtccgaaaccgacaaagtagttcgggctgtggccatcgcgttacgaaacctgagcctggacagacgcaacaaggacctgatcggcagttatgccatggctgagctcgtccggaatgttagaaacgcgcaggctcccccacgcccaggagcttgtctggaggaggacaccgttgtggcggtgcttaatacaatccacgaaatagtgagcgatagtcttgacaatgctcggtcactcttgcaggccagaggggtcccagctctggtggcacttgtcgcgtcatcacagagtgtccgcgaagcgaaagccgcttcccatgtcctccaaacagtttggagctataaggagcttagaggcaccctccaaaaagatggttggacgaaggcaagatttcagtcagccgctgcaacggccaaggggcctaagggcgctcttagccccggaggatttgatgacagtaccctgcccctggtcgacaagagtcttgagggggaaaaaactgggtcccgggacgtgatccccatggatgcccttggtcctgacggatattcaacagtggaccgtagagaacggaggccacgtggggcttcctccgccggtgaagcttcagagaaggaacccctcaagctggatccatcccggaaggctccacctcccggtccgagccggccagctgtgcggctggtggacgctgtcggagatgcaaagccacagccagtggactcgtgggtctag

SEQ ID NO: 295926 - DNA, 2700 bp, Artificial Sequence
  derived and/or modified sequence
atgcctgctgagctgaggcaggaacagtctcctgggagccaggcaagcctggctaccatgcctgaagcaccagacgtcttggaggagacagtgactgttgaggaagatcccggtaccccgacatcacatgtgtcaatcgttacttcagaggatggtacgacaagacggactgagaccaaggtaaccaagactgtcaagactgttaccacaaggacggtgcggcaggttcctgtgggacccgatggcctacctctgctggacggaggcccacccttgggcccatttgcagacggagccctggaccggcattttctgctgagagggggtgggccagttgctacgctcagtagggcttatcttagctcagggggaggctttcccgaaggcccagagcctcgggatagcccaagctacggatccctgtctaggggcctggggatgcgtccgccaagagctggacccctgggtccgggtcctggagacggctgttttacactgccaggtcatagggaagccttccctgtcggcccagaacctggccctccaggcggacgctctctgcctgagcggtttcaagcagagccgtatgggctggaggacgatactcgcagcctggctgcagacgacgaagggggtccggaactggagccagactatgggactgctaccagaagacgccctgaatgtggaagaggcttacacacccgggcatacgaggacacggctgacgacggtggcgaacttgccgatgaacggcctgctttcccaatggtgaccgcaccactcgcccagccagagcggggttctatgggatctcttgaccgactggtgcggcgaagtccttccgtggatagtgcgagaaaagagccacgctggcgcgatccggaactgccggaggtgctcgcgatgctccgacatcctgtggatccagtcaaagcaaacgccgctgcctacctgcagcatctttgcttcgagaatgaaggagtgaagcgccgtgttagacagttgcgaggtcttcccctgctggtggctttgctcgatcatcccagagccgaagtgagacgcagagcctgtggcgcactaaggaacctttcctacggtcgggacaccgacaataaagcggcaatcagggactgcgggggagtgcccgctttagtaaggctgctgagggctgccagggacaatgaggtgagggagctggtgaccgggaccctgtggaatctgtcctcttatgaaccactcaagatggttatcatcgaccatggcctgcaaactctgacccacgaagtgattgtgcctcactccggatgggaaagagagcctaacgaagacagtaagcctcgagatgctgagtggacgaccgtgtttaaaaacacatctggctgtctgcgcaatgtgagttctgacggagcagaggccagacgtcgtctgagggagtgtgaaggcttggtggatgcgctgctgcacgcccttcaatctgcagtcggacggaaggacacggacaataaaagcgttgagaactgcgtctgtattatgaggaatttgtcttatcacgtccacaaagaggtgccgggtgcagataggtaccaggaggctgagcccggtcctctgggcagcgctgtgggatcccagcgacgtaggagggacgacgcctcttgttttgggggaaagaaagctaaagaagagtggttccaccaagggaaaaaggacggtgaaatggaccggaattttgacactctcgacctgccaaaaaggacagaggccgcaaaggggttcgagctcctctatcagcctgaggtcgttaggctttatctctccctgctcaccgagtctcggaatttcaacactctagaggccgcagctggtgccctgcagaatctttccgccggaaactggatgtgggctacatacatccgcgcaacagttagaaaagagcgtgggctacctgtactggtggagctgctgcagtcagaaactgataaagtcgtgagggctgtggccatcgccctgagaaacctgagtctcgataggcgcaacaaagacctcatcggatcctacgccatggccgagctggtgagaaatgtgcgaaatgcacaggcgccaccgagaccaggcgcttgcctagaggaagacactgtagtcgccgtcctgaataccatccacgagatcgtgtccgactctttagacaatgccaggtctcttctgcaggcacgaggggttcccgctctggtggccctcgtagcctcttctcagtcagtcagggaggccaaggctgcaagtcacgtactgcagactgtgtggtcttataaagagctacggggtactctgcagaaagacgggtggacaaaggcacgctttcagtcggcagccgctaccgcaaaagggcctaagggcgctttgagccccggtgggttcgatgatagcaccctcccccttgttgacaagtcacttgagggagagaagacgggtagccgggatgtcatcccaatggacgccctcggtcccgatggttactccacagtcgacaggcgggagcgcaggccgcgaggggcatcttccgccggagaggcctccgaaaaggaaccccttaaactcgatcctagcagaaaagcaccaccacctgggccttcccgcccagccgtgcggctcgtagacgctgtgggtgacgccaaaccccaacctgtggactcttgggtctag

SEQ ID NO: 295927 - DNA, 3558 bp, Artificial Sequence
  derived and/or modified sequence
atgccggccgaactcagacaggagcagagcccaggcagccaggcctcactggccacgatgccggaggcacctgatgtgctggaggagaccgtgacggtggaggaggaccccggcacacccacttcccatgtgtctattgtcacatccgaagatggcacaacccggcgcaccgagaccaaggtcaccaagactgtcaagacggtgaccactcggacagtacgccaggtgcccgtgggcccagatggactccccctgctggatggcggccccccactaggcccttttgcagatggtgccctggaccggcatttcctgctgcgtggtggtggcccagtggccacactctctcgagcctacctcagcagtgggggtggctttcccgaaggccccgagccccgggacagccccagctatggcagcctgtcccgagggctgggcatgcggcccccacgtgctggcccccttggcccaggccctggtgatggctgcttcacactgcctggccaccgggaagccttcccggtgggtcctgagcctgggccaccaggtggccgctccctgcccgagcgcttccaggcagagccgtatggcttggaggatgacacgcgcagcctggccgctgatgacgagggtggccctgagctggagcctgactatggcacggccacaaggaggaggcctgagtgtgggcggggccttcataccagggcctacgaggacacagcagatgatggcggcgagctggcggacgagcggcctgcgttcccaatggtgacggcgcccctggcccagcctgaacggggcagcatgggcagcctggaccggctggtgcggcgctcgccctcagtggatagcgcccgcaaggagccgcgctggcgggaccctgagctgcctgaggtgctggccatgctgcggcaccccgtggaccccgtgaaggccaatgcggccgcctacctgcagcatctgtgctttgagaacgagggtgtcaagcggcgtgtacggcagttgcgggggctgccgctgcttgtggcactgctggaccacccgcgggctgaggtgcggcgccgggcctgtggggcactgcgcaacctctcctatggccgcgacactgacaacaaggccgccatccgggactgcggtggtgtgcctgccctggtgcgcctgctgagggctgcccgggacaacgaggtccgtgagcttgtcactggcaccctgtggaacctgtcatcctatgagcccctgaagatggtcatcattgaccatggcctgcagacgctgacccacgaggtgatcgtgccccactcaggatgggagcgtgagcccaacgaggactccaagccacgggacgccgagtggacaactgtcttcaagaacacgtcgggctgcctgaggaatgtgagctccgatggtgctgaggcccggcggcgactccgggagtgtgaagggctggtggacgcgctcctgcatgccctgcagtcggctgtgggccggaaggacactgacaacaagtcggtggagaactgcgtgtgcatcatgcggaacctgtcctaccacgtgcacaaggaggtgcccggggccgacaggtaccaggaggccgagcccgggcccctgggcagtgctgtaggctcccagcgccggaggcgggatgatgccagctgctttggaggcaagaaggccaaagaggagtggttccaccaaggaaagaaggatggtgagatggaccggaactttgacacgctagacctgcccaagcgaactgaggccgccaaaggctttgagctgctgtaccagcccgaggtggtacgtctctacctctccctcctcacggagagccggaacttcaacaccctggaggctgccgccggcgctctgcagaacctcagtgccggcaactggatgtgggccacgtacatccgcgccacagtgcgcaaagagcgcgggctgccggtgcttgtggaactgctgcagtctgagaccgacaaggtggtgcgcgccgtcgccatcgctctgcgcaacctctcgctggaccggcgcaacaaagacctcatcgggagctacgccatggctgagcttgtgcggaatgtgcgcaatgcacaggctccgccgcgaccgggggcctgcctggaggaagacaccgtggtggcggtgctcaacaccatccacgaaatcgtgtccgacagcctggataacgcgcgctcgctcctgcaggcacgcggggtgccagcgttggtggctctcgtggcctccagccaatcggtacgcgaagcgaaggcggcgtcacacgtgctgcagacagtgtggagctacaaggagctgcgtggtaccttgcagaaagatggttggaccaaggcgcgcttccagtcagctgctgctactgccaaggggcctaagggagcactgagtcctgggggcttcgatgacagcacgctgccactggtggacaagagccttgagggcgagaaaactggcagccgggatgtgatccccatggatgcgctgggcccagacggatactccacggtggaccggagggagcggaggccacggggcgccagctctgcaggagaggcctctgagaaggaacccttgaaactcgaccccagcaggaaggcccctccccccgggcccagcaggcccgcggtcaggctggtggacgccgtaggggacgctaagcctcagcccgttgattcctgggtctagcttgcatgcctgggcccaggcccagcctcttgttcttagggcttggatcgtggaagaagggccaccctgagcagatcgtgccgtggagcttggagccccctggcggcaggggttggcagcgcctcgccccagccaagcctgactttggggacaccctcctgcccccccaccccactccccccatcctacctaactccctaggcctgagttagctgtttactgacatggtgctgtgtgtgagcgagtgacagaaggcccgaggaggccgactgggctgctggggcagggcccagggaggtggcagggaagggtgcctggctgggctttggggctggtgggataggagggtgcccctgggaacacagtgccccagtggtgcgggccaggtctggcgccaggggcaggcagctaggcagggagggggctgggaaagaacttggacttctaaaggcggagggtctccctgggcaccctgcaggcaggcagaccacggtgtggggggtgccccacaaggcccagccctgggcaaggaagctttggaagcagcaaggtgggggtcaggctacaggtgccccacctccccagagccctgcagtcacgtgaggcccctgtgcagtagagagcctttctccagcccatgctggctggggccggggctgccgcatctgcctggagcctgggcagcacctccgggactgaccttcggcagtggctgggggactgctttcagtgcctgctgttcgtgactcagaaacagaagaaaaacactgagaaaaagcattaaaaataagccaaaataagactattggtaaacacctaaatttttgtaagaaaatttaaaaattaaagcagcaaagg

SEQ ID NO: 295928 - DNA, 2700 bp, Artificial Sequence
  derived and/or modified sequence
atgccggccgaactcagacaggagcagagcccaggcagccaggcctcactggccacgatgccggaggcacctgatgtgctggaggagaccgtgacggtggaggaggaccccggcacacccacttcccatgtgtctattgtcacatccgaagatggcacaacccggcgcaccgagaccaaggtcaccaagactgtcaagacggtgaccactcggacagtacgccaggtgcccgtgggcccagatggactccccctgctggatggcggccccccactaggcccttttgcagatggtgccctggaccggcatttcctgctgcgtggtggtggcccagtggccacactctctcgagcctacctcagcagtgggggtggctttcccgaaggccccgagccccgggacagccccagctatggcagcctgtcccgagggctgggcatgcggcccccacgtgctggcccccttggcccaggccctggtgatggctgcttcacactgcctggccaccgggaagccttcccggtgggtcctgagcctgggccaccaggtggccgctccctgcccgagcgcttccaggcagagccgtatggcttggaggatgacacgcgcagcctggccgctgatgacgagggtggccctgagctggagcctgactatggcacggccacaaggaggaggcctgagtgtgggcggggccttcataccagggcctacgaggacacagcagatgatggcggcgagctggcggacgagcggcctgcgttcccaatggtgacggcgcccctggcccagcctgaacggggcagcatgggcagcctggaccggctggtgcggcgctcgccctcagtggatagcgcccgcaaggagccgcgctggcgggaccctgagctgcctgaggtgctggccatgctgcggcaccccgtggaccccgtgaaggccaatgcggccgcctacctgcagcatctgtgctttgagaacgagggtgtcaagcggcgtgtacggcagttgcgggggctgccgctgcttgtggcactgctggaccacccgcgggctgaggtgcggcgccgggcctgtggggcactgcgcaacctctcctatggccgcgacactgacaacaaggccgccatccgggactgcggtggtgtgcctgccctggtgcgcctgctgagggctgcccgggacaacgaggtccgtgagcttgtcactggcaccctgtggaacctgtcatcctatgagcccctgaagatggtcatcattgaccatggcctgcagacgctgacccacgaggtgatcgtgccccactcaggatgggagcgtgagcccaacgaggactccaagccacgggacgccgagtggacaactgtcttcaagaacacgtcgggctgcctgaggaatgtgagctccgatggtgctgaggcccggcggcgactccgggagtgtgaagggctggtggacgcgctcctgcatgccctgcagtcggctgtgggccggaaggacactgacaacaagtcggtggagaactgcgtgtgcatcatgcggaacctgtcctaccacgtgcacaaggaggtgcccggggccgacaggtaccaggaggccgagcccgggcccctgggcagtgctgtaggctcccagcgccggaggcgggatgatgccagctgctttggaggcaagaaggccaaagaggagtggttccaccaaggaaagaaggatggtgagatggaccggaactttgacacgctagacctgcccaagcgaactgaggccgccaaaggctttgagctgctgtaccagcccgaggtggtacgtctctacctctccctcctcacggagagccggaacttcaacaccctggaggctgccgccggcgctctgcagaacctcagtgccggcaactggatgtgggccacgtacatccgcgccacagtgcgcaaagagcgcgggctgccggtgcttgtggaactgctgcagtctgagaccgacaaggtggtgcgcgccgtcgccatcgctctgcgcaacctctcgctggaccggcgcaacaaagacctcatcgggagctacgccatggctgagcttgtgcggaatgtgcgcaatgcacaggctccgccgcgaccgggggcctgcctggaggaagacaccgtggtggcggtgctcaacaccatccacgaaatcgtgtccgacagcctggataacgcgcgctcgctcctgcaggcacgcggggtgccagcgttggtggctctcgtggcctccagccaatcggtacgcgaagcgaaggcggcgtcacacgtgctgcagacagtgtggagctacaaggagctgcgtggtaccttgcagaaagatggttggaccaaggcgcgcttccagtcagctgctgctactgccaaggggcctaagggagcactgagtcctgggggcttcgatgacagcacgctgccactggtggacaagagccttgagggcgagaaaactggcagccgggatgtgatccccatggatgcgctgggcccagacggatactccacggtggaccggagggagcggaggccacggggcgccagctctgcaggagaggcctctgagaaggaacccttgaaactcgaccccagcaggaaggcccctccccccgggcccagcaggcccgcggtcaggctggtggacgccgtaggggacgctaagcctcagcccgttgattcctgggtctag

SEQ ID NO: 295929 - DNA, 2700 bp, Artificial Sequence
  derived and/or modified sequence
atgcccgccgagctgagacaggagcagagccccggcagccaggccagcctggccaccatgcccgaggcccccgacgtgctggaggagaccgtgaccgtggaggaggaccccggcacccccaccagccacgtgagcatcgtgaccagcgaggacggcaccaccagaagaaccgagaccaaggtgaccaagaccgtgaagaccgtgaccaccagaaccgtgagacaggtgcccgtgggccccgacggcctgcccctgctggacggcggcccccccctgggccccttcgccgacggcgccctggacagacacttcctgctgagaggcggcggccccgtggccaccctgagcagagcctacctgagcagcggcggcggcttccccgagggccccgagcccagagacagccccagctacggcagcctgagcagaggcctgggcatgagaccccccagagccggccccctgggccccggccccggcgacggctgcttcaccctgcccggccacagagaggccttccccgtgggccccgagcccggcccccccggcggcagaagcctgcccgagagattccaggccgagccctacggcctggaggacgacaccagaagcctggccgccgacgacgagggcggccccgagctggagcccgactacggcaccgccaccagaagaagacccgagtgcggcagaggcctgcacaccagagcctacgaggacaccgccgacgacggcggcgagctggccgacgagagacccgccttccccatggtgaccgcccccctggcccagcccgagagaggcagcatgggcagcctggacagactggtgagaagaagccccagcgtggacagcgccagaaaggagcccagatggagagaccccgagctgcccgaggtgctggccatgctgagacaccccgtggaccccgtgaaggccaacgccgccgcctacctgcagcacctgtgcttcgagaacgagggcgtgaagagaagagtgagacagctgagaggcctgcccctgctggtggccctgctggaccaccccagagccgaggtgagaagaagagcctgcggcgccctgagaaacctgagctacggcagagacaccgacaacaaggccgccatcagagactgcggcggcgtgcccgccctggtgagactgctgagagccgccagagacaacgaggtgagagagctggtgaccggcaccctgtggaacctgagcagctacgagcccctgaagatggtgatcatcgaccacggcctgcagaccctgacccacgaggtgatcgtgccccacagcggctgggagagagagcccaacgaggacagcaagcccagagacgccgagtggaccaccgtgttcaagaacaccagcggctgcctgagaaacgtgagcagcgacggcgccgaggccagaagaagactgagagagtgcgagggcctggtggacgccctgctgcacgccctgcagagcgccgtgggcagaaaggacaccgacaacaagagcgtggagaactgcgtgtgcatcatgagaaacctgagctaccacgtgcacaaggaggtgcccggcgccgacagataccaggaggccgagcccggccccctgggcagcgccgtgggcagccagagaagaagaagagacgacgccagctgcttcggcggcaagaaggccaaggaggagtggttccaccagggcaagaaggacggcgagatggacagaaacttcgacaccctggacctgcccaagagaaccgaggccgccaagggcttcgagctgctgtaccagcccgaggtggtgagactgtacctgagcctgctgaccgagagcagaaacttcaacaccctggaggccgccgccggcgccctgcagaacctgagcgccggcaactggatgtgggccacctacatcagagccaccgtgagaaaggagagaggcctgcccgtgctggtggagctgctgcagagcgagaccgacaaggtggtgagagccgtggccatcgccctgagaaacctgagcctggacagaagaaacaaggacctgatcggcagctacgccatggccgagctggtgagaaacgtgagaaacgcccaggccccccccagacccggcgcctgcctggaggaggacaccgtggtggccgtgctgaacaccatccacgagatcgtgagcgacagcctggacaacgccagaagcctgctgcaggccagaggcgtgcccgccctggtggccctggtggccagcagccagagcgtgagagaggccaaggccgccagccacgtgctgcagaccgtgtggagctacaaggagctgagaggcaccctgcagaaggacggctggaccaaggccagattccagagcgccgccgccaccgccaagggccccaagggcgccctgagccccggcggcttcgacgacagcaccctgcccctggtggacaagagcctggagggcgagaagaccggcagcagagacgtgatccccatggacgccctgggccccgacggctacagcaccgtggacagaagagagagaagacccagaggcgccagcagcgccggcgaggccagcgagaaggagcccctgaagctggaccccagcagaaaggcccccccccccggccccagcagacccgccgtgagactggtggacgccgtgggcgacgccaagccccagcccgtggacagctgggtgtag

SEQ ID NO: 295930 - protein, 893 aa, Artificial Sequence
  derived and/or modified sequence
MPAELRQEQSPGSQASLATMPEAPDVLEETVTVEEDPGTPTSHVSIVTSEDGTTRRTETKVTKTVKTVTTRTVRQVPVGPDGLPLLDGGPPLGPFADGALDRHFLLRGGGPVATLSRAYLSSGGGFPEGPEPRDSPSYGSLSRGLGMRPPRAGPLGPGPGDGCFTLPGHREAFPVGPEPGPPGGRSLPERFQAEPYGLEDDTRSLAADDEGGPELEPDYGTATRRRPECGRGLHTRAYEDTADDGGELADERPAFPMVTAPLAQPERGSMGSLDRLVRRSPSVDSARKEPRWRDPELPEVLAMLRHPVDPVKANAAAYLQHLCFENEGVKRRVRQLRGLPLLVALLDHPRAEVRRRACGALRNLSYGRDTDNKAAIRDCGGVPALVRLLRAARDNEVRELVTGTLWNLSSYEPLKMVIIDHGLQTLTHEVIVPHSGWEREPNEDSKPRDAEWTTVFKNTSGCLRNVSSDGAEARRRLRECEGLVDALLHALQSAVGRKDTDNKSVENCVCIMRNLSYHVHKEVPGADRYQEAEPGPLGSAVGSQRRRRDDASCFGGKKAKGKKDGEMDRNFDTLDLPKRTEAAKGFELLYQPEVVRLYLSLLTESRNFNTLEAAAGALQNLSAGNWMWATYIRATVRKERGLPVLVELLQSETDKVVRAVAIALRNLSLDRRNKDLIGSYAMAELVRNVRNAQAPPRPGACLEEDTVVAVLNTIHEIVSDSLDNARSLLQARGVPALVALVASSQSVREAKAASHVLQTVWSYKELRGTLQKDGWTKARFQSAAATAKGPKGALSPGGFDDSTLPLVDKSLEGEKTGSRDVIPMDALGPDGYSTVDRRERRPRGASSAGEASEKEPLKLDPSRKAPPPGPSRPAVRLVDAVGDAKPQPVDSWV

SEQ ID NO: 295931 - DNA, 2682 bp, Artificial Sequence
  derived and/or modified sequence
atgccggccgagctccgacaggaacaatctccagggtctcaggcttccttggccaccatgcccgaagccccggatgtgctggaagaaacagtcaccgtcgaagaagatcctggaaccccgacgtctcatgtctcaatcgtgacatccgaggatggcactacaaggagaacggagaccaaggtcactaagaccgttaagacggtgacaactagaaccgtgaggcaagtgccagtgggcccggacgggctgcctctcttggacggcgggccgcccctcgggccgttcgctgacggagccctggaccgccatttccttctaagggggggcgggccagtggctacactctccagggcgtatttgagcagcggaggcgggtttccggagggacctgaacctcgtgatagcccatcttacgggtcactgtcacgcggcttgggcatgcgtccccctagagctgggcccctcggtccgggacctggtgacgggtgcttcaccctacccgggcatcgggaggcattccccgtggggcccgagcccggccctcccggaggccgatcacttccagaacgcttccaagccgagccctatgggctggaggatgacacgcggtccttggctgccgatgacgagggagggcctgagcttgagccggactatggaaccgccacaaggaggagacccgaatgtggacgggggttgcacactcgcgcctatgaggatacagctgacgatggaggcgagcttgctgacgagaggcctgcttttcccatggtcactgcacctctggcccaacccgaacgcggtagtatgggcagcctggatagattagtccgaaggtcacccagtgtggattccgcaaggaaagaaccaagatggagggaccctgaactccctgaagtgttagcaatgttgaggcaccctgtcgatcccgtgaaggcaaacgccgcagcgtaccttcagcatctttgttttgagaacgagggcgtcaagcgccgagtacgccagctccgaggactcccactgctagtggccctgctcgaccatcctcgagccgaggttaggcggcgcgcttgcggcgccctacggaatctgtcatatggacgcgacaccgataataaggcagctattcgagactgcggcggcgttccagcattagtgaggctcctgagagctgctcgcgacaatgaggtacgggaacttgttactggcacactttggaaccttagctcatatgaacctcttaagatggtcataatagatcatggtctccagactttaactcacgaggtgatcgtcccccattccggctgggaaagggaacccaatgaagattctaaaccccgcgatgctgagtggaccactgtatttaagaacacttctggctgtcttcgaaacgtgtcttccgacggtgccgaggcacgccgacgactcagggagtgtgagggcctcgtggacgccctgctgcacgcccttcaatccgcagtcggccgaaaagataccgataacaaaagcgtagagaattgcgtatgtattatgcgaaacctttcataccacgtccacaaggaggtgccaggtgctgataggtatcaagaggccgaacctggaccactcggctccgctgttggaagccagaggagacggcgagacgatgcgtcctgcttcggcggtaagaaagccaagggcaagaaagacggcgagatggatcgaaacttcgatacattggacttacccaagcggaccgaagccgccaagggctttgagctcctgtaccagccagaggtggtgaggctctacctctccctgttaactgagtctcgaaactttaataccctggaggcagccgctggggccctgcaaaatttgtctgccggcaattggatgtgggctacgtatattagagctacggtgcgaaaagagcgaggacttcctgtgttagttgagctattgcaatctgaaaccgacaaggtagtgcgagctgtggcgattgcgcttcgaaatttaagcttggaccgtaggaacaaagacctcatcggatcgtatgccatggctgagctagtgcgcaatgtgcgaaacgcacaggcgccaccacgccccggtgcctgtcttgaggaggacaccgtcgtggcagtgttaaacacaattcacgaaatagtgtccgactccctcgacaacgcgagatctctgcttcaagctcgcggggtgcccgcattggtggccctcgtggcaagctctcagtctgtgcgggaagctaaggctgcttcccacgtgctgcagaccgtctggtcatacaaggaattgcgcggaactcttcaaaaggatggatggacgaaggctcgctttcagtctgccgctgccaccgccaagggacccaagggagcgttgtcacctggcggcttcgacgacagtaccctcccactggtggataagtcactagagggtgaaaaaactggaagtcgggatgtgattccaatggatgccctgggtcctgatggatacagtactgttgaccgacgagaacgcaggcctcggggcgcgagtagcgccggggaggccagcgaaaaagagccgctcaaactggatccctcccggaaagcacccccccctggcccatctagaccagcagtacgccttgtggacgctgtaggagacgctaagccccagccagtggactcttgggtgtag

SEQ ID NO: 295932 - DNA, 2682 bp, Artificial Sequence
  derived and/or modified sequence
atgcctgctgagctgcggcaggagcagagccctggcagccaggccagcctggccaccatgcctgaggccccagatgtgctggaggagaccgtgacagtggaggaggaccccggcacccccaccagccacgtgtccatcgtgaccagtgaagatggcaccaccaggagaacagagaccaaggtgaccaagacagtgaagacagtgaccaccaggacagtgcggcaggtgcctgtgggcccagatggcctgcccctgctggatggcggcccccccctgggcccctttgctgatggagccctggacagacacttcctgctgcggggcggcggccctgtggccaccctgagccgggcctacctgagcagcggcggcggcttccctgagggccctgagccccgggacagccccagctatggcagcctgagccggggcctgggcatgaggcctccccgggccggccccctgggccctggccctggagatggctgcttcaccctgcccggccaccgggaggccttccctgtgggccctgagcccggccccccaggcggccgcagcctgcctgagcgcttccaggccgagccctacggcctggaggatgacaccaggagcctggccgcagatgatgaaggaggccctgagctggagccagactatggaacagccaccaggagaagaccagaatgtggccggggcctgcacacccgggcctatgaggacacagcagatgatggaggagagctggctgatgagaggcctgccttccccatggtgacagcccccctggcccagcctgagcggggctccatgggcagcctggaccggctggtgcggcgcagccccagcgtggacagcgccaggaaggagccccgctggagggaccctgagctgcctgaggtgctggccatgctgcggcaccctgtggaccctgtgaaggccaatgctgctgcctacctgcagcacctgtgctttgaaaatgaaggagtgaagagaagagtgcggcagctgcggggcctgcccctgctggtggccctgctggaccaccccagggctgaggtgagaagaagagcctgtggggccctgaggaacctgtcctatggccgggacacagacaacaaggccgccatccgggactgtggcggcgtgcctgccctggtgcggctgctgcgggccgcccgggacaatgaggtgcgggagctggtgacaggcaccctgtggaacctgagcagctatgagcccctgaagatggtgatcatcgaccacggcctgcagaccctgacccatgaggtgattgtgccccacagcggctgggagcgggagcccaatgaagacagcaagcccagagatgctgagtggaccaccgtcttcaagaacaccagcggctgcctgagaaatgtgtccagtgatggagctgaggcccggcggcggctgagagaatgtgagggcctggtggatgccctgctgcacgccctgcagagcgctgtgggcaggaaggacacagacaacaagtctgtggagaactgtgtgtgcatcatgaggaacctgagctaccacgtgcacaaggaggtgcctggagctgaccgctaccaggaggccgagcccggccccctgggcagcgctgtgggcagccagaggagaagaagagatgatgccagctgcttcggcggcaagaaggccaagggcaagaaggatggagagatggacaggaactttgacaccctggacctgcccaagaggacagaggccgccaagggctttgagctgctgtaccagcctgaggtggtgcggctgtacctgagcctgctgacagagagcaggaacttcaacaccctggaggccgctgctggggccctgcagaacctgtctgctggcaactggatgtgggccacctacatccgggccaccgtgaggaaggagcggggcctgcctgtgctggtggagctgctgcagagcgagacagacaaggtggtgcgggctgtggccatcgccctgaggaacctgagcctggacagaagaaacaaggacctgattggcagctatgccatggccgagctggtgagaaatgtgagaaatgcccaggccccacccaggcctggggcctgcctggaggaggacacagtggtggccgtgctgaacaccatccatgaaattgtgtctgacagcctggacaatgcccggagcctgctgcaggcccggggcgtgcctgccctggtggccctggtggccagcagccagagcgtgcgggaggccaaggccgccagccacgtgctgcagacagtgtggagctacaaggagctgcggggcaccctgcagaaggatggctggaccaaggcccgcttccagagcgctgctgccacagccaagggccccaagggggccctgagccctgggggctttgatgacagcaccctgcccctggtggacaagagcctggagggggagaagacaggcagcagagatgtgatccccatggatgccctgggcccagatggctacagcacagtggacagaagagagcggcggcccaggggggccagcagcgctggggaggccagcgagaaggagcccctgaagctggaccccagcaggaaggcccctcctcctggccccagcaggcctgctgtgcggctggtggatgctgtgggagatgccaagccccagcctgtggacagctgggtgtag

SEQ ID NO: 295933 - DNA, 2682 bp, Artificial Sequence
  derived and/or modified sequence
atgcccgccgagctgcggcaggagcagagccccggcagccaggcctccctggcaaccatgcccgaagcgcccgacgtcctggaggaaactgtgactgtagaagaggaccctggcaccccaacttcacacgtgtcaatcgtgacgagcgaggatggaacaacacggaggacggagactaaggtcacgaagaccgtgaaaactgtaactactcgcaccgtgaggcaagtaccagttggcccagacggcctccctttacttgatggcggacctccattaggccctttcgctgatggtgcactggacaggcatttcttgctgcggggcggaggccccgtagcgacactgagccgggcctacctctcgtccggcgggggttttcctgagggtccagaacccagggatagtccgagctacggatcactatctagagggttgggcatgagacctcccagggctggccccttaggccccggtccaggggacggctgcttcactctccccggtcaccgtgaagcttttcccgtcggccccgagcctggaccacccggcggacgaagtctccccgagcgatttcaagcagagccgtacggactggaagatgatacacgctcactggctgccgatgacgaaggcgggcctgagctggagccagactatggtaccgccacccggcgacggccagaatgcggacgaggcctccacactcgggcctacgaggacactgccgacgatggcggcgaacttgcggatgagcggcctgccttcccaatggtaactgcgccactcgcacagcctgagcgagggtctatgggaagtctcgaccggctggtaagaaggagcccttcggtcgacagcgctcgtaaagagcctcgatggcgggatcctgaattgccagaggtgctggctatgttacgtcatcccgtcgaccccgtgaaggccaatgccgccgcatatttgcagcacctgtgcttcgaaaacgagggggttaaaagacgcgtacggcagcttcgaggcctccctttgctagtcgccctcctagatcacccaagagccgaggtgcgacgcagagcctgcggggctctccgcaatttgagctacggaagagacaccgataacaaggcggccatccgggattgtggtggggtgcccgccttagtccgcctgctgagggctgcccgggataacgaggtgagagaactggtaacaggtaccctttggaacctgtcgtcatatgagcccctgaaaatggtgattatcgatcacggcctccagaccctgacacatgaggtgattgtgccccactcagggtgggaaagagagccaaacgaagactctaagccaagagatgcagaatggaccaccgtatttaagaatacgtctggctgtttgagaaacgttagtagcgacggggcagaggccaggcgccggctgcgcgagtgcgagggcttagtggatgcattgctccacgcattgcagtctgctgtgggccgtaaggatactgataacaagagtgttgagaactgcgtctgtatcatgaggaacttgtcgtaccacgtgcataaagaggtacctggcgcagaccgctatcaggaagcagagcccggccctcttggttccgcggttggctcccagaggcggaggcgggatgatgcaagttgtttcgggggaaaaaaggcaaaaggtaaaaaggatggtgagatggatagaaacttcgatactctggacctccctaagagaaccgaggctgctaaaggcttcgaactcctgtatcagcctgaagtagtgagactttacctcagccttctcaccgagagccggaattttaacacgctcgaagctgcagccggagccctgcagaacctgtctgcaggcaactggatgtgggctacctacatcagggccacggttcgaaaggaaaggggcctgccagtgttggtggagctgctgcagagcgagacagacaaagtggtccgtgccgtggctatcgccctcagaaacctgagcctggatcgccgcaacaaagatctcatcgggtcttacgcaatggccgaactcgtcaggaacgtgcgtaatgcgcaagcacccccacgccctggtgcttgtctggaggaagacaccgtcgtagcagtcctgaataccatccatgagatcgttagtgacagcctggataacgctagatctctgctgcaggcgcggggcgtacctgcgttagtggcactggtagcgagcagtcaaagtgtgcgcgaagcaaaggctgcatcccatgtgctgcagaccgtttggagctacaaggagctgcgtggcacattgcagaaggatgggtggactaaggcacgattccagtcggcagcagcgaccgcaaaggggcctaagggcgcactgagtcccggaggattcgacgattctaccctgcccctcgtcgataagtctctggagggcgagaaaactggaagccgagatgtgatccccatggatgccctgggccctgacggatactctactgtcgataggcgcgaaaggagaccacgcggggcaagctccgcgggcgaggcaagtgaaaaggaaccactgaagctggaccccagcaggaaggcccccccgcctggccccagcagaccagcagttcgattggtcgatgccgtcggcgatgccaagccacaacctgtggacagttgggtgtag

SEQ ID NO: 295934 - DNA, 2682 bp, Artificial Sequence
  derived and/or modified sequence
atgcccgcagaactgagacaggaacaatctcccggatcacaggcatctctcgctacgatgcccgaagccccagatgttctagaagaaaccgtgactgtggaagaggatcccggtacgccaacctcccacgtgagtatcgtcacctccgaagatggtacgacccgccgtactgagaccaaggtgactaagaccgtgaaaacagttactacaagaaccgtgagacaggtgccagtgggtccagatgggctgccactgcttgacgggggacccccattgggaccctttgcagacggcgcactggatcgccacttcttgctgaggggtggaggtcccgtggccacactttcaagagcctatttgtctagcgggggagggtttccagagggacctgagccacgagactccccaagttatggtagcttgagtcgtggcctggggatgcgacccccaagggcaggtccgctcgggccaggtcctggagacgggtgtttcaccctgccaggtcatcgggaggctttccccgttgggcctgaacctggtccccctgggggaagatcccttcccgagcggttccaggccgaaccctatggcctcgaggacgacactcgtagcctggctgctgacgacgaaggagggcctgaattagagccggactatggcaccgccactcggcgaagaccggagtgtggcaggggtctccatactcgcgcttatgaggacactgctgacgatggcggtgagcttgccgacgaacgccctgcattccccatggttaccgccccactcgctcagcccgaacgcggaagcatgggttcactcgataggctcgttaggcgctcaccctcagtggactccgccagaaaggaaccacggtggagagaccccgagctgcctgaggtcctggcaatgctgcgacatccggtggacccagtgaaggccaacgcggctgcgtacttacagcatttatgctttgaaaacgagggcgtgaaaaggagggtacgtcagcttcgaggtctgcctttgctggtagcactgctggaccaccctcgtgccgaagtccgcagaagggcgtgcggagcattgcgcaatttgtcttatgggagggatactgacaacaaggcagccatacgcgattgtggaggggtgcccgctcttgtaaggctcctgcgagcagctcgggataatgaagtccgtgagctcgtgaccggaaccctgtggaatctttcctcctacgagcccctaaagatggtgattatagatcacgggctccagactctgacccatgaggtgatagtgccacacagcgggtgggaacgtgagccaaatgaggactcaaagccgagggacgcagaatggacaacagtgttcaaaaacaccagtggctgcctgcgcaatgtcagtagtgacggcgcagaagcgagacgacgactgagggagtgcgagggcttggtcgacgctcttcttcacgctttacagtcagccgtgggcagaaaggacaccgacaataagagcgtggagaactgcgtatgcatcatgcgcaacttatcatatcacgtgcataaggaggtcccgggtgccgatcgatatcaggaagcggaacctgggcctctcggatcagctgtcgggagccagaggcggagacgtgacgacgcgtcgtgtttcggtgggaaaaaagcgaagggtaaaaaagatggagagatggataggaacttcgatacgctggatctacccaagcgcaccgaggccgcaaagggtttcgaactgctgtatcagcctgaagtcgtgagactctacctctctctgttaactgaatcacgaaattttaacaccctggaagccgcagccggtgccctacagaacctgtccgcaggtaactggatgtgggcaacctacatccgcgcaactgtgcggaaggagcggggtttgcccgtgttggtggaactgctgcagagtgagaccgataaagtggtgagagccgtggcaatcgctctcaggaacctcagtctggaccggaggaataaggacctcatcggctcttacgccatggcggaactcgtgcgcaacgttagaaatgcccaagcccctccaagaccgggtgcctgcttggaagaagacaccgtcgtggccgtacttaatactatccacgagattgttagtgattccctggacaacgctcgaagcctgctgcaagctcgaggagttcctgcactggtggccctggtagcgtctagccagtcagttcgagaggcaaaagctgcctcccatgtcctgcagacagtttggtcttataaggagcttcgaggcactttgcaaaaggacggatggacgaaggcacggttccagagtgccgctgcgacagccaagggacccaagggcgcacttagccccggaggattcgatgacagtacactccccctggtggacaagtccctggaaggggaaaaaactggctcccgagacgtcatccccatggatgccctgggaccagatggctattctactgttgatagaagagagcgtcgacctaggggagcatcaagtgctggtgaggctagcgagaaggaaccactaaaattggatccttctcgaaaagcccctccaccaggccctagtaggccagcagtgagactggtcgatgccgtgggcgacgcaaagcctcagccagtggactcttgggtgtag

SEQ ID NO: 295935 - DNA, 2682 bp, Artificial Sequence
  derived and/or modified sequence
atgccggccgaactcagacaggagcagagcccaggcagccaggcctcactggccacgatgccggaggcacctgatgtgctggaggagaccgtgacggtggaggaggaccccggcacacccacttcccatgtgtctattgtcacatccgaagatggcacaacccggcgcaccgagaccaaggtcaccaagactgtcaagacggtgaccactcggacagtacgccaggtgcccgtgggcccagatggactccccctgctggatggcggccccccactaggcccttttgcagatggtgccctggaccggcatttcctgctgcgtggtggtggcccagtggccacactctctcgagcctacctcagcagtgggggtggctttcccgaaggccccgagccccgggacagccccagctatggcagcctgtcccgagggctgggcatgcggcccccacgtgctggcccccttggcccaggccctggtgatggctgcttcacactgcctggccaccgggaagccttcccggtgggtcctgagcctgggccaccaggtggccgctccctgcccgagcgcttccaggcagagccgtatggcttggaggatgacacgcgcagcctggccgctgatgacgagggtggccctgagctggagcctgactatggcacggccacaaggaggaggcctgagtgtgggcggggccttcataccagggcctacgaggacacagcagatgatggcggcgagctggcggacgagcggcctgcgttcccaatggtgacggcgcccctggcccagcctgaacggggcagcatgggcagcctggaccggctggtgcggcgctcgccctcagtggatagcgcccgcaaggagccgcgctggcgggaccctgagctgcctgaggtgctggccatgctgcggcaccccgtggaccccgtgaaggccaatgcggccgcctacctgcagcatctgtgctttgagaacgagggtgtcaagcggcgtgtacggcagttgcgggggctgccgctgcttgtggcactgctggaccacccgcgggctgaggtgcggcgccgggcctgtggggcactgcgcaacctctcctatggccgcgacactgacaacaaggccgccatccgggactgcggtggtgtgcctgccctggtgcgcctgctgagggctgcccgggacaacgaggtccgtgagcttgtcactggcaccctgtggaacctgtcatcctatgagcccctgaagatggtcatcattgaccatggcctgcagacgctgacccacgaggtgatcgtgccccactcaggatgggagcgtgagcccaacgaggactccaagccacgggacgccgagtggacaactgtcttcaagaacacgtcgggctgcctgaggaatgtgagctccgatggtgctgaggcccggcggcgactccgggagtgtgaagggctggtggacgcgctcctgcatgccctgcagtcggctgtgggccggaaggacactgacaacaagtcggtggagaactgcgtgtgcatcatgcggaacctgtcctaccacgtgcacaaggaggtgcccggggccgacaggtaccaggaggccgagcccgggcccctgggcagtgctgtaggctcccagcgccggaggcgggatgatgccagctgctttggaggcaagaaggccaaaggaaagaaggatggtgagatggaccggaactttgacacgctagacctgcccaagcgaactgaggccgccaaaggctttgagctgctgtaccagcccgaggtggtacgtctctacctctccctcctcacggagagccggaacttcaacaccctggaggctgccgccggcgctctgcagaacctcagtgccggcaactggatgtgggccacgtacatccgcgccacagtgcgcaaagagcgcgggctgccggtgcttgtggaactgctgcagtctgagaccgacaaggtggtgcgcgccgtcgccatcgctctgcgcaacctctcgctggaccggcgcaacaaagacctcatcgggagctacgccatggctgagcttgtgcggaatgtgcgcaatgcacaggctccgccgcgaccgggggcctgcctggaggaagacaccgtggtggcggtgctcaacaccatccacgaaatcgtgtccgacagcctggataacgcgcgctcgctcctgcaggcacgcggggtgccagcgttggtggctctcgtggcctccagccaatcggtacgcgaagcgaaggcggcgtcacacgtgctgcagacagtgtggagctacaaggagctgcgtggtaccttgcagaaagatggttggaccaaggcgcgcttccagtcagctgctgctactgccaaggggcctaagggagcactgagtcctgggggcttcgatgacagcacgctgccactggtggacaagagccttgagggcgagaaaactggcagccgggatgtgatccccatggatgcgctgggcccagacggatactccacggtggaccggagggagcggaggccacggggcgccagctctgcaggagaggcctctgagaaggaacccttgaaactcgaccccagcaggaaggcccctccccccgggcccagcaggcccgcggtcaggctggtggacgccgtaggggacgctaagcctcagcccgttgattcctgggtctag

SEQ ID NO: 295936 - DNA, 2682 bp, Artificial Sequence
  derived and/or modified sequence
atgcccgccgagctgagacaggagcagagccccggcagccaggccagcctggccaccatgcccgaggcccccgacgtgctggaggagaccgtgaccgtggaggaggaccccggcacccccaccagccacgtgagcatcgtgaccagcgaggacggcaccaccagaagaaccgagaccaaggtgaccaagaccgtgaagaccgtgaccaccagaaccgtgagacaggtgcccgtgggccccgacggcctgcccctgctggacggcggcccccccctgggccccttcgccgacggcgccctggacagacacttcctgctgagaggcggcggccccgtggccaccctgagcagagcctacctgagcagcggcggcggcttccccgagggccccgagcccagagacagccccagctacggcagcctgagcagaggcctgggcatgagaccccccagagccggccccctgggccccggccccggcgacggctgcttcaccctgcccggccacagagaggccttccccgtgggccccgagcccggcccccccggcggcagaagcctgcccgagagattccaggccgagccctacggcctggaggacgacaccagaagcctggccgccgacgacgagggcggccccgagctggagcccgactacggcaccgccaccagaagaagacccgagtgcggcagaggcctgcacaccagagcctacgaggacaccgccgacgacggcggcgagctggccgacgagagacccgccttccccatggtgaccgcccccctggcccagcccgagagaggcagcatgggcagcctggacagactggtgagaagaagccccagcgtggacagcgccagaaaggagcccagatggagagaccccgagctgcccgaggtgctggccatgctgagacaccccgtggaccccgtgaaggccaacgccgccgcctacctgcagcacctgtgcttcgagaacgagggcgtgaagagaagagtgagacagctgagaggcctgcccctgctggtggccctgctggaccaccccagagccgaggtgagaagaagagcctgcggcgccctgagaaacctgagctacggcagagacaccgacaacaaggccgccatcagagactgcggcggcgtgcccgccctggtgagactgctgagagccgccagagacaacgaggtgagagagctggtgaccggcaccctgtggaacctgagcagctacgagcccctgaagatggtgatcatcgaccacggcctgcagaccctgacccacgaggtgatcgtgccccacagcggctgggagagagagcccaacgaggacagcaagcccagagacgccgagtggaccaccgtgttcaagaacaccagcggctgcctgagaaacgtgagcagcgacggcgccgaggccagaagaagactgagagagtgcgagggcctggtggacgccctgctgcacgccctgcagagcgccgtgggcagaaaggacaccgacaacaagagcgtggagaactgcgtgtgcatcatgagaaacctgagctaccacgtgcacaaggaggtgcccggcgccgacagataccaggaggccgagcccggccccctgggcagcgccgtgggcagccagagaagaagaagagacgacgccagctgcttcggcggcaagaaggccaagggcaagaaggacggcgagatggacagaaacttcgacaccctggacctgcccaagagaaccgaggccgccaagggcttcgagctgctgtaccagcccgaggtggtgagactgtacctgagcctgctgaccgagagcagaaacttcaacaccctggaggccgccgccggcgccctgcagaacctgagcgccggcaactggatgtgggccacctacatcagagccaccgtgagaaaggagagaggcctgcccgtgctggtggagctgctgcagagcgagaccgacaaggtggtgagagccgtggccatcgccctgagaaacctgagcctggacagaagaaacaaggacctgatcggcagctacgccatggccgagctggtgagaaacgtgagaaacgcccaggccccccccagacccggcgcctgcctggaggaggacaccgtggtggccgtgctgaacaccatccacgagatcgtgagcgacagcctggacaacgccagaagcctgctgcaggccagaggcgtgcccgccctggtggccctggtggccagcagccagagcgtgagagaggccaaggccgccagccacgtgctgcagaccgtgtggagctacaaggagctgagaggcaccctgcagaaggacggctggaccaaggccagattccagagcgccgccgccaccgccaagggccccaagggcgccctgagccccggcggcttcgacgacagcaccctgcccctggtggacaagagcctggagggcgagaagaccggcagcagagacgtgatccccatggacgccctgggccccgacggctacagcaccgtggacagaagagagagaagacccagaggcgccagcagcgccggcgaggccagcgagaaggagcccctgaagctggaccccagcagaaaggcccccccccccggccccagcagacccgccgtgagactggtggacgccgtgggcgacgccaagccccagcccgtggacagctgggtgtag

SEQ ID NO: 295937 - protein, 108 aa, Artificial Sequence
  derived and/or modified sequence
MESCSCHPGSGVQWRDHGSLQLPPPGFKMKMRRYKLFLMFCMAGLCLISFLHFFKTLSYVTFPRELASLSPNLVSSFFWNNAPVTPQASPEPGGPDLLRTPLYSHSPL

SEQ ID NO: 295938 - DNA, 327 bp, Artificial Sequence
  derived and/or modified sequence
atggagtcttgtagttgccaccccggatctggcgtgcaatggagagaccacggctctctccaactcccccctcccggctttaaaatgaagatgcgaagatacaagttatttttaatgttctgcatggccgggctttgtctcattagctttctgcacttcttcaagaccctctcatatgttacattcccccgcgagctggcctccttgtcacccaacctcgtcagctctttcttctggaacaacgccccagtgactccccaggcgagtcccgaacccgggggccctgatttgttgaggacacctctgtacagccactccccgctgtag

SEQ ID NO: 295939 - DNA, 327 bp, Artificial Sequence
  derived and/or modified sequence
atggagagctgcagctgccaccctggcagcggcgtgcagtggagggaccacggcagcctgcagctgcccccacctggcttcaagatgaagatgaggcgctacaagctgttcctgatgttctgcatggccggcctgtgcctgatctccttcctgcacttcttcaagaccctgtcctatgtgaccttcccccgggagctggccagcctgagccccaacctggtgagcagcttcttctggaacaatgcccctgtgaccccccaggccagccctgagcccggcggccctgacctgctgcggacccccctgtacagccacagccccctgtag

SEQ ID NO: 295940 - DNA, 552 bp, Artificial Sequence
  derived and/or modified sequence
gtatttggtcgtccagcgggaaacccaaatggaaggaaagaaaaaaaaaaaaaaccatgcatttatagaacctctgccaatggccaggctccatgcagaatgctttgacaccgtggctcagccaggtctcccacaggactgcaaaacagagggtgacatctttcttttagatcggagaagactgaggaccagagaagctaagtaacttgccaaagggcacacagcaaatggagtcttgctcttgtcacccaggttctggagtgcaatggcgtgatcatggctcactgcaacttccgccccctgggttcaagatgaagatgagacgctacaagctctttctcatgttctgtatggccggcctgtgcctcatctccttcctgcacttcttcaagaccctgtcctatgtcaccttcccccgagaactggcctccctcagccctaacctggtgtccagctttttctggaacaatgccccggtcacgccccaggccagccccgagccaggaggccctgacctgctgcgtaccccactctactcccactcgcccctgc

SEQ ID NO: 295941 - DNA, 327 bp, Artificial Sequence
  derived and/or modified sequence
atggagagctgcagctgccaccccggcagcggcgtgcagtggcgggatcatggcagtctccagcttcccccacccgggtttaagatgaagatgcgccgatacaagctgtttctgatgttttgcatggcgggtctgtgcctcatttctttcctacacttttttaagacactgagctatgtgacctttccccgcgagctcgcctctctgtcccctaacctcgtctcttcctttttttggaacaatgccccggtcacccctcaggctagccccgagccaggtggtccagacctcttgcggacacccttatatagccacagccccctgtag

SEQ ID NO: 295942 - DNA, 327 bp, Artificial Sequence
  derived and/or modified sequence
atggaatcctgttcgtgccaccccggaagcggcgtgcagtggagggaccacggaagcctgcagctgccgccaccaggctttaagatgaagatgaggagatacaaactgtttctgatgttctgcatggccggactctgcctgatctcttttctgcatttcttcaagaccctttcttacgtgacctttccacgggagttggctagtcttagtccaaatctggtttcgagttttttttggaataatgccccagtgaccccccaggcgtctccagagccaggcggacccgacctgcttcggaccccgctttatagccattcccctttgtag

SEQ ID NO: 295943 - DNA, 327 bp, Artificial Sequence
  derived and/or modified sequence
atggagagctgcagctgccaccccggcagcggcgtgcagtggagagaccacggcagcctgcagctgcccccccccggcttcaagatgaagatgagaagatacaagctgttcctgatgttctgcatggccggcctgtgcctgatcagcttcctgcacttcttcaagaccctgagctacgtgaccttccccagagagctggccagcctgagccccaacctggtgagcagcttcttctggaacaacgcccccgtgaccccccaggccagccccgagcccggcggccccgacctgctgagaacccccctgtacagccacagccccctgtag

SEQ ID NO: 295944 - protein, 718 aa, Artificial Sequence
  derived and/or modified sequence
MRKAGVAHSKSSKDMESHVFLKAKTRDEYLSLVARLIIHFRDIHNKKSQASVSDPMNALQSLTGGPAAGAAGIGMPPRGPGQSLGGMGSLGAMGQPMSLSGQPPPGTSGMAPHSMAVVSTATPQTQLQLQQVALQQQQQQQQFQQQQQAALQQQQQQQQQQQFQAQQSAMQQQFQAVVQQQQQLQQQQQQQQHLIKLHHQNQQQQQQQALQAQPPIQQPPMQQPQPPPSQALPQQLQQMHHTQHHQPPPQPQQPPVAQNQPSQLPPQSQTQPLVSQAQALPGQMLYTQPPLKFVRAPMVVQQPPVQPQVQQQQTAVQTAQAAQMVAPGVQMITEALAQGGMHIRARFPPTTAVSAIPSSSIPLGRQPMAQQVQTPQSMPPPPQPSPQPGQPSSQPNSNVSSGPAPSPSSFLPSPSPQPSQSPVTARTPQNFSVPSPGPLNTPVNPSSVMSPAGSSQAEEQQYLDKLKQLSKYIEPLRRMINKIDKNEDRKKDLSKMKSLLDILTDPSKRCPLKTLQKCEIALEKLKNDMAVPTPPPPPVPPTKQQYLCQPLLDAVLANIRSPVFNHSLYRTFVPAMTAIHGPPITAPVVCTRKRRLEDDERQSIPSVLQGEVARLDPKFLVNLDPSHCSNNGTVHLICKLDDKDLPSVPPLELSVPADYPAQSPLWIDRQWQYDANPFLQSVHRCMTSRLLQLPDKHSVTALLNTWAQSVHQACLSAA

SEQ ID NO: 295945 - protein, 436 aa, Artificial Sequence
  derived and/or modified sequence
MDRRSMGETESGDAFLDLKKPPASKCPHRYTKEELLDIKELPHSKQRPSCLSEKYDSDGVWDPEKWHASLYPASGRSSPVESLKKELDTDRPSLVRRIVDPRERVKEDDLDVVLSPQRRSFGGGCHVTAAVSSRRSGSPLEKDSDGLRLLGGRRIGSGRIISARTFEKDHRLSDKDLRDLRDRDRERDFKDKRFRREFGDSKRVFGERRRNDSYTEEEPEWFSAGPTSQSETIELTGFDDKILEEDHKGRKRTRRRTASVKEGIVECNGGVAEEDEVEVILAQEPAADQEVPRDAVLPEQSPGDFDFNEFFNLDKVPCLASMIEDVLGEGSVSASRFSRWFSNPSRSGSRSSSLGSTPHEELERLAGLEQAILSPGQNSGNYFAPIPLEDHAENKVDILEMLQKAKVDLKPLLSSLSANKEKLKESLRLSPKKKKK

SEQ ID NO: 295946 - protein, 188 aa, Artificial Sequence
  derived and/or modified sequence
MDRRSMGETESGDAFLDLKKPPASKCPHRYTKEELLDIKELPHSKQRPSCLSEKYDSDGVWDPEKWHASLYPASGRSSPVESLKKELDTDRPSLVRRIVDPRERVKEDDLDVVLSPQRRSFGGGCHVTAAVSSRRSGSPLEKDSDGLRLLGGRRIGSGRIISARTFEKDHRLSDKDLRDLRDRDRERD

SEQ ID NO: 295947 - protein, 86 aa, Artificial Sequence
  derived and/or modified sequence
MQAIKCVVVGDGAVGKTCLLISYTTNAFPGEYIPTVPGRPCALLQDAEAGLSSDVEGACWCQTQEGRMTGEAPAPPWPALRGPHHS

SEQ ID NO: 295948 - DNA, 261 bp, Artificial Sequence
  derived and/or modified sequence
atgcaggccatcaagtgcgtggtggtgggcgacggcgccgtgggcaagacctgcctgctgatcagctacaccaccaacgccttccccggcgagtacatccccaccgtgcccggcagaccctgcgccctgctgcaggacgccgaggccggcctgagcagcgacgtggagggcgcctgctggtgccagacccaggagggcagaatgaccggcgaggcccccgcccccccctggcccgccctgagaggcccccaccacagctag

SEQ ID NO: 295949 - DNA, 261 bp, Artificial Sequence
  derived and/or modified sequence
atgcaggctatcaaatgcgtggttgtcggcgatggggcagtggggaaaacatgtctcctgatctcctacacaaccaatgcctttccaggagagtacatcccaactgtgcctggcaggccatgcgctttgctacaagacgcagaggccggtttgtcatcggacgtcgaaggcgcttgctggtgccagacccaagaggggaggatgacaggggaggctcctgcacccccatggccagccctgagaggtccccaccattcttag

SEQ ID NO: 295950 - DNA, 261 bp, Artificial Sequence
  derived and/or modified sequence
atgcaggccatcaagtgtgtggtggtgggagatggagctgtgggcaagacctgcctgctgatctcctacaccaccaatgccttccctggagagtacatccccaccgtgcccggccggccctgtgccctgctgcaggatgctgaggccggcctgagcagtgatgtggagggcgcctgctggtgccagacccaggagggccgcatgactggagaggccccagccccaccctggccagccctgcggggcccccaccacagctag

SEQ ID NO: 295951 - DNA, 261 bp, Artificial Sequence
  derived and/or modified sequence
atgcaggccatcaagtgcgtggtggtgggcgacggcgccgtgggcaaaacctgccttctcatctcttacactactaacgccttcccaggcgagtacattccaacagtgcccggacgcccatgtgctctgttgcaggacgctgaggcggggcttagctctgacgtcgaaggcgcctgctggtgccagacccaggagggacgcatgacaggggaggccccagcccccccttggccggctttgaggggcccacatcactcttag

SEQ ID NO: 295952 - DNA, 261 bp, Artificial Sequence
  derived and/or modified sequence
atgcaggccatcaagtgcgtggtcgttggtgacggggcagtgggtaagacatgtctgctgatctcctatactacaaacgcctttcccggagaatacattcctactgtgccgggaaggccatgtgccctgctgcaagatgcagaagccggattgtcatccgatgttgaaggcgcttgctggtgtcaaacacaggaaggacgcatgacaggtgaggcccctgcaccaccatggccagccctacggggaccgcatcactcttag

SEQ ID NO: 295953 - DNA, 569 bp, Artificial Sequence
  derived and/or modified sequence
tcctcagcaggcgcctcaccagcctccacaccccttgcgcccgcagaaacgcgcctggccctgagctgtcaccaccgacactctccaggctccggacacgatgcaggccatcaagtgtgtggtggtgggagatggggccgtgggcaagacctgccttctcatcagctacaccaccaacgcctttcccggagagtacatccccaccgtgcctgggaggccctgcgctctattgcaggatgcggaggcagggctgtcatcggacgtggagggagcgtgttggtgtcagactcaggagggaaggatgactggggaggcaccagcccctccctggccagccctcaggggtccccatcactcctaggacatttccccgactccctagcatggcactcaaggctcctgatggccttcactcaacctcccacctggccttattacccattactttgcttcacactctgcctcctccggaccctactgttcgccacaagctccctgcacatttctaccccagggcctttgctcaagctgttctctctccccatagtgctttttctccccacatccac

SEQ ID NO: 295954 - protein, 528 aa, Artificial Sequence
  derived and/or modified sequence
MATSTSTEAKSASWWNYFFLYDGSKVKEEGDPTRAGICYFYPSQTLLDQQELLCGQIAGVVRCVSDISDSPPTLVRLRKLKFAIKVDGDYLWVLGCAVELPDVSCKRFLDQLVGFFNFYNGPVSLAYENCSQEELSTEWDTFIEQILKNTSDLHKIFNSLWNLDQTKVEPLLLLKAARILQTCQRSPHILAGCILYKGLIVSTQLPPSLTAKVLLHRTAPQEQRLPTGEDAPQEHGKWMLWSFKNRVTHQNPNGAALPPNVQIIPVFVTKEEAISLHEFPVEQMTRSLASPAGLQDGSAQHHPKGGSTSALKENATGHVESMAWTTPDPTSPDEACPDGRKENGCLSGHDLESIRPAGLHNSARGEVLGLSSSLGKELVFLQEELDLSEIHIPEAQEVEMASGHFAFLHVPVPDGRAPYCKASLSASSSLEPTPPEDTAISSLRPPSAPEMLTQHGAQEQLEDHPGHSSQAPIPRADPLPKSTVLFSGGCVKGSDTQLCVPGLVWYLEPQFYYVIVRHFFDSMRQTAG

SEQ ID NO: 295955 - protein, 721 aa, Artificial Sequence
  derived and/or modified sequence
MAPLCSLARWNYFFLYDGSKVKEEGDPTRAGICYFYPSQTLLDQQELLCGQIAGVVRCVSDISDSPPTLVRLRKLKFAIKVDGDYLWVLGCAVELPDVSCKRFLDQLVGFFNFYNGPVSLAYENCSQEELSTEWDTFIEQILKNTSDLHKIFNSLWNLDQTKVEPLLLLKAARILQTCQRSPHILAGCILYKGLIVSTQLPPSLTAKVLLHRTAPQEQRLPTGEDAPQEHGKWMLWSFKNRVTHQNPNGAALPPNVQIIPVFVTKEEAISLHEFPVEQMTRSLASPAGLQDGSAQHHPKGGSTSALKENATGHVESMAWTTPDPTSPDEACPDGRKENGCLSGHDLESIRPAGLHNSARGEVLGLSSSLGKELVFLQEELDLSEIHIPEAQEVEMASGHFAFLHVPVPDGRAPYCKASLSASSSLEPTPPEDTAISSLRPPSAPEMLTQHGAQEQLEDHPGHSSQAPIPRADPLPRRTRRPLLLPRLDPGQRGNKLPTGEQGLDEDVDGVCESHAAPGLECSSGSANCQGAGPSADGISSRLTPAESCMGLVRMNLYTHCVKGLVLSLLAEEPLLGDSAAIEEVYHSSLASLNGLEVHLKETLPRDEAASTSSTYNFTHYDRIQSLLMANLPQVATPQDRRFLQAVSLMHSEFAQLPALYEMTVRNASTAVYACCNPIQETYFQQLAPAARSSGFPNPQDGAFSLSGKAKQKLLKHGVNLL

SEQ ID NO: 295956 - DNA, 1587 bp, Artificial Sequence
  derived and/or modified sequence
atggctacttccacatcaacggaagccaaaagtgcttcatggtggaactatttttttctctatgatgggtctaaggttaaagaagagggtgatcccacacgggcagggatctgctatttttatccgagccagacattgctcgaccagcaggagctcctttgtgggcagattgcgggtgtggtgcgatgtgtctccgatataagtgacagcccaccgacgcttgtaagattgaggaagctcaaattcgcaatcaaagtggatggggattacctgtgggtcttaggctgcgccgtggaacttccagacgtatcatgtaagcgctttctcgatcaactcgtgggcttttttaatttctacaacggacccgtgtcattagcttacgagaactgttcccaggaggaactcagtacagaatgggacacgtttattgagcaaatacttaagaataccagcgacctgcacaagatcttcaactctctgtggaacctggaccagactaaggtggagcctctgctgttgttgaaagcagctagaatactccaaacttgccagcggagcccacatatcttggctgggtgcatcctctataagggactcattgtatctacccaactacccccttcactaacagcaaaagtgctgctacatcgaaccgcaccacaggaacagagactcccgacaggtgaggacgctcctcaggaacatggaaaatggatgctgtggtcttttaaaaaccgtgtgacccatcagaacccaaacggcgccgccttgccccccaatgtgcaaatcattccggtgttcgtcacgaaagaggaggcgatcagcctgcacgaattccctgtggaacaaatgactaggagcctagcttctccggccggactccaggacggatctgcccagcaccaccccaaggggggaagtacctcagccctgaaggaaaacgcaacggggcacgtggaatcaatggcttggacaacccctgatccaactagtcctgatgaagcatgccctgacggacggaaggagaatggatgcctcagcggacacgatttggagagtatccggccggccggtctgcacaacagtgccagaggggaggtcctggggctgagttcatcgctcgggaaagagctcgtcttcctgcaagaagaattagacttgtccgagatacatatacccgaagctcaggaagttgagatggcttctggtcattttgcatttctacacgtccctgtgcccgacggacgcgccccatactgcaaggcctccttaagcgccagcagctccctggaacccactcctcctgaggatacagctattagcagccttagacccccttccgccccggaaatgcttacccaacacggagcccaagaacagctggaagaccatcccggccactcatcccaggcccctatcccccgggccgatcctctgcctaagagcactgtgttatttagcggcggatgcgtcaaaggatccgatacacaactgtgcgttcccggactagtgtggtacctggagccgcagttttactacgttatcgtccggcacttcttcgatagcatgagacagaccgccgggtag

SEQ ID NO: 295957 - DNA, 2166 bp, Artificial Sequence
  derived and/or modified sequence
atggcacctttgtgttcgctagcccgctggaattacttttttttatatgacggtagtaaggtgaaggaggagggcgaccccacccgggctggcatctgctatttttacccgagccaaacacttctggaccaacaagagttgctttgcggtcagatcgctggcgtggtgcgctgcgttagtgatatctccgactcccctcctacactagtacgtctcaggaaactgaaattcgccattaaggtggacggcgattatctgtgggtgctggggtgcgctgttgagctgcccgacgttagctgtaagagattcctcgaccagctggtgggattctttaacttttacaacggcccagtgagccttgcatatgagaactgctctcaggaggagctttcgacagagtgggacaccttcattgagcagattctgaaaaacacaagtgacttgcacaaaatcttcaactctctatggaatttagatcagactaaagtagagcctcttctgctcctgaaggcagctcgtatcctgcagacgtgtcagagatctccgcacattttggcaggctgcattctgtataaaggactcatagtttccacacaacttcctccatcgctgactgcaaaggtcttgcttcacagaaccgctccccaggaacagcggttaccaaccggtgaggacgcgcctcaagaacatggcaaatggatgttgtggtcttttaagaatcgcgtgacccaccagaatccaaatggtgctgccttgcctccgaatgtgcagattataccagtgtttgttaccaaagaggaggctatctcgctacacgagtttcccgtggagcagatgacgaggagtcttgcaagtcccgctgggctgcaggatgggtcggcccagcaccaccccaagggcggatccactagtgctctgaaggagaatgccactggccacgtggagagcatggcttggaccacccctgatcccacaagcccagatgaggcttgtcccgatgggcggaaagaaaacgggtgtctctcggggcacgacctggaatcgattagaccggctggcctacacaacagcgcccgaggggaggttctgggactgtcctctagcttgggaaaagaactggtctttttgcaagaagagctggatctgtcagaaatccatatcccggaggcccaagaagtagagatggctagcggacatttcgccttcctgcatgtgccagttcctgatgggagagctccatactgtaaggcatccctgagtgcctcatctagccttgagcccaccccccctgaggacactgctatcagtagcctgcggccacctagtgctcctgaaatgctgacacagcacggcgcacaggagcaactcgaagatcaccccggccattcatcccaggctccaatcccaagagcagacccgttgccccgaagaacccgacgcccccttttactgccccgcctcgatcccggacagcgaggaaataaactcccaactggtgagcagggtctggatgaagatgtcgacggtgtttgcgagagccacgccgcccccggcctcgagtgcagctcggggtccgctaactgccaaggagccggccccagcgctgatggcatttcatccaggttgacacccgccgagtcttgcatgggcctggttcgaatgaacttgtacacgcactgtgtaaagggtcttgttctcagcttgctggccgaagaaccgttgctcggtgacagcgctgcaatcgaggaagtgtaccattcttcattagcaagtctgaatggtctggaggtccacctcaaggagactcttccaagagatgaggctgcctctactagttctacctacaattttacccattatgaccgcattcagagcttattaatggctaacctgccgcaggttgctacaccgcaggacagacgattcctacaggcagtttcattgatgcacagtgagtttgcgcagctccctgccctgtacgagatgaccgtcagaaatgccagcactgctgtatacgcatgttgcaaccccattcaggagacttactttcagcagctcgctcccgccgcacgctcctccgggtttcccaatcctcaagatggcgccttttcactgtccggaaaagcgaagcagaagctgctgaaacacggcgtcaatctactatag

SEQ ID NO: 295958 - DNA, 2246 bp, Artificial Sequence
  derived and/or modified sequence
acgtcatcgccgcgcgccggcttgccaggagctggagggggaggtaggcggggcggcgcgtgacctaaggcctctctgccgcgcgcgcaggtacggggcagaagtcgcaggtacccagctgctgcccacatttctggtccagagtcccgaaccccgagcactgggatgcctggctactccgagccaaggcactgatgtttgaactggaaacttcaaaacgtttaataagagtcttcaggatgggtttgaactagacaagctagaaatttctttagaacaccagctctagcatgcatctcccacttttggctttcctggagaggagcttgaagaggtggttctgcagacagccacagtgatacttaggaaaccagaggaatggatttgacttttctgctaggattctctgttatagtttctccctgagttgtaagaggcatggaaatatacatgaaactgaagaacctgcaaggaagggaagtggaactttccatgctgagtgaaaactaaccaagtggcagttgtgactgaaaacactgaaacctaccacgtccagattcactggattgggggatagaggaacggtcacagctagggagaaagaagtgataccggaaaagaaaacctaaatgaagagaatgaggatgactgcacagtagatggccacctctacctccacagaggcaaagtcagcctcgtggtggaattatttttttctttatgatggttccaaggtaaaggaagaaggcgatccaacaagagctggcatttgttacttttatccttcccagaccctgctagaccaacaggagttgctttgtggacagattgctggagttgtccgctgtgtttctgacatttctgactctcctcctactcttgttcgtctgagaaaactgaagtttgccataaaagttgatggagattacctttgggtgctgggctgtgctgtggagctccctgatgtcagctgcaagcggtttctggatcagctagttggattctttaatttttacaatggacctgtttccctagcttatgagaactgttctcaggaagaactgagcacggagtgggacaccttcatcgagcaaattctgaaaaacaccagtgatctgcataagattttcaattccctctggaacttggaccaaactaaagtggagcccctgttgttgctgaaggcagcccgcattctgcagacctgccagcgctcgcctcacattctcgctggctgcatcctctataaaggactgattgtcagcacccaactcccgccctccctcaccgccaaggtcctgcttcaccgaacagcacctcaggagcagagactccctacgggagaggatgccccgcaggaacatggaaaatggatgttatggagcttcaagaatcgagttacccaccagaaccctaatggagcggcattgcccccgaatgtccagattatccctgtttttgtgaccaaagaggaagccattagtctccacgagttcccggtggaacagatgacaaggtctctagcatctccagcaggactccaggatggttcagcccagcaccatccaaagggtgggagcacatctgccctgaaagaaaacgccactggccatgtggaatccatggcctggaccaccccagatcccacatcccctgacgaagcttgtccagatggcaggaaggagaacggatgcttgtctggccatgatctggagagcatcaggcccgcaggactgcacaactctgccaggggtgaggttcttggcctcagctcctccctggggaaggaactagtctttctccaagaagaactcgacttgtctgaaatccacattccagaggctcaggaagtggaaatggcctcaggtcattttgccttcctacatgtgcctgttccagatggcagggctccttactgcaaggcatctctcagcgcctccagcagcctggaacccacgcctcctgaggacacagccatcagcagcttgcgccctccctctgctcctgagatgctgacccagcatggagcccaagagcagctcgaagaccatcctggccatagcagccaagcccccattcccagagcagaccctctccccaaaagcactgtgcttttcagtggtggctgcgtgaaagggagcgacactcagctgtgtgttcctgggcttgtgtggtacttagaacctcagttctattacgttatagtcagacatttttttgacagtatgagacagactgcaggatga

SEQ ID NO: 295959 - DNA, 3919 bp, Artificial Sequence
  derived and/or modified sequence
atggctccactctgttctcttgccaggtggaattatttttttctttatgatggttccaaggtaaaggaagaaggcgatccaacaagagctggcatttgttacttttatccttcccagaccctgctagaccaacaggagttgctttgtggacagattgctggagttgtccgctgtgtttctgacatttctgactctcctcctactcttgttcgtctgagaaaactgaagtttgccataaaagttgatggagattacctttgggtgctgggctgtgctgtggagctccctgatgtcagctgcaagcggtttctggatcagctagttggattctttaatttttacaatggacctgtttccctagcttatgagaactgttctcaggaagaactgagcacggagtgggacaccttcatcgagcaaattctgaaaaacaccagtgatctgcataagattttcaattccctctggaacttggaccaaactaaagtggagcccctgttgttgctgaaggcagcccgcattctgcagacctgccagcgctcgcctcacattctcgctggctgcatcctctataaaggactgattgtcagcacccaactcccgccctccctcaccgccaaggtcctgcttcaccgaacagcacctcaggagcagagactccctacgggagaggatgccccgcaggaacatggaaaatggatgttatggagcttcaagaatcgagttacccaccagaaccctaatggagcggcattgcccccgaatgtccagattatccctgtttttgtgaccaaagaggaagccattagtctccacgagttcccggtggaacagatgacaaggtctctagcatctccagcaggactccaggatggttcagcccagcaccatccaaagggtgggagcacatctgccctgaaagaaaacgccactggccatgtggaatccatggcctggaccaccccagatcccacatcccctgacgaagcttgtccagatggcaggaaggagaacggatgcttgtctggccatgatctggagagcatcaggcccgcaggactgcacaactctgccaggggtgaggttcttggcctcagctcctccctggggaaggaactagtctttctccaagaagaactcgacttgtctgaaatccacattccagaggctcaggaagtggaaatggcctcaggtcattttgccttcctacatgtgcctgttccagatggcagggctccttactgcaaggcatctctcagcgcctccagcagcctggaacccacgcctcctgaggacacagccatcagcagcttgcgccctccctctgctcctgagatgctgacccagcatggagcccaagagcagctcgaagaccatcctggccatagcagccaagcccccattcccagagcagaccctctccccagaaggacccgcaggcccttgttattgcctcgcttagatccaggacagagaggaaacaagcttcccacgggggaacaaggcctggatgaggatgttgatggggtctgtgaaagccacgcagcccctggtctggaatgcagttcaggctcagcaaactgtcagggtgctggcccctctgcagatggaatcagctccaggctgacaccagcagagtcctgcatggggctcgtgaggatgaatctctacactcactgcgtcaaagggctggtgctgtccctgctggctgaggagccgctgctgggagacagcgcagccatagaggaagtgtaccacagcagcctggcttcactgaatgggctggaagtccacctgaaagagacgctgcccagggatgaggcagcctccacgagcagcacctacaacttcacacattacgaccgcattcagagcttgctgatggcaaacctgccgcaggtggccaccccgcaggatcgccgcttcctccaggccgtcagcctgatgcatagcgaatttgcccagctgcccgcgctttatgaaatgactgtcagaaatgcctccacggctgtgtacgcctgttgcaaccccatccaggagacatatttccagcagctggcacctgcagcacggagctccggcttcccaaaccctcaggatggcgccttcagcctctccggcaaagcaaagcagaagctgctgaagcacggggtgaacttgctctgaactgcacccaggaggtgactgggaaggagaaaaccagcaaaggaagctctgccttttataattgaaaaggcccctctattttatttttcttgaaaacattcccttttttaggaaccaaatgatatttgagtttttgttattccttttgcagattgggatgtgttttgggggcaggggttagttcttcaggtcggcagacccagagcacttgataaagaactgtatttaatcggtagtgttggggccgggacgggcttggctccctctctgccatactgagcctgaggtatttcatatctcctgctgttccatcccagcttgaattggtgccacaagcttccaagttggcattttttctagaacctgatcgtccactagcccagagtgtgtgtgttcaacccccacaccaggtggtggtaggcggtgtgactgcacagcgaggtgccggatctgtgagcaggccgactccactcccacgccgcaggtaggtttctccagtgcgctcttgctgggaggtccggatcgttcctgcagggaagcggcagcacacggagaccacttggttgaattctgttggaactctactcaaatctaggggcgtcttctttggacccacaatgggggcaagccttaataatatggaagggagtttgggctttagagatccctttataaaagctctgggggctgagccctgagaattcagtgacaacaggaccaacctgcgctgcctttgactacaagtgggccgtgcagctggttcctctcgagcgagtgtccctaaataggagtttacaagatgtctgggggtaaaagcactgtgcttttcagtggtggctgcgtgaaagggagcgacactcagctgtgtgttcctgggcttgtgtggtacttagaacctcagttctattacgttatagtcagacatttttttgacagtatgagacagactgcaggatgaaaatatttgtcaaaatcttaactgaatgtttactggaagtacttgagattccatttgagagttgtattgttaataatttcatgtcagtgaactgatatctgatgtttatgatatggtgtctttttcttgaaacaagcttccaagggctagaaataaaatagccaaaaaatgctggagttctgagtaattaaatggcagcatttttttgtgacaaaggtaagggttaagacagtgtgtgtgtgtgtgtgtgtgtgtgtgtgtgtgtgtgtgcgcgcgcgcgcgcgcgcgtaacgtgggcgcatccctcttttccttccctgggttcagtgtggctgggtaaggaccgtctgtttgtagggctgccaggctgcagcctgctgctccagggagcaccagctgcagctgatccaatacaccaagcctgtgtctccctcttctatcacctctctccaggatctctgctgtctcttggatcccatctgcctagatggaagaggatcctatccgaagctaggataaatgttgtcttactcctctgctatgttctcccagaaaaaattgattacaagttctctgctgtggttgctgcagctccaggaagtccccgcaatgtctcacgttgtctttgaccagtggtccccagtaccaggccagcgaagacaactttataatgtcatttgtgttgtgaaaattcttccactgacccaaaatggaaccgtacaaagcctatccgtgtatatggaaaagtctcatgcacctggattaactcagaaaaagtaaagtcctgaaacttca

SEQ ID NO: 295960 - DNA, 1587 bp, Artificial Sequence
  derived and/or modified sequence
atggccaccagcaccagcacagaggccaagagcgcctcctggtggaactacttcttcctgtatgatggcagcaaggtgaaggaggagggggaccccaccagggctggcatctgctacttctaccccagccagaccctgctggaccagcaggagctgctgtgtggccagattgctggggtggtgcgctgtgtgtctgacatcagtgacagcccccccaccctggtgcggctgaggaagctgaagtttgccatcaaggtggatggagactacctgtgggtgctgggctgtgctgtggagctgcctgatgtgtcctgcaagcgcttcctggaccagctggtgggcttcttcaacttctacaacggccctgtgtccctggcctatgagaactgcagccaggaggagctgagcacagagtgggacaccttcatcgagcagatcctgaagaacaccagtgacctgcacaagatcttcaacagcctgtggaacctggaccagaccaaggtggagcccctgctgctgctgaaggccgcccgcatcctgcagacctgccagaggagcccccacatcctggccggctgcatcctgtacaagggcctcatcgtgtccacccagctgccccccagcctgacagccaaggtgctgctgcacaggacagccccccaggagcagaggctgcccactggagaagatgccccccaggagcacggcaagtggatgctgtggagcttcaagaacagagtgacccaccagaaccccaatggagctgccctgccccccaacgtgcagatcatccctgtgtttgtgaccaaggaggaggccatcagcctgcacgagttccctgtggagcagatgaccaggagcctggccagccctgctggcctgcaggacggcagcgcccagcaccaccccaagggcggcagcaccagcgccctgaaggaaaatgccaccggccacgtggagagcatggcctggaccaccccagaccccaccagcccagatgaggcctgcccagatggcaggaaagaaaatggctgcctgagcggccatgacctggagagcatccggcctgctggcctgcacaacagcgcccggggggaggtgctgggcctgagcagcagcctgggcaaggagctggtgttcctgcaggaggagctggacctgtctgagatccacatccctgaggcccaggaggtggagatggccagcggccactttgccttcctgcacgtgcctgtgcctgatggccgggccccctactgcaaggccagcctgagcgccagcagcagcctggagcccaccccacctgaggacacagccatcagcagcctgcggcccccatctgcccctgagatgctgacccagcacggggcccaggagcagctggaggaccaccctggccacagcagccaggcccccatccccagggctgaccccctgcccaagagcacagtgctcttcagcggcggctgtgtgaagggcagtgacacccagctgtgtgtgcccggcctggtgtggtacctggagccccagttctactacgtgattgtgcgccacttctttgacagcatgaggcagacagctggatag

SEQ ID NO: 295961 - DNA, 2166 bp, Artificial Sequence
  derived and/or modified sequence
atggcccccctgtgcagcctggcccgctggaactacttcttcctgtatgatggcagcaaggtgaaggaggagggggaccccacccgggccggcatctgctacttctaccccagccagaccctgctggaccagcaggagctgctgtgtggccagattgctggggtggtgcgctgtgtgtctgacatcagtgacagcccccccaccctggtgcggctgaggaagctgaagtttgccatcaaggtggatggagactacctgtgggtgctgggctgtgctgtggagctgcctgatgtgtcctgcaagcgcttcctggaccagctggtgggcttcttcaacttctacaatggacctgtgtccctggcctatgagaactgcagccaggaggagctgagcacagagtgggacaccttcatcgagcagatcctgaagaacaccagtgacctgcacaagatcttcaacagcctgtggaacctggaccagaccaaggtggagcccctgctgctgctgaaggccgcccgcatcctgcagacctgccagaggagcccccacatcctggccggctgcatcctgtacaagggcctgattgtgtccacccagctgccccccagcctgacagccaaggtgctgctgcacaggacagccccccaggagcagaggctgcccaccggggaggatgccccccaggagcacggcaagtggatgctgtggagcttcaagaacagagtgacccaccagaaccccaacggggccgccctgcccccaaatgtgcagatcatccctgtgtttgtgaccaaggaggaggccatcagcctgcacgagttccctgtggagcagatgaccaggagcctggccagccctgctggcctgcaggacggcagcgcccagcaccaccccaagggcggcagcaccagcgccctgaaggaaaatgccactggacatgtggagagcatggcctggaccaccccagaccccaccagcccagatgaggcctgcccagatggcaggaaagaaaatggctgcctgagcggccatgacctggagagcatccggcctgctggcctgcacaacagcgcccggggggaggtgctgggcctgagcagcagcctgggcaaggagctggtgttcctgcaggaggagctggacctgtctgagatccacatccctgaggcccaggaggtggagatggccagcggccactttgccttcctgcacgtgcctgtgcctgatggccgggccccctactgcaaggccagcctgagcgccagcagcagcctggagcccaccccacctgaggacacagccatcagcagcctgcggccccccagcgcccctgagatgctgacccagcacggggcccaggagcagctggaggaccaccctggccacagcagccaggcccccatccccagggctgaccccctgcccaggaggacccggcggcccctgctgctgccccggctggaccccggccagaggggcaacaagctgcccaccggggagcagggcctggatgaagatgtggatggagtgtgtgagagccatgctgcccctggcctggagtgcagcagcggcagcgccaactgccagggcgccggccccagcgcagatggcatcagcagccggctgaccccagctgagagctgcatgggcctggtgaggatgaacctgtacacccactgtgtgaagggcctggtgctgagcctgctggccgaggagcccctgctgggggacagcgctgccatcgaggaggtgtaccacagcagcctggccagcctgaatggcctggaggtgcacctgaaggagaccctgcccagagatgaggccgccagcaccagcagcacctacaacttcacccactatgaccgcatccagagcctgctgatggccaacctgccccaggtggccaccccccaggaccggcgcttcctgcaggccgtgtccctgatgcacagcgagtttgcccagctgcctgccctgtatgagatgacagtgagaaatgccagcacagctgtgtatgcctgctgcaaccccatccaggagacctacttccagcagctggccccagctgcccggagcagcggcttccccaacccccaggatggagccttcagcctgagcggcaaggccaagcagaagctgctgaagcacggcgtgaacctgctgtag

SEQ ID NO: 295962 - DNA, 1587 bp, Artificial Sequence
  derived and/or modified sequence
atggccaccagcaccagcaccgaggccaagagcgccagctggtggaactacttctttctatacgacggcagtaaggtgaaggaggagggcgaccctaccagagctggcatctgctacttttatcccagccagacccttttagatcagcaagagctcctgtgcgggcagattgcgggcgtcgtgcggtgtgtgagcgatatctcagattcaccccctacattggttaggctccggaaactcaaattcgctattaaggtcgacggtgattacctgtgggtgttgggttgcgccgttgagctacccgacgttagctgcaagagattccttgatcagctggtagggttttttaatttctacaatggcccagtaagcctggcatacgagaattgctcacaggaggagctgtccaccgagtgggatacctttatcgagcaaatacttaaaaacacttctgatctccacaagatttttaactccctctggaatctggatcagaccaaggtggagcccttgttgttgcttaaggcagccaggatcctacagacttgtcaacggagcccgcacattctcgcagggtgtattctttacaaggggctcatagtgtctacccaactgcctccttccctgactgccaaggtgctgctacaccgcacagctcctcaggaacagcgcctacccaccggtgaagacgccccgcaggagcacggtaagtggatgctgtggtcctttaagaaccgtgtgacccatcaaaatcctaacggcgcagccctcccaccaaatgttcagatcatccctgtgttcgtaacaaaggaggaagcaatttccttacatgagtttcctgtcgaacagatgactagaagccttgcctctccggctggcctccaggatggcagcgcacagcatcacccgaagggaggctccacatcggcactcaaagagaatgctacggggcacgttgaaagcatggcatggactacccccgacccaacgtcccctgatgaggcttgccctgacgggaggaaagagaacggttgcctcagcggacatgatctggagtcaattagacctgcagggctgcataatagcgcacgaggggaagtgctagggctgtcctcctccctcgggaaggaacttgtgttcctgcaggaggaactcgacctctccgagatccacatcccggaggcacaggaggtggaaatggcatctgggcacttcgctttcctgcacgttcctgttcctgacggacgtgccccttactgtaaggcgtccctgtcagcctccagcagtctcgaacctacgccgccagaagatacggcaatctcctctctaagaccgccatcagctcccgagatgctgactcagcatggtgctcaggaacaactggaggatcatccggggcattcttcccaagcacccattccacgagctgatccactcccgaagtcaactgttctgttcagtggagggtgcgtgaaggggagcgatacccagttatgcgttcctggactggtttggtatcttgaaccccagttctactacgtgattgtcaggcatttctttgactccatgcgacaaaccgctgggtag

SEQ ID NO: 295963 - DNA, 2166 bp, Artificial Sequence
  derived and/or modified sequence
atggcccccctgtgcagcctggcccggtggaactacttcttcctgtacgacgggtctaaggtgaaagaagaaggggaccccacacgggcggggatctgttacttttatccttctcagaccctgcttgatcagcaggagctgttatgcggccagatcgcaggagtggtgagatgcgtgtctgacatctcggatagtccaccaactctggtgagactgaggaaactcaagttcgccattaaagttgatggggactatctgtgggtgctcggatgcgccgtcgagctccctgacgtgtcttgcaaacggttccttgaccaactggttggtttctttaacttttacaacggtccagtgagtctagcatatgagaactgttcgcaggaagaactgtcaacggagtgggatacgtttatcgaacagatactgaaaaatacctccgacctgcacaaaatctttaactccttatggaacctggatcagacaaaggtagaacccctcttactccttaaggccgctaggatcctgcagacttgccagaggtcgccacacattctagccggctgtattctgtacaagggcctcatagtgtccacccagctcccgcctagcctgaccgcgaaggttctgctccatcggacggcgccacaggagcagcgacttcctacgggggaagacgcccctcaggagcatggcaaatggatgctctggagctttaaaaaccgggtgacacaccaaaaccccaacggagctgctctgccaccgaacgtgcagatcattccagtcttcgtaacaaaagaggaagcaattagtttacatgagtttcccgtggaacagatgactcggagtttggcctccccagcaggtttacaggacggctctgctcagcaccatccaaaaggaggctccacatccgccctcaaagaaaatgctactggtcacgtcgaatcgatggcttggacaacaccagatcccacgtctcctgacgaagcctgccccgatggccgcaaggagaatgggtgcctcagtgggcacgacctggaaagcatccgcccagctggcttgcacaattctgcacgtggcgaggttctggggcttagttcttcgttggggaaagaattggttttcttgcaggaagaactcgatctctccgaaattcacattccggaggctcaggaagtcgaaatggcctcaggacactttgcgttcctccacgtccccgtgcctgatggaagagcgccttactgcaaagcctcattgagcgcttcatcatctttggaacctactccacctgaagataccgcaatctcatcgctgcgtccgccttctgctcccgagatgctcacacaacacggtgcccaggagcagctggaagatcaccccggtcacagttcccaggcacccattcctcgcgctgatcctttaccgcgaaggacccgccggccactcctgcttccgagactggacccaggccagcgcgggaacaagctgccaacaggtgaacagggacttgatgaggatgtagatggcgtctgtgaaagccacgctgctcccggcttagagtgtagctcaggtagtgctaactgtcagggagcaggcccttccgccgacggtatcagcagcagactcacacctgccgagtcatgcatgggactagttagaatgaacctgtacacgcattgcgtaaagggcctcgttctgtcactgctggcagaggagccactcctgggtgattcagctgcaattgaagaagtataccactcatctcttgcaagcctcaatggcctggaggtacatctgaaagagactctgccacgggatgaagccgcaagtaccagttccacatacaacttcacccattatgatcgaattcagtccctcctgatggccaacctaccccaggtagctaccccacaggatagacggtttcttcaggcggtatcgctaatgcacagcgagttcgcccagctgccagcactctatgaaatgacagttcgaaatgcctctaccgccgtctacgcctgctgtaaccccatacaggaaacttattttcaacagctggcccctgctgcacggtcctccggctttccgaatcctcaggacggggctttttcactgagtggcaaagcaaaacagaaattattaaaacacggcgtgaacctgctgtag

SEQ ID NO: 295964 - DNA, 1587 bp, Artificial Sequence
  derived and/or modified sequence
atggcaacctcgacgtccactgaggccaaaagtgcatcatggtggaactactttttcctgtacgatggatctaaggtcaaggaggagggtgaccctacgagagccggaatctgctacttctacccttcacagaccctcctggatcaacaggagctgctttgcggccagattgcgggtgtggtcaggtgtgtgtctgacatctcggacagccctcccactttggtgcgccttagaaagttgaagtttgctatcaaagtggacggagattatctttgggttctagggtgtgctgtcgaattgccggatgtgagttgtaagagattcctggaccaactcgtaggttttttcaatttctataacgggcctgtgagcctagcctacgaaaattgctcacaggaggaactatcaaccgagtgggacacattcatcgagcagattcttaaaaacacatcagacctccacaaaatcttcaactcactctggaatttggaccagaccaaggttgagcctctgctccttctgaaggcggctagaatactacagacatgtcagcgctcacctcacattcttgctggctgcatactatacaagggactaatcgtgagcactcagcttccaccctccctcacagccaaggttctattacaccgcaccgcaccccaagagcagcgacttccaaccggcgaggatgcccctcaagagcacgggaaatggatgctgtggtcttttaagaacagagtcacccaccaaaacccgaacggcgctgcgcttcctcctaatgttcagattataccggtctttgtcacaaaggaggaggcaataagcctgcacgagtttcctgtggagcagatgacacgaagcctcgcctctcctgccggattacaggacggctcagcgcaacatcaccctaagggcggaagcactagcgccctgaaggagaatgctacaggccacgttgaatctatggcttggaccaccccagaccctacgagtcccgatgaagcttgccccgatggaaggaaagaaaatggctgtctatctggacacgacctcgagagcatccgccctgctgggttgcataactccgcgaggggtgaggtactgggtctgtcatcctccctaggtaaggagttagtgttcctgcaggaagaactggacttatccgaaatccacattcctgaagcccaagaggtcgagatggctagcggccactttgcttttctccacgtgcccgtgccagacggtcgcgcaccttactgcaaagccagcctgagcgctagctctagcctggagccaacgccaccggaagacacagccatctccagtctgaggccgccaagtgcgcctgagatgctgacacagcacggggctcaggaacagctcgaagaccacccaggccatagctcacaggctccaattccgagagctgaccctctcccaaaaagcaccgtgcttttctctgggggatgcgtgaaaggcagcgatacacagctatgcgtacccggactggtatggtacctggaacctcagttttactacgtgatcgtgcggcattttttcgacagcatgcggcagacagcgggatag

SEQ ID NO: 295965 - DNA, 2166 bp, Artificial Sequence
  derived and/or modified sequence
atggcacctctgtgcagcctcgcccgttggaattacttctttctgtatgacggctcaaaggttaaagaggagggggatcccactcgcgctgggatctgttacttctacccctcccagaccctgctcgatcaacaagaattactgtgtggacaaattgctggcgtggtgagatgcgtctcagacatcagcgactcacctccaacactggtccggctgagaaagctgaagtttgccatcaaagtggacggggactatctctgggtcctgggctgcgccgtagaactcccggacgtgagttgtaaacggttcctggaccagctcgtggggttttttaatttctacaatggtccggtgtcccttgcctacgagaattgttcccaggaagaactgtccacagaatgggatacgtttattgaacagatcttgaaaaatacttccgatctgcacaaaatatttaattctctgtggaatcttgaccagactaaagtggaaccactattactattgaaggcagccaggattctacaaacctgccagcgatctccacacatcctggcaggatgtatcctgtataagggcctgatcgtttccactcaactgcctcccagcctgactgcaaaagtcttattacacaggaccgccccacaggaacagcgactccctactggtgaggatgccccacaggaacatgggaaatggatgctgtggtcttttaaaaaccgcgtgacccatcagaaccctaatggggctgcccttccccctaatgttcagatcatccctgttttcgtgacaaaggaagaagctatcagcctccacgagttcccggtggagcagatgactcgatcactcgctagccccgctggcctgcaggatgggagtgcacagcaccaccccaagggagggagtacttcagcattaaaggagaatgccactggacacgtcgaaagcatggcctggaccacacccgatcccactagtcctgacgaggcctgccctgatgggaggaaagagaatggatgtctgtcagggcatgatttggaaagcatcagaccggctggccttcacaatagtgcacggggtgaagtcttaggtctgtcttctagcctggggaaggaacttgttttcttacaagaagaactcgacctaagcgagatccatataccagaggcccaggaggttgagatggcatccggtcattttgcctttttacatgtcccagtccctgatgggagggctccctattgcaaggcctcactgagcgcgtcctcttctttggaacccaccccccctgaagatacggccatcagcagtctgaggccaccatcagctccggaaatgctgactcagcatggggctcaggagcagcttgaggatcacccaggccatagttctcaggctccaatccccagggccgaccctttacccaggaggacaagaagaccccttctgttacctagacttgaccccggacagaggggaaacaagcttcctactggagagcagggtctggacgaggacgtggatggcgtatgtgaatcccacgccgctcctggtttggaatgctcatccgggtcggccaattgccagggggctggtcctagtgcggacggtatttccagtcggctgacacccgctgagtcttgcatgggtctcgtcagaatgaatctgtatacacactgtgtgaaagggctggtcctgagtttactggccgaggagcctttactgggagattctgcagcaatcgaggaagtgtatcacagctccttggcctcacttaatggccttgaagtgcatctgaaggaaacattaccacgggatgaggctgcaagcacatccagcacttataacttcacccactacgatcgaatacagtcactgctgatggcaaacttgcctcaggtggcaacacctcaagatcgccgattcctgcaggctgtttctcttatgcacagcgagtttgcgcagctccccgcactctatgaaatgaccgtccgcaacgcctctactgccgtgtacgcttgttgcaacccaatccaggagacctacttccaacagttggctccagcagccaggtcatctggattccctaacccacaggacggtgcattctcactttccggcaaggccaagcagaagctactgaaacacggcgtgaatcttctctag

SEQ ID NO: 295966 - DNA, 1587 bp, Artificial Sequence
  derived and/or modified sequence
atggccaccagcaccagcaccgaggccaagagcgccagctggtggaactacttcttcctgtacgacggcagcaaggtgaaggaggagggcgaccccaccagagccggcatctgctacttctaccccagccagaccctgctggaccagcaggagctgctgtgcggccagatcgccggcgtggtgagatgcgtgagcgacatcagcgacagcccccccaccctggtgagactgagaaagctgaagttcgccatcaaggtggacggcgactacctgtgggtgctgggctgcgccgtggagctgcccgacgtgagctgcaagagattcctggaccagctggtgggcttcttcaacttctacaacggccccgtgagcctggcctacgagaactgcagccaggaggagctgagcaccgagtgggacaccttcatcgagcagatcctgaagaacaccagcgacctgcacaagatcttcaacagcctgtggaacctggaccagaccaaggtggagcccctgctgctgctgaaggccgccagaatcctgcagacctgccagagaagcccccacatcctggccggctgcatcctgtacaagggcctgatcgtgagcacccagctgccccccagcctgaccgccaaggtgctgctgcacagaaccgccccccaggagcagagactgcccaccggcgaggacgccccccaggagcacggcaagtggatgctgtggagcttcaagaacagagtgacccaccagaaccccaacggcgccgccctgccccccaacgtgcagatcatccccgtgttcgtgaccaaggaggaggccatcagcctgcacgagttccccgtggagcagatgaccagaagcctggccagccccgccggcctgcaggacggcagcgcccagcaccaccccaagggcggcagcaccagcgccctgaaggagaacgccaccggccacgtggagagcatggcctggaccacccccgaccccaccagccccgacgaggcctgccccgacggcagaaaggagaacggctgcctgagcggccacgacctggagagcatcagacccgccggcctgcacaacagcgccagaggcgaggtgctgggcctgagcagcagcctgggcaaggagctggtgttcctgcaggaggagctggacctgagcgagatccacatccccgaggcccaggaggtggagatggccagcggccacttcgccttcctgcacgtgcccgtgcccgacggcagagccccctactgcaaggccagcctgagcgccagcagcagcctggagcccaccccccccgaggacaccgccatcagcagcctgagaccccccagcgcccccgagatgctgacccagcacggcgcccaggagcagctggaggaccaccccggccacagcagccaggcccccatccccagagccgaccccctgcccaagagcaccgtgctgttcagcggcggctgcgtgaagggcagcgacacccagctgtgcgtgcccggcctggtgtggtacctggagccccagttctactacgtgatcgtgagacacttcttcgacagcatgagacagaccgccggctag

SEQ ID NO: 295967 - DNA, 2166 bp, Artificial Sequence
  derived and/or modified sequence
atggcccccctgtgcagcctggccagatggaactacttcttcctgtacgacggcagcaaggtgaaggaggagggcgaccccaccagagccggcatctgctacttctaccccagccagaccctgctggaccagcaggagctgctgtgcggccagatcgccggcgtggtgagatgcgtgagcgacatcagcgacagcccccccaccctggtgagactgagaaagctgaagttcgccatcaaggtggacggcgactacctgtgggtgctgggctgcgccgtggagctgcccgacgtgagctgcaagagattcctggaccagctggtgggcttcttcaacttctacaacggccccgtgagcctggcctacgagaactgcagccaggaggagctgagcaccgagtgggacaccttcatcgagcagatcctgaagaacaccagcgacctgcacaagatcttcaacagcctgtggaacctggaccagaccaaggtggagcccctgctgctgctgaaggccgccagaatcctgcagacctgccagagaagcccccacatcctggccggctgcatcctgtacaagggcctgatcgtgagcacccagctgccccccagcctgaccgccaaggtgctgctgcacagaaccgccccccaggagcagagactgcccaccggcgaggacgccccccaggagcacggcaagtggatgctgtggagcttcaagaacagagtgacccaccagaaccccaacggcgccgccctgccccccaacgtgcagatcatccccgtgttcgtgaccaaggaggaggccatcagcctgcacgagttccccgtggagcagatgaccagaagcctggccagccccgccggcctgcaggacggcagcgcccagcaccaccccaagggcggcagcaccagcgccctgaaggagaacgccaccggccacgtggagagcatggcctggaccacccccgaccccaccagccccgacgaggcctgccccgacggcagaaaggagaacggctgcctgagcggccacgacctggagagcatcagacccgccggcctgcacaacagcgccagaggcgaggtgctgggcctgagcagcagcctgggcaaggagctggtgttcctgcaggaggagctggacctgagcgagatccacatccccgaggcccaggaggtggagatggccagcggccacttcgccttcctgcacgtgcccgtgcccgacggcagagccccctactgcaaggccagcctgagcgccagcagcagcctggagcccaccccccccgaggacaccgccatcagcagcctgagaccccccagcgcccccgagatgctgacccagcacggcgcccaggagcagctggaggaccaccccggccacagcagccaggcccccatccccagagccgaccccctgcccagaagaaccagaagacccctgctgctgcccagactggaccccggccagagaggcaacaagctgcccaccggcgagcagggcctggacgaggacgtggacggcgtgtgcgagagccacgccgcccccggcctggagtgcagcagcggcagcgccaactgccagggcgccggccccagcgccgacggcatcagcagcagactgacccccgccgagagctgcatgggcctggtgagaatgaacctgtacacccactgcgtgaagggcctggtgctgagcctgctggccgaggagcccctgctgggcgacagcgccgccatcgaggaggtgtaccacagcagcctggccagcctgaacggcctggaggtgcacctgaaggagaccctgcccagagacgaggccgccagcaccagcagcacctacaacttcacccactacgacagaatccagagcctgctgatggccaacctgccccaggtggccaccccccaggacagaagattcctgcaggccgtgagcctgatgcacagcgagttcgcccagctgcccgccctgtacgagatgaccgtgagaaacgccagcaccgccgtgtacgcctgctgcaaccccatccaggagacctacttccagcagctggcccccgccgccagaagcagcggcttccccaacccccaggacggcgccttcagcctgagcggcaaggccaagcagaagctgctgaagcacggcgtgaacctgctgtag

SEQ ID NO: 295968 - protein, 264 aa, Artificial Sequence
  derived and/or modified sequence
MLEFVSLLARKDSNNSVSKPRHKLNPFSSKRHEDDVQHFKVMRDNKGNYFLWTEKFPSLNKLVDYYRTNSISRQKQIFLRDRTREDQGHRGNSLDRRSQGGPHLSGAVGEEIRPSMNRKLSDHPPTLPLQQHQHQPQPPQYAPAPQQLQQPPQQRYLQHHHFHQERRGGSLDINDGHCGTGLGSEMNAALMHRRHTDPVQLQAAGRVRWARALYDFEALEDDELGFHSGEVVEVLDSSNPSWWTGRLHNKLGLFPANYVAPMTR

SEQ ID NO: 295969 - protein, 304 aa, Artificial Sequence
  derived and/or modified sequence
MLEFVSLLARKDSNNSVSKPRHKLNPFSSKRWFHEGLSRHQAENLLMGKEVGFFIIRASQSSPGDFSISVRHEDDVQHFKVMRDNKGNYFLWTEKFPSLNKLVDYYRTNSISRQKQIFLRDRTREDQGHRGNSLDRRSQGGPHLSGAVGEEIRPSMNRKLSDHPPTLPLQQHQHQPQPPQYAPAPQQLQQPPQQRYLQHHHFHQERRGGSLDINDGHCGTGLGSEMNAALMHRRHTDPVQLQAAGRVRWARALYDFEALEDDELGFHSGEVVEVLDSSNPSWWTGRLHNKLGLFPANYVAPMTR

SEQ ID NO: 295970 - protein, 258 aa, Artificial Sequence
  derived and/or modified sequence
MGKEVGFFIIRASQSSPGDFSISVRHEDDVQHFKVMRDNKGNYFLWTEKFPSLNKLVDYYRTNSISRQKQIFLRDRTREDQGHRGNSLDRRSQGGPHLSGAVGEEIRPSMNRKLSDHPPTLPLQQHQHQPQPPQYAPAPQQLQQPPQQRYLQHHHFHQERRGGSLDINDGHCGTGLGSEMNAALMHRRHTDPVQLQAAGRVRWARALYDFEALEDDELGFHSGEVVEVLDSSNPSWWTGRLHNKLGLFPANYVAPMTR

SEQ ID NO: 295971 - DNA, 795 bp, Artificial Sequence
  derived and/or modified sequence
atgttggaatttgtgtccctgctagcccgcaaagattctaacaactcggtgtcaaagccccggcataaactgaaccctttctcttctaagaggcacgaagacgacgttcaacattttaaagtaatgcgggacaacaagggaaactatttcctctggacagaaaagttcccgagcctgaacaaattggtggactattataggaccaatagtatttcacgccaaaaacagatctttttgcgggatcgaactagggaggatcagggccataggggtaattctctggaccgcaggtctcagggagggccccacctctctggggcagtgggcgaagagatccggccttctatgaataggaagctgagtgatcatccacccactttgcccttgcagcagcatcagcaccagccccaacctccccagtacgctccggcacctcagcagctgcagcagccacctcaacagcgctacctccagcaccaccattttcaccaggaaagaaggggcgggtctttggacattaatgatggtcactgcgggactgggcttggcagtgagatgaacgccgccctgatgcatcgacggcacactgaccctgttcagctgcaggccgcaggtcgtgtccgttgggctcgggcattatacgacttcgaagcactggaagacgacgaattgggattccactcaggcgaagtcgtggaagtcttggattccagtaaccccagctggtggactggcaggcttcacaataagctgggcttgttcccagccaattacgtcgctccaatgactaggtag

SEQ ID NO: 295972 - DNA, 777 bp, Artificial Sequence
  derived and/or modified sequence
atggggaaggaggtggggttcttcattatcagggcttctcagagcagccccggcgacttttccatttcagtccggcatgaagacgacgtgcagcacttcaaggttatgcgtgataataaaggtaactattttctgtggacggagaagttcccgagcctcaataagctcgtcgactactacagaaccaattctatttcacgccagaagcagatattcctgcgggatcgaactagggaggatcagggtcaccggggcaatagcttagacagacgttcgcagggtggaccccacttgtccggagcagtaggcgaggaaattcgcccatccatgaataggaaactcagcgaccacccacctacattaccattgcaacaacatcagcatcagcctcagccaccccagtatgcacctgcccctcaacagctccaacagccaccacagcagagatacttacagcaccatcatttccaccaggagcgccggggcggctcactcgatatcaatgatggacactgtggcacaggactgggctctgagatgaacgcagccctgatgcaccgtaggcacactgatccagtacaactgcaggctgctggcagagttcgctgggcacgcgcactgtatgacttcgaagctctcgaagatgatgagctgggcttccatagcggtgaggtggtcgaagtgttagattcctccaatccttcctggtggaccggcaggctacataacaaactcggcctgttccctgccaattacgtggcaccgatgacccgctag

SEQ ID NO: 295973 - DNA, 1279 bp, Artificial Sequence
  derived and/or modified sequence
tttggaggagggagtaagaggtggggaggaggaggcacagttaatggatctgtaaacttgcaccctctttcagagtggtacatggaagacagcacaaagtggatccatactctgaaatgcagtaactctgatgcttgaatttgtctcccttcttgccagaaaggattctaataactcggtgtcaaagccaagacataaactcaaccccttctcttccaaaaggcatgaggatgacgttcaacacttcaaggtcatgcgagacaacaagggtaattactttctgtggactgagaagtttccatccctaaataagctggtagactactacaggacaaattccatctccagacagaagcagatcttccttagagacagaacccgagaagaccagggtcaccggggcaacagcctggaccggaggtcccagggaggcccacacctcagtggggctgtgggagaagaaatccgaccttcgatgaaccggaagctgtcggatcaccccccgacccttcccctgcagcagcaccagcaccagccacagcctccgcaatatgccccagcgccccagcagctgcagcagcccccacagcagcgatatctgcagcaccaccatttccaccaggaacgccgaggaggcagccttgacataaatgatgggcattgtggcaccggcttgggcagtgaaatgaatgcggccctcatgcatcggagacacacagacccagtgcagctccaggcggcagggcgagtgcggtgggcccgggcgctgtatgactttgaggccctggaggatgacgagctggggttccacagcggggaggtggtggaggtcctggatagctccaacccatcctggtggaccggccgcctgcacaacaagctgggcctcttccctgccaactacgtggcacccatgacccgataaactcttcaggggacagaagctttttgtctggagctgcccacaagaaagagggcaaggaaaaaaggctggactccatgactatatatacatacatctatctacatctgcctgtgtacacacacaactttttatactagtaatttattggcaattgggctggtaattagttgatgcaaaagggaactcaggtggagaataatattgacacttgcttttctgcccccctcaggggtgtgtggaaggcagtgggggagttgggaggggggcagggaaatgaaatggagttttgtcctggccttcagctgtcactgcttcctccttgtcttgggaattttcacggagaacagctaagca

SEQ ID NO: 295974 - DNA, 795 bp, Artificial Sequence
  derived and/or modified sequence
atgctggagtttgtgtccctgctggccaggaaggacagcaacaacagcgtgtccaagcccaggcacaagctgaaccccttcagcagcaagagacatgaagatgatgtgcagcacttcaaggtgatgagggacaacaagggcaactacttcctgtggacagagaagttccccagcctgaacaagctggtggactactaccgcaccaacagcatcagccggcagaagcagatcttcctgcgggacaggacccgggaggaccagggccaccggggcaacagcctggaccggcgcagccagggcggcccccacctgtctggagctgtgggggaggagatccggcccagcatgaacaggaagctgagtgaccacccccccaccctgcccctgcagcagcaccagcaccagccccagcccccccagtatgccccagccccccagcagctgcagcagcccccccagcagcgctacctgcagcaccaccacttccaccaggagcggcggggcggcagcctggacatcaatgatggccactgcggcaccggcctgggcagcgagatgaatgctgccctgatgcacagaagacacacagatcctgtgcagctgcaggccgccggccgggtgcgctgggcccgggccctgtatgactttgaggccctggaggatgatgagctgggcttccacagcggggaggtggtggaggtgctggacagcagcaaccccagctggtggacaggccgcctgcacaacaagctgggcctcttccctgccaactacgtggcccccatgaccaggtag

SEQ ID NO: 295975 - DNA, 777 bp, Artificial Sequence
  derived and/or modified sequence
atgggcaaggaggtgggcttcttcatcatccgggccagccagagcagccctggggacttcagcatctctgtgagacatgaagatgatgtgcagcacttcaaggtgatgagggacaacaagggcaactacttcctgtggacagagaagttccccagcctgaacaagctggtggactactaccgcaccaacagcatcagccggcagaagcagatcttcctgcgggacaggacccgggaggaccagggccaccggggcaacagcctggaccggcgcagccagggcggcccccacctgtctggagctgtgggggaggagatccggcccagcatgaacaggaagctgagtgaccacccccccaccctgcccctgcagcagcaccagcaccagccccagcccccccagtatgccccagccccccagcagctgcagcagcccccccagcagcgctacctgcagcaccaccacttccaccaggagcggcggggcggcagcctggacatcaatgatggccactgcggcaccggcctgggcagcgagatgaatgctgccctgatgcacagaagacacacagatcctgtgcagctgcaggccgccggccgggtgcgctgggcccgggccctgtatgactttgaggccctggaggatgatgagctgggcttccacagcggggaggtggtggaggtgctggacagcagcaaccccagctggtggacaggccgcctgcacaacaagctgggcctcttccctgccaactacgtggcccccatgaccaggtag

SEQ ID NO: 295976 - DNA, 795 bp, Artificial Sequence
  derived and/or modified sequence
atgctggagttcgtgagcctgctggcccggaaggacagcaacaacagtgtttccaagccaaggcacaaacttaaccccttttcgtcaaagcgacatgaggatgatgtgcagcactttaaagtcatgagagacaacaaaggtaattacttcttatggaccgaaaaatttccctctctgaacaagctagtggattactaccgaaccaactctatttcacgtcagaaacagatatttctgagagaccgtactcgtgaggaccagggccacaggggcaatagtctcgaccggcgcagccaaggagggccacacctcagcggcgccgtcggcgaggagatccgacccagtatgaacaggaagctgtcagaccatccgcccactttacctctgcagcaacatcagcaccagcctcagcccccccaatatgcccctgcccctcagcagttgcagcagccaccccagcagcgctacctgcagcaccaccactttcaccaagagcgaagaggtggatctctggacattaatgatggccattgtgggactggccttgggtcagaaatgaacgccgcactcatgcatcgccgtcacacagatcccgtgcagcttcaggccgctggtagggtccgatgggctcgcgcactgtatgattttgaggccctcgaggacgatgaattgggcttccactctggggaggtcgtcgaggtcctggattcaagtaaccctagctggtggaccggccgtctacacaacaagctggggctcttcccagccaactacgtagctccaatgaccagatag

SEQ ID NO: 295977 - DNA, 777 bp, Artificial Sequence
  derived and/or modified sequence
atgggcaaggaggtgggcttcttcatcatccgggccagccagagctccccaggcgatttcagcatatctgttcgccatgaggacgacgtccagcatttcaaagttatgagagataataaagggaattactttttgtggactgagaaatttccgagcctgaacaagctggtggattactatcggactaattccatttctagacaaaaacagatttttctgcgggacagaacacgcgaggaccaaggtcatagaggtaacagcttggatcggaggtcacagggcggaccacatttgagtggtgctgtaggcgaagaaattcgacccagcatgaatagaaagctgtccgaccacccccctactttacccttacaacagcatcagcatcaaccacaaccacctcaatacgcacccgctcctcagcagctgcaacagccacctcagcaacgataccttcagcaccatcacttccatcaagagcgcagaggtggcagtcttgatataaacgacggtcattgtggcaccgggctgggcagcgagatgaacgctgcccttatgcaccgcagacacaccgaccccgtgcagttgcaggccgctggtcgcgtgaggtgggcaagggccctctatgactttgaggcactcgaggatgacgagctcggcttccacagcggagaggtggtggaagttctggacagctccaatccctcctggtggaccggtcgcctgcacaataagctgggtctgttccccgccaattatgttgctcctatgacacggtag

SEQ ID NO: 295978 - DNA, 795 bp, Artificial Sequence
  derived and/or modified sequence
atgctggagttcgtcagtttgcttgccaggaaggactcaaacaactcagtttctaagccacggcacaaactgaaccccttttcctccaaacgccatgaggacgacgttcagcattttaaggtcatgagagacaacaagggaaattactttctgtggacagagaagtttcccagtctcaataaactggttgactactacaggacaaactcaatctcccgacagaagcagattttcctgagggacagaaccagggaggatcagggacacagaggcaattcgcttgatcgcagatcacagggcggaccacacctgtctggcgctgtcggtgaggagattagaccatccatgaacaggaaactgtccgaccatccccctactttacctctgcaacaacatcagcaccaaccccagccgcctcagtacgcaccggctccacagcagcttcagcaaccaccacagcagagatatctccagcatcaccacttccaccaggaacggaggggcggatctctcgacatcaacgacggacattgcgggaccggactcggctccgagatgaacgccgctttgatgcacaggagacacactgatcctgtgcagctgcaggcagccggaagggtcaggtgggctcgggctttatacgacttcgaggctcttgaagatgacgaactaggatttcattccggggaggtggtggaagtcctggattcttccaacccatcctggtggactggccgactccacaacaagctgggcctgtttccagccaactatgtcgcccctatgacacgctag

SEQ ID NO: 295979 - DNA, 777 bp, Artificial Sequence
  derived and/or modified sequence
atgggcaaagaagtggggttttttatcatccgggcttctcagtcctcacctggagatttctccatttcggtgagacatgaggacgacgttcagcactttaaagtaatgagggataacaaagggaattattttctgtggacagaaaagttccccagcctcaacaaactggttgactactaccgcaccaactcgatttccaggcaaaaacagatatttctacgggatcgaacacgggaagatcaggggcatcggggtaactccctggatcgtcgctcacaggggggtccccatctgagcggcgcagtgggcgaggaaatcaggccgtcaatgaatcggaagctgagtgaccacccacctacattgcctcttcagcagcaccagcatcaaccacaaccaccacagtatgctcccgctccccaacagctccagcagcctcctcaacagagatacctgcaacaccaccatttccatcaagaaaggcgcggtggctcgctcgatatcaatgacgggcactgcggtacaggcttgggtagtgaaatgaatgcggctctcatgcaccgccgtcatacggaccccgtacaacttcaggccgcaggccgtgtgagatgggccagggcgctgtatgactttgaggccctcgaagacgacgagctggggtttcatagcggcgaggtggtggaggtgttagatagcagcaacccctcttggtggaccggaaggctgcacaacaaactcggtctattccccgcaaattatgtcgcacctatgaccagatag

SEQ ID NO: 295980 - DNA, 795 bp, Artificial Sequence
  derived and/or modified sequence
atgctggagttcgtgagcctgctggccagaaaggacagcaacaacagcgtgagcaagcccagacacaagctgaaccccttcagcagcaagagacacgaggacgacgtgcagcacttcaaggtgatgagagacaacaagggcaactacttcctgtggaccgagaagttccccagcctgaacaagctggtggactactacagaaccaacagcatcagcagacagaagcagatcttcctgagagacagaaccagagaggaccagggccacagaggcaacagcctggacagaagaagccagggcggcccccacctgagcggcgccgtgggcgaggagatcagacccagcatgaacagaaagctgagcgaccacccccccaccctgcccctgcagcagcaccagcaccagccccagcccccccagtacgcccccgccccccagcagctgcagcagcccccccagcagagatacctgcagcaccaccacttccaccaggagagaagaggcggcagcctggacatcaacgacggccactgcggcaccggcctgggcagcgagatgaacgccgccctgatgcacagaagacacaccgaccccgtgcagctgcaggccgccggcagagtgagatgggccagagccctgtacgacttcgaggccctggaggacgacgagctgggcttccacagcggcgaggtggtggaggtgctggacagcagcaaccccagctggtggaccggcagactgcacaacaagctgggcctgttccccgccaactacgtggcccccatgaccagatag

SEQ ID NO: 295981 - DNA, 777 bp, Artificial Sequence
  derived and/or modified sequence
atgggcaaggaggtgggcttcttcatcatcagagccagccagagcagccccggcgacttcagcatcagcgtgagacacgaggacgacgtgcagcacttcaaggtgatgagagacaacaagggcaactacttcctgtggaccgagaagttccccagcctgaacaagctggtggactactacagaaccaacagcatcagcagacagaagcagatcttcctgagagacagaaccagagaggaccagggccacagaggcaacagcctggacagaagaagccagggcggcccccacctgagcggcgccgtgggcgaggagatcagacccagcatgaacagaaagctgagcgaccacccccccaccctgcccctgcagcagcaccagcaccagccccagcccccccagtacgcccccgccccccagcagctgcagcagcccccccagcagagatacctgcagcaccaccacttccaccaggagagaagaggcggcagcctggacatcaacgacggccactgcggcaccggcctgggcagcgagatgaacgccgccctgatgcacagaagacacaccgaccccgtgcagctgcaggccgccggcagagtgagatgggccagagccctgtacgacttcgaggccctggaggacgacgagctgggcttccacagcggcgaggtggtggaggtgctggacagcagcaaccccagctggtggaccggcagactgcacaacaagctgggcctgttccccgccaactacgtggcccccatgaccagatag

SEQ ID NO: 295982 - protein, 1397 aa, Artificial Sequence
  derived and/or modified sequence
MAPPPPPVLPVLLLLAAAAALPAMGLRAAAWEPRVPGGTRAFALRPGCTYAVGAACTPRAPRELLDVGRDGRLAGRRRVSGAGRPLPLQVRLVARSAPTALSRRLRARTHLPGCGARARLCGTGARLCGALCFPVPGGCAAAQHSALAAPTTLPACRCPPRPRPRCPGRPICLPPGGSVRLRLLCALRRAAGAVRVGLALEAATAGTPSASPSPSPPLPPNLPEARAGPARRARRGTSGRGSLKFPMPNYQVALFENEPAGTLILQLHAHYTIEGEEERVSYYMEGLFDERSRGYFRIDSATGAVSTDSVLDRETKETHVLRVKAVDYSTPPRSATTYITVLVKDTNDHSPVFEQSEYRERVRENLEVGYEVLTIRASDRDSPINANLRYRVLGGAWDVFQLNESSGVVSTRAVLDREEAAEYQLLVEANDQGRNPGPLSATATVYIEVEDENDNYPQFSEQNYVVQVPEDVGLNTAVLRVQATDRDQGQNAAIHYSILSGNVAGQFYLHSLSGILDVINPLDFEDVQKYSLSIKAQDGGRPPLINSSGVVSVQVLDVNDNEPIFVSSPFQATVLENVPLGYPVVHIQAVDADSGENARLHYRLVDTASTFLGGGSAGPKNPAPTPDFPFQIHNSSGWITVCAELDREEVEHYSFGVEAVDHGSPPMSSSTSVSITVLDVNDNDPVFTQPTYELRLNEDAAVGSSVLTLQARDRDANSVITYQLTGGNTRNRFALSSQRGGGLITLALPLDYKQEQQYVLAVTASDGTRSHTAHVLINVTDANTHRPVFQSSHYTVSVSEDRPVGTSIATLSANDEDTGENARITYVIQDPVPQFRIDPDSGTMYTMMELDYENQVAYTLTIMAQDNGIPQKSDTTTLEILILDANDNAPQFLWDFYQGSIFEDAPPSTSILQVSATDRDSGPNGRLLYTFQGGDDGDGDFYIEPTSGVIRTQRRLDRENVAVYNLWALAVDRGSPTPLSASVEIQVTILDINDNAPMFEKDELELFVEENNPVGSVVAKIRANDPDEGPNAQIMYQIVEGDMRHFFQLDLLNGDLRAMVELDFEVRREYVLVVQATSAPLVSRATVHILLVDQNDNPPVLPDFQILFNNYVTNKSNSFPTGVIGCIPAHDPDVSDSLNYTFVQGNELRLLLLDPATGELQLSRDLDNNRPLEALMEVSVSDGIHSVTAFCTLRVTIITDDMLTNSITVRLENMSQEKFLSPLLALFVEGVAAVLSTTKDDVFVFNVQNDTDVSSNILNVTFSALLPGGVRGQFFPSEDLQEQIYLNRTLLTTISTQRVLPFDDNICLREPCENYMKCVSVLRFDSSAPFLSSTTVLFRPIHPINGLRCRCPPGFTGDYCETEIDLCYSDPCGANGRCRSREGGYTCECFEDFTAVS

SEQ ID NO: 295983 - protein, 772 aa, Artificial Sequence
  derived and/or modified sequence
  misc_feature (1)..(1): Xaa can be any naturally occurring amino acid
XDFPFQIHNSSGWITVCAELDREEVEHYSFGVEAVDHGSPPMSSSTSVSITVLDVNDNDPVFTQPTYELRLNEDAAVGSSVLTLQARDRDANSVITYQLTGGNTRNRFALSSQRGGGLITLALPLDYKQEQQYVLAVTASDGTRSHTAHVLINVTDANTHRPVFQSSHYTVSVSEDRPVGTSIATLSANDEDTGENARITYVIQDPVPQFRIDPDSGTMYTMMELDYENQVAYTLTIMAQDNGIPQKSDTTTLEILILDANDNAPQFLWDFYQGSIFEDAPPSTSILQVSATDRDSGPNGRLLYTFQGGDDGDGDFYIEPTSGVIRTQRRLDRENVAVYNLWALAVDRGSPTPLSASVEIQVTILDINDNAPMFEKDELELFVEENNPVGSVVAKIRANDPDEGPNAQIMYQIVEGDMRHFFQLDLLNGDLRAMVELDFEVRREYVLVVQATSAPLVSRATVHILLVDQNDNPPVLPDFQILFNNYVTNKSNSFPTGVIGCIPAHDPDVSDSLNYTFVQGNELRLLLLDPATGELQLSRDLDNNRPLEALMEVSVSDGIHSVTAFCTLRVTIITDDMLTNSITVRLENMSQEKFLSPLLALFVEGVAAVLSTTKDDVFVFNVQNDTDVSSNILNVTFSALLPGGVRGQFFPSEDLQEQIYLNRTLLTTISTQRVLPFDDNICLREPCENYMKCVSVLRFDSSAPFLSSTTVLFRPIHPINGLRCRCPPGFTGDYCETEIDLCYSDPCGANGRCRSREGGYTCECFEDFTEIS

SEQ ID NO: 295984 - protein, 376 aa, Artificial Sequence
  derived and/or modified sequence
MDGEEQQPPHEANVEPVVPSEASEPVPRVLSGDPQNLSDVDAFNLLLEMKLKRRRQRPNLPRTVTQLVAEDGSRVYVVGTAHFSDDSKRDVVKTIREVQPDVVVVELCQYRVSMLKMDESTLLREAQELSLEKLQQAVRQNGLMSGLMQMLLLKVSAHITEQLGMAPGGEFREAFKEASKVPFCKFHLGDRPIPVTFKRAIAALSFWQKVRLAWGLCFLSDPISKDDVERCKQKDLLEQMMAEMIGEFPDLHRTIVSERDVYLTYMLRQAARRLELPRASDAEPRKCVPSVVVGVVGMGHVPGIEKNWSTDLNIQEIMTVPPPSVSGRVSRLAVKAAFFGLLGYSLYWMGRRTASLVLSLPAAQYCLQRVTEARHK

SEQ ID NO: 295985 - DNA, 2901 bp, Artificial Sequence
  derived and/or modified sequence
atgttctggaagtttgatctgaatactacctcgcacgtggacaagctgctcgacaaggagcatgtgacactgcaagagcttatggacgaggatgatattttgcaagagtgcaaggcgcagaaccaaaaactgcttgatttcctctgccggcagcagtgtatggaggagttggtatcactgatcacgcaagacccacccctggatatggaggagaaggtcagattcaaataccccaacaccgcttgtgaattgttgacatgcgacgtgcctcagatctccgaccgcctcgggggagatgaatctctgctgagcctgctgtacgatttcttggaccatgaaccaccactgaacccactgcttgccagctttttttctaaaacaattggcaatctgatagcccgaaaaacagagcaggtcatcactttcctgaagaaaaaagataagttcatctccctagtactcaagcacatcgggactagtgctctgatggatttgctgttgagattggtcagctgtgtcgagccagctggactacgacaggacgtcctgcactggctcaacgaagagaaggtgatacagagattagtggagttgattcatccttctcaggacgaagacagacagtccaacgcaagccaaactctgtgcgatattgtgcgcctcgggagagatcagggcagccagttgcaagaggctcttgagccagatcctctgctgaccgcactggagtcccaggattgcgtggagcagcttcttaagaacatgttcgacggggaccggacagaaagctgtcttgtatctggaacgcaggtcttgctgactctcctggagaccagacgagtggggacagagggtctggtggattcattttcccaggggctggagaggagctacgcagtgagcagctcagtgttgcacggcatcgaacccaggcttaaagactttcaccagctgctgcttaatccccctaaaaagaaggccattttaacaaccataggagtccttgaagagccactgggtaatgcccgccttcacggcgcaagactgatggccgctttactccatacaaatacgccctccataaatcaggagctctgccggctcaatactatggacctgctgctcgatctcttcttcaagtacacctggaacaacttcctgcacttccaggtagagttatgtatagcagctatacttagccatgctgctagagaagaaagaaccgaagcctctggcagcgagtcccgcgtggagccaccacacgagaacggcaacaggtcattggaaaccccccagcctgctgcttcactacccgacaataccatggtcacacacctctttcagaagtgttgcctggtgcagagaatcttggaggcctgggaagcaaacgaccatacacaggctgctggggggatgcggcggggaaatatgggccatctaactagaatagcaaacgctgttgtgcagaacttggagagaggaccagttcagacacatatctctgaagtgatcagaggacttccagccgattgccgaggcagatgggaatccttcgtcgaagaaacactcactgaaacaaatagacggaacacagttgacctcgtgtccacccatcacctgcactcaagttccgaggatgaggatatagagggcgccttccccaacgagctctcattacaacaagcgttttcagactatcagatccaacaaatgacagctaacttcgtcgatcagtttggattcaacgacgaggagtttgctgaccaagatgataacataaacgctccgttcgacaggatcgcggagattaatttcaacattgacgcagacgaggatagtcctagcgccgcgctgttcgaagcctgttgcagcgatcgcatccaacccttcgacgacgacgaggacgaggatatctgggaggatagcgatacccgctgtgcggccagggtgatggctagaccaaggttcggcgcaccacatgccagcgaaagttgcagtaagaatggcccggagcgcggaggtcaggatggcaaagcttccttggaggcgcaccgagacgctccgggcgctggagcaccccccgcgcctgggaagaaagaagcaccgcctgtggagggtgatagcgagggcgccatgtggactgccgtcttcgatgaacctgctaattccacaccaactgcacctggcgtggtgagggatgttggctcatcagtgtgggcagctggcacatcagccccggaggaaaaagggtgggctaagtttaccgatttccaacccttttgctgctcggaatcaggtccgaggtgctcgagccccgtcgacaccgagtgctcccacgcggagggcagtagatcccagggccccgaaaaggcctcacaggcaagctacttcgcagtgtcacccgccagtccctgtgcctggaatgtatgtgttacaaggaaggcccccctgctggcttccgacagtagctctagcggcggctcacattcagaggatggagatcagaaggccgcctcagccatggacgcagtgtccagaggacccggccgcgaggccccacccctgcctacagtcgctcgtacagaagaagcagtggggcgggtggggtgcgccgacagtagactgctgagtcctgcatgtccagcacctaaggaggtgacggccgcccctgcagtcgcagtccctcctgaggccacagtggcgatcactacagctctgtccaaggctggtcctgcaattcccactccagctgtcagtagtgcattagccgtcgccgtgcctcttggacccattatggctgtgactgccgccccagctatggtggccacactgggaacggtcaccaaggacgggaagaccgacgctcctcccgaaggagccgccctgaacgggcctgtgtag

SEQ ID NO: 295986 - DNA, 2901 bp, Artificial Sequence
  derived and/or modified sequence
atgttctggaagtttgacctgaacaccaccagccacgtggacaagctgctggacaaggagcacgtgaccctgcaggagctgatggatgaagatgacatcctgcaggagtgcaaggcccagaaccagaagctgctggacttcctgtgccggcagcagtgcatggaggagctggtgtccctcatcacccaggacccccccctggacatggaggagaaggtgcgcttcaagtaccccaacacagcctgtgagctgctgacctgtgatgtgccccagatcagtgaccggctgggcggagatgagagcctgctgagcctgctgtatgacttcctggaccacgagccccccctgaaccccctgctggccagcttcttcagcaagaccatcggcaacctgattgccaggaagacagagcaggtgatcaccttcctgaagaagaaggacaagttcatcagcctggtgctgaagcacatcggcaccagcgccctgatggacctgctgctgcggctggtgtcctgtgtggagcccgccggcctgcggcaggatgtgctgcactggctgaatgaggagaaggtgatccagaggctggtggagctgatccaccccagccaggatgaagatcggcagagcaatgccagccagaccctgtgtgacatcgtgcggctgggccgggaccagggcagccagctgcaggaggccctggagccagaccccctgctgacagccctggagagccaggactgtgtggagcagctgctgaagaacatgtttgatggagacagaacagagagctgcctggtgtctggcacccaggtgctgctgaccctgctggagaccaggagagtgggcacagagggcctggtggacagcttcagccagggcctggagaggagctatgctgtgagcagctctgtgctgcacggcatcgagccccggctgaaggacttccaccagctgctgctgaacccccccaagaagaaggccatcctgaccaccatcggcgtgctggaggagcccctgggcaatgcccggctgcatggagcccggctgatggccgccctgctgcacaccaacacccccagcatcaaccaggagctgtgccgcctgaacaccatggacctgctgctggacctcttcttcaagtacacctggaacaacttcctgcacttccaggtggagctgtgcatcgccgccatcctgagccacgccgcccgggaggagaggacagaggccagcggcagcgagagccgggtggagccccctcatgaaaatggaaacagaagcctggagaccccccagcctgctgccagcctgcctgacaacaccatggtgacccacctgttccagaagtgctgcctggtgcagaggatcctggaggcctgggaggccaatgaccacacccaggccgccggcggcatgagaagaggcaacatgggccacctgaccagaattgccaatgctgtggtgcagaacctggagcggggccctgtgcagacccacatcagcgaggtgatccggggcctgcctgctgactgccggggccgctgggagagctttgtggaggagaccctgacagagaccaacagaagaaacacagtggacctggtgtccacccaccacctgcacagcagcagtgaagatgaagatattgaaggagccttccccaatgagctgagcctgcagcaggccttcagtgactaccagatccagcagatgacagccaactttgtggaccagtttggcttcaatgatgaggagtttgctgaccaggatgacaacatcaatgccccctttgacagaattgctgagatcaacttcaacattgatgctgatgaggacagccccagcgctgccctgtttgaggcctgctgcagcgaccgcatccagccctttgatgatgatgaagatgaggacatctgggaggacagcgacacccgctgtgccgcccgggtgatggcccggcccaggtttggagccccccacgccagcgagagctgcagcaagaatggacctgagcggggcggccaggacggcaaggccagcctggaggcccacagagatgcccctggggccggggcccccccagcccctgggaagaaggaggcccctcctgtggagggggacagcgagggcgccatgtggacagctgtgtttgatgagcccgccaacagcacccccacagcccctggggtggtgagagatgtgggcagctctgtgtgggccgccggcaccagcgcccctgaggagaagggctgggccaagttcacagacttccagcccttctgctgcagcgagagcggcccccgctgcagcagccctgtggacacagagtgcagccacgccgagggcagccgcagccagggccctgagaaggccagccaggccagctactttgctgtgtccccagccagcccctgtgcctggaatgtgtgtgtgaccaggaaggcccccctgctggccagtgacagcagcagcagcggcggcagccacagtgaagatggagaccagaaggccgccagcgccatggatgctgtgtcccggggccctggccgggaggccccacccctgcccaccgtggccaggacagaggaggccgtgggccgggtgggctgtgccgacagccggctgctgagccctgcctgcccagcccccaaggaggtgacagctgccccagctgtggccgtgcccccagaggccaccgtggccatcaccacagccctgagcaaggccggccctgccatccccaccccagctgtgagcagcgccctggccgtggccgtgcccctgggccccatcatggctgtgacagctgccccagccatggtggccaccctgggcaccgtgaccaaggatggcaagacagatgcccctcctgagggcgccgccctgaatggacctgtgtag

SEQ ID NO: 295987 - DNA, 2901 bp, Artificial Sequence
  derived and/or modified sequence
atgttctggaagttcgacctgaacaccaccagccacgtggacaagctgctggataaagaacacgtgacccttcaggaactgatggacgaggatgacatcttgcaggagtgcaaggcccaaaaccaaaagctgctggattttctgtgtagacagcagtgcatggaggaactggtatcactgatcacgcaggatccccctctcgacatggaggagaaggtccgctttaaatatccaaatacggcctgcgaacttctaacgtgtgatgtgcctcagattagcgatcgcttgggcggggatgagtcgttgctgtctctgttatatgacttcctggatcacgaacccccacttaatcccttgttggcaagttttttctcaaaaaccatcgggaatttgattgcccgaaagacagaacaggtgatcaccttcctgaagaagaaagataagttcattagcttagtgcttaagcatatcggcaccagcgccctcatggacctgcttttgcgcctagtgtcttgcgtagaacctgccgggctccgccaggatgtgctgcactggctgaatgaagagaaagtcatccagagactggtggagctcatccatcccagccaagatgaagataggcagtcaaacgcttcccagacactgtgcgacatcgtaaggctaggtcgtgatcagggctcacagctccaggaggcactggaacctgaccccctgctgactgccctggaaagtcaggattgcgtggagcaactgttaaagaatatgttcgacggcgaccggacagagtcttgccttgtcagtgggacacaggtcctgcttaccttgctggagacacgaagagtaggcacagagggcttagtcgattcgttttcacaggggttagagaggagctatgccgtttcgtcttcagtgctacacggaatcgaacctaggctcaaggattttcaccagctcctgctcaatcctccgaaaaagaaagccatcctgacaacaatcggagttctggaggagccgctgggtaatgcaagattacatggtgctcgcctcatggccgccctcctacatacaaacaccccctcaattaaccaggagctatgcagattgaacaccatggacctcctgcttgacctgttttttaagtatacctggaataattttctgcactttcaggtggagctttgtattgcagccattctttcccacgcggctcgcgaagagcggactgaggccagcgggagcgagagccgggtggagccaccccatgagaatggaaaccgctcattggagaccccacaacccgcagcctcccttcccgacaacaccatggtgacacacctgtttcagaaatgctgtcttgtgcagcgaatcctcgaggcctgggaggccaacgaccatacacaggctgccgggggaatgcgtcggggaaacatgggacatctgacacgaatcgccaacgcagtggtacagaatctggagaggggcccagtgcaaacacacatttctgaagtgatacggggcttgcctgctgattgccgcggcagatgggagtcctttgttgaagaaactctaaccgagaccaaccgaagaaacaccgtggacctagtgtccacacatcacctccatagcagctctgaggacgaagacatcgaaggagctttcccgaacgagctgagcctacagcaggctttttctgactaccagatacaacaaatgacagccaatttcgtggaccaatttggatttaacgatgaggaatttgcagaccaagatgataatattaatgcacctttcgatcggatagccgagattaactttaatatcgacgccgacgaagatagtcctagcgccgcactgttcgaagcatgctgttctgatagaatccagccctttgatgacgatgaagatgaggatatctgggaagactcagatactcgctgtgctgctcgtgttatggcccgtccccgattcggagctcctcacgccagcgagtcatgttctaagaatggaccggagcggggtggacaggacggaaaagcctccctggaagcacacagagacgctcctggcgcaggagctccccctgccccaggcaagaaggaagcacctccagtagagggggattcagagggagccatgtggaccgccgtgtttgacgagcccgcaaatagcactcctactgctccaggtgtggtgagggatgtgggctcttcagtctgggctgcagggacctccgcccccgaagagaaaggatgggccaagtttactgatttccagcctttttgttgttcagaatcaggaccacgatgttcaagtcctgtggatacagaatgttcccatgctgagggttcacgatcccagggcccagaaaaggcatcccaagcctcatatttcgctgtatcacccgctagcccctgtgcatggaacgtctgtgtcacaagaaaggctcccttactcgcaagcgatagctcatctagcggaggcagtcacagcgaggacggagatcagaaagcagctagtgcaatggatgccgtgtcacggggcccagggagggaggccccaccactacctacagttgctcgaactgaggaggctgtgggccgggtgggctgcgctgatagtagactcctaagtccagcctgtccagctcccaaagaggttacggcagctcccgctgtagcggtcccacccgaagccactgtcgctattacaacagctctgtcgaaggccggccctgctatcccgacacctgctgtctcctcggcactggccgtggcggtgcctttagggcccattatggcagtgaccgcagccccagccatggtggctactttaggcactgtgaccaaggatgggaaaaccgatgcaccacctgaaggagcggcactgaatggaccggtatag

SEQ ID NO: 295988 - DNA, 2901 bp, Artificial Sequence
  derived and/or modified sequence
atgttctggaagttcgacctgaataccactagtcacgttgataagctactagacaaagaacacgtgacccttcaggagctcatggacgaggacgacattctacaggagtgcaaagcccagaatcagaaattgctggacttcctctgtagacaacaatgtatggaagagcttgtatccctgattactcaggaccctccgctggatatggaagagaaagttcggtttaagtatccaaacaccgcctgcgagttgctcacatgcgacgtgcctcagatttccgacagactcggaggggacgagagtttactttctctgctttacgactttttggaccacgaaccacccctaaaccccctgctggcgagctttttctcgaagaccataggtaatcttattgccaggaagaccgagcaggttataaccttcttaaagaaaaaggataaatttatctctctggtgctcaagcacatagggacatccgcattgatggacctgttgttgcgtctggtgagctgcgtagaacctgccggattgcggcaggacgtgctgcactggcttaatgaggagaaggtgatccagaggctggtcgaactgattcacccttcgcaggatgaggataggcaaagtaatgcatctcaaacactgtgcgacatagtgcgcctaggccgagaccagggctcgcagcttcaggaggcactggagccggaccccctcctcacggctctggagtcacaggattgcgtggaacaactcctgaagaatatgttcgatggagacaggacggagtcctgcttagttagcggcactcaggttctactaacactgctcgaaacccgtcgtgttgggacggagggccttgtagattctttctcacaggggctggagcgctcatacgccgtcagcagttctgtgctgcatggaattgaacctagattgaaagattttcaccagctgctgctcaatcccccaaaaaagaaggcaattctgactacaattggcgtacttgaagaacccttgggaaatgctcggctgcatggggcacgccttatggccgcacttttgcataccaacactccaagcataaaccaggagctctgtcgcttgaacaccatggatctattgctggacctgtttttcaagtatacttggaataacttccttcactttcaggtggaactgtgtattgcagcgattctttcacacgccgcacgcgaagagagaactgaggctagtgggagtgagagccgggtggaacctccacatgaaaacggtaaccggagcctggagaccccacaacccgcagcaagcctacccgataacaccatggtgacccatctgtttcaaaagtgctgtctggtacaacgcattctggaggcttgggaggccaacgaccatacacaggctgccggtgggatgaggcggggaaacatggggcatctgacacgtatcgccaacgctgtggtgcaaaatctggaaaggggcccagtacagacgcacatttcagaggttatcaggggactcccggcagattgccgcggaaggtgggagtctttcgtcgaggagacactgacagaaactaatcgtcggaacactgtggacctcgtttctacacaccacctgcactcctcgagcgaagacgaggacatagaaggcgcattcccaaacgaactcagtctgcagcaggccttcagcgactaccagatccaacagatgactgcgaacttcgtagatcagtttggctttaacgatgaagagtttgctgatcaggacgacaatattaatgcgccattcgaccggatcgcagaaattaatttcaacatagatgcagacgaggactctccctccgcagccctgttcgaagcttgctgctctgatcgcatccagcctttcgacgatgatgaggatgaggatatttgggaggactccgataccagatgtgcagcaagggtcatggctcgccctcgttttggagctcctcacgccagtgaaagctgcagcaagaatggacccgagagagggggtcaggatggaaaggcgagcctcgaagcgcatagggacgcccctggtgccggagctccccctgccccagggaagaaagaagcgccacccgtggaaggtgattccgagggtgccatgtggaccgccgtcttcgatgagccagccaacagcacacccaccgcccctggtgtcgtgagagacgttggctcatctgtctgggcagcaggcaccagtgctccagaggaaaaggggtgggcaaagttcacagatttccagccattctgctgcagcgagtctggaccccgatgcagttcccccgtggataccgagtgtagccacgccgagggatctaggtctcagggacccgaaaaggcttcccaggcctcttatttcgctgtctcccccgctagcccctgtgcatggaacgtttgtgtcacccggaaggctcccctgttagcatcggattcatctagcagcggtgggagccattctgaagacggggaccagaaggcggctagcgccatggatgccgtgtccaggggtccaggaagagaagctccacctctgccaaccgttgcaagaaccgaggaagctgtgggtcgagtaggctgcgctgactcaagacttctgtcccctgcttgtccggctccaaaagaggtgacagcagcgccagccgtagcagtacctcccgaggccacagtcgccatcacgacagcactgagcaaagccggacctgccatacctacaccggcagtgtcttccgccctcgcagtagcagttccgctgggaccgatcatggctgtgacagctgccccagccatggtggccactctcggtactgtgacaaaggatggcaaaactgacgctcccccagaaggagcagctctgaatggccctgtgtag

SEQ ID NO: 295989 - DNA, 2901 bp, Artificial Sequence
  derived and/or modified sequence
atgttctggaagttcgacctgaacaccaccagccacgtggacaagctgctggacaaggagcacgtgaccctgcaggagctgatggacgaggacgacatcctgcaggagtgcaaggcccagaaccagaagctgctggacttcctgtgcagacagcagtgcatggaggagctggtgagcctgatcacccaggacccccccctggacatggaggagaaggtgagattcaagtaccccaacaccgcctgcgagctgctgacctgcgacgtgccccagatcagcgacagactgggcggcgacgagagcctgctgagcctgctgtacgacttcctggaccacgagccccccctgaaccccctgctggccagcttcttcagcaagaccatcggcaacctgatcgccagaaagaccgagcaggtgatcaccttcctgaagaagaaggacaagttcatcagcctggtgctgaagcacatcggcaccagcgccctgatggacctgctgctgagactggtgagctgcgtggagcccgccggcctgagacaggacgtgctgcactggctgaacgaggagaaggtgatccagagactggtggagctgatccaccccagccaggacgaggacagacagagcaacgccagccagaccctgtgcgacatcgtgagactgggcagagaccagggcagccagctgcaggaggccctggagcccgaccccctgctgaccgccctggagagccaggactgcgtggagcagctgctgaagaacatgttcgacggcgacagaaccgagagctgcctggtgagcggcacccaggtgctgctgaccctgctggagaccagaagagtgggcaccgagggcctggtggacagcttcagccagggcctggagagaagctacgccgtgagcagcagcgtgctgcacggcatcgagcccagactgaaggacttccaccagctgctgctgaacccccccaagaagaaggccatcctgaccaccatcggcgtgctggaggagcccctgggcaacgccagactgcacggcgccagactgatggccgccctgctgcacaccaacacccccagcatcaaccaggagctgtgcagactgaacaccatggacctgctgctggacctgttcttcaagtacacctggaacaacttcctgcacttccaggtggagctgtgcatcgccgccatcctgagccacgccgccagagaggagagaaccgaggccagcggcagcgagagcagagtggagcccccccacgagaacggcaacagaagcctggagaccccccagcccgccgccagcctgcccgacaacaccatggtgacccacctgttccagaagtgctgcctggtgcagagaatcctggaggcctgggaggccaacgaccacacccaggccgccggcggcatgagaagaggcaacatgggccacctgaccagaatcgccaacgccgtggtgcagaacctggagagaggccccgtgcagacccacatcagcgaggtgatcagaggcctgcccgccgactgcagaggcagatgggagagcttcgtggaggagaccctgaccgagaccaacagaagaaacaccgtggacctggtgagcacccaccacctgcacagcagcagcgaggacgaggacatcgagggcgccttccccaacgagctgagcctgcagcaggccttcagcgactaccagatccagcagatgaccgccaacttcgtggaccagttcggcttcaacgacgaggagttcgccgaccaggacgacaacatcaacgcccccttcgacagaatcgccgagatcaacttcaacatcgacgccgacgaggacagccccagcgccgccctgttcgaggcctgctgcagcgacagaatccagcccttcgacgacgacgaggacgaggacatctgggaggacagcgacaccagatgcgccgccagagtgatggccagacccagattcggcgccccccacgccagcgagagctgcagcaagaacggccccgagagaggcggccaggacggcaaggccagcctggaggcccacagagacgcccccggcgccggcgccccccccgcccccggcaagaaggaggccccccccgtggagggcgacagcgagggcgccatgtggaccgccgtgttcgacgagcccgccaacagcacccccaccgcccccggcgtggtgagagacgtgggcagcagcgtgtgggccgccggcaccagcgcccccgaggagaagggctgggccaagttcaccgacttccagcccttctgctgcagcgagagcggccccagatgcagcagccccgtggacaccgagtgcagccacgccgagggcagcagaagccagggccccgagaaggccagccaggccagctacttcgccgtgagccccgccagcccctgcgcctggaacgtgtgcgtgaccagaaaggcccccctgctggccagcgacagcagcagcagcggcggcagccacagcgaggacggcgaccagaaggccgccagcgccatggacgccgtgagcagaggccccggcagagaggccccccccctgcccaccgtggccagaaccgaggaggccgtgggcagagtgggctgcgccgacagcagactgctgagccccgcctgccccgcccccaaggaggtgaccgccgcccccgccgtggccgtgccccccgaggccaccgtggccatcaccaccgccctgagcaaggccggccccgccatccccacccccgccgtgagcagcgccctggccgtggccgtgcccctgggccccatcatggccgtgaccgccgcccccgccatggtggccaccctgggcaccgtgaccaaggacggcaagaccgacgccccccccgagggcgccgccctgaacggccccgtgtag

SEQ ID NO: 295990 - protein, 345 aa, Artificial Sequence
  derived and/or modified sequence
MQSPQKTTLILPTQQVRRSSRIKPPGPTAVPKRSSSVKNITPRKKGPNSGKKEKPLPVICSTSAASLKSLTRDRGMLYKDVASGPCKIVMSTVCVYVNKHGNFGPHLDPKRIQQLPDHFGPGPVNVVLRRIVQACVDCALETKTVFGYLKPDNRGGEVITASFDGETHSIQLPPVNSASFALRFLENFCHSLQCDNLLSSQPFSSSRGHTHSSAEHDKNQSAKEDVTERQSTKRSPQQTVPYVVPLSPKLPKTKEYASEGEPLFAGGSAIPKEENLSEDSKSSSLNSGNYLNPACRNPMYIHTSVSQDFSRSVPGTTSSPLVGDISPKSSPHEVKFQMQRKSEGN

SEQ ID NO: 295991 - protein, 125 aa, Artificial Sequence
  derived and/or modified sequence
  misc_feature (1)..(1): Xaa can be any naturally occurring amino acid
XAKEDVTERQSTKRSPQQTVPYVVPLSPKLPKTKEYASEGEPLFAGGSAIPKEENLSEDSKSSSLNSGNYLNPACRNPMYIHTSVSQDFSRSVPGTTSSPLVGDISPKSSPHEVKFQMQRKSEGN

SEQ ID NO: 295992 - protein, 577 aa, Artificial Sequence
  derived and/or modified sequence
MGQTVNEDSMDVKKENQEKTPQSQIPPVNDFKVGMKLEARDPRNATSVCIATVIGITGARLRLRLDGSDNRNDFWRLVDSPDIQPVGTCEKEGDLLQPPLGYQMNTSSWPMFLLKTLNGSEMASATLFKKEPPKPPLNNFKVGMKLEAIDKKNPYLICPATIGDVKGDEVHITFDGWSGAFDYWCKYDSRDIFPAGWCRLTGDVLQPPGTSVPIVKNIAKTESSPSEASQHSMQSPQKTTLILPTQQVRRSSRIKPPGPTAVPKRSSSVKNITPRKKGPNSGKKEKPLPVICSTSAASLKSLTRDRGMLYKDVASGPCKIVMSTVCVYVNKHGNFGPHLDPKRIQQLPDHFGPGPVNVVLRRIVQACVDCALETKTVFGYLKPDNRGGEVITASFDGETHSIQLPPVNSASFALRFLENFCHSLQCDNLLSSQPFSSSRGHTHSSAEHDKNQSAKEDVTERQSTKRSPQQTVPYVVPLSPKLPKTKEYASEGEPLFAGGSAIPKEENLSEDSKSSSLNSGNYLNPACRNPMYIHTSVSQDFSRSVPGTTSSPLVGDISPKSSPHEVKFQMQRKSEGN

SEQ ID NO: 295993 - DNA, 1038 bp, Artificial Sequence
  derived and/or modified sequence
atgcagtctccccagaaaactacgctgattctcccaacacagcaggtacgccggagtagtagaattaagccccccgggcccacagcggtgcccaaacgctccagctcggtgaaaaatataacgccaagaaagaaaggtccaaactcaggaaaaaaagagaagcctctccccgttatctgtagcacttccgccgcctcgttaaaatccttaaccagggaccgggggatgctgtacaaggacgtcgcatctggcccctgcaagatcgtgatgagcaccgtttgcgtgtatgttaacaaacatggtaatttcggaccccacttagaccccaagcggatccagcaactccccgaccattttggacctggtccagtcaacgttgtgctgaggcgcatcgtccaggcctgcgtagattgtgccctggagacaaagacggtgtttggctacctaaagccggataatcggggcggggaagtgatcaccgcttcctttgacggcgaaacgcactccatccaactgcctcccgtgaacagtgctagcttcgctctgagatttttagaaaatttctgtcacagtctccagtgtgacaaccttctctctagccagcccttctcgagctctcggggccacactcactcctcggcagagcacgataagaaccagagcgccaaggaggatgtcacggagcggcagtcaacaaagcgatctcctcagcagacggtgccgtacgtggtgcccttgtcacctaaattgcctaaaactaaggagtacgcttcggagggtgagccactatttgccggtgggagcgcgatcccaaaggaagaaaatctttccgaagattcaaaaagtagttctcttaattcaggcaattacctgaatcctgcctgccgtaaccctatgtatatccacacctcagtctctcaggactttagccgcagcgtgcctgggacaacgtcttcccctctagttggtgacatctcgcctaagtcatctccgcacgaagttaaatttcagatgcagagaaagagcgagggcaactag

SEQ ID NO: 295994 - DNA, 378 bp, Artificial Sequence
  derived and/or modified sequence
tgagcaaaggaagacgtgacagaacgtcagagcacgaagaggtctccccagcagactgtgccctatgtggttccattaagtcccaagttgcccaagaccaaggagtacgcttctgagggcgagccgctctttgcaggtggtagcgcgatccccaaagaagaaaatcttagtgaggactctaagtcttcaagcctgaattctgggaactatttaaaccccgcctgccggaatcctatgtacatccacacctcggttagtcaggacttttcacgctctgttccgggaaccacatcttctccacttgtcggagatatttctccgaaaagctcccctcatgaggtgaagttccagatgcagcggaagagcgagggcaactag

SEQ ID NO: 295995 - DNA, 1734 bp, Artificial Sequence
  derived and/or modified sequence
atgggccagactgtcaatgaagatagcatggatgttaaaaaggagaaccaggagaagacgcctcaatcccaaatcccacctgtaaacgacttcaaggtggggatgaagctggaggcccgggatccaaggaacgcaaccagtgtgtgcattgccacagttattggaattacgggcgcgcgcttgcgcctgcgcctggatggatccgacaatcggaacgatttttggcggctagttgactctcctgacatccaacccgtgggtacctgtgagaaagagggggatctccttcagccaccacttgggtaccagatgaatacttcttcatggcccatgttcctgctgaaaactcttaacggctcggaaatggcctctgcgactctgtttaagaaggaaccgccaaagccaccactgaacaactttaaggtgggcatgaaactggaggccattgacaaaaagaacccttacctaatttgtccggccactatcggggacgtcaagggcgacgaagttcatatcacattcgatgggtggagtggagcattcgattactggtgcaagtacgattccagagacatcttccctgcagggtggtgtcgactgacaggagatgtcctacagcccccaggaacatccgtgccaatcgttaagaacattgcaaaaactgaatcatcgcctagtgaagcatctcaacacagcatgcagtccccccagaaaaccaccctcatccttccaacccaacaagtgcgcaggagtagccgtatcaagccacccggaccaacagctgtgcctaaacgttcttcaagcgtaaagaatatcaccccaaggaagaaagggccaaattcaggtaagaaggaaaaaccactgcctgtcatctgctcaacgagtgctgcatccttaaagagtctgactagagatagaggaatgctctacaaagacgtcgcctcagggccttgtaagatagttatgagtaccgtgtgcgtttacgtgaataagcacggcaatttcggccctcacctcgatcctaagcggatacaacagcttcctgaccatttcggaccaggccctgtgaatgtggttttgcgtcgtatcgtgcaggcctgcgtggactgtgctctggaaacgaagacagtgtttggctatctgaaaccggacaatcgtggcggcgaggttatcacagcatcctttgacggggagactcatagtattcagttacccccggttaactccgcttcgtttgcccttcgcttcctggagaatttttgccacagcctgcagtgcgataacctgctgtctagccagccctttagttcttcacgaggtcatacccactctagcgctgaacatgacaagaatcaaagtgcaaaggaggatgtaactgagcggcagagtacaaagaggtcaccccagcaaacagtgccttatgttgtacccctgtctccaaaactacccaaaactaaagaatacgccagcgagggggagcccctgttcgctggcggctctgctatccctaaggaggaaaacctttccgaagactcgaaatctagttcccttaactcggggaattatctgaacccagcttgtcgcaatcctatgtatattcatacttcagtaagtcaggattttagccgttccgtgcccggaactacttcaagccccttagtgggggatatcagccccaagagctccccccacgaggttaaatttcagatgcagcggaagtctgaaggtaattag

SEQ ID NO: 295996 - DNA, 1038 bp, Artificial Sequence
  derived and/or modified sequence
atgcagagcccccagaagaccaccctcatcctgcccacccagcaggtgagaagaagcagccgcatcaagcccccaggccccacagctgtgcccaagaggagcagctctgtgaagaacatcacccccaggaagaagggccccaacagcggcaagaaggagaagcccctgcctgtgatctgcagcaccagcgctgccagcctgaagagcctgacccgggaccggggcatgctgtacaaggatgtggccagcggcccctgcaagatcgtgatgagcacagtgtgtgtgtatgtgaacaagcacggcaactttggcccccacctggaccccaagaggatccagcagctgcctgaccactttggacctggccctgtgaatgtggtgctgcggagaattgtgcaggcctgtgtggactgtgccctggagaccaagacagtgtttggctacctgaagccagacaacagaggaggagaggtgatcacagccagctttgatggagagacccacagcatccagctgccccctgtgaacagcgccagctttgccctgcgcttcctggagaacttctgccacagcctgcagtgtgacaacctgctgagcagccagcccttcagcagcagccggggccacacccacagcagcgctgagcatgacaagaaccagagcgccaaggaggatgtgacagagcggcagagcaccaagaggagcccccagcagacagtgccctacgtggtgcccctgagccccaagctgcccaagaccaaggagtatgccagcgagggggagcccctgtttgctgggggcagcgccatccccaaggaggagaacctgtctgaggacagcaagagcagcagcctgaacagcggcaactacctgaacccagcctgcaggaaccccatgtacatccacacctctgtgtcccaggacttcagccgctctgtgcccggcaccaccagcagccccctggtgggggacatcagccccaagagcagcccccatgaggtgaagttccagatgcagaggaagtctgagggcaactag

SEQ ID NO: 295997 - DNA, 378 bp, Artificial Sequence
  derived and/or modified sequence
tgagccaaggaggatgtgacagagcggcagagcaccaagaggagcccccagcagacagtgccctacgtggtgcccctgagccccaagctgcccaagaccaaggagtatgccagcgagggggagcccctgtttgctgggggcagcgccatccccaaggaggagaacctgtctgaggacagcaagagcagcagcctgaacagcggcaactacctgaacccagcctgcaggaaccccatgtacatccacacctctgtgtcccaggacttcagccgctctgtgcccggcaccaccagcagccccctggtgggggacatcagccccaagagcagcccccatgaggtgaagttccagatgcagaggaagtctgagggcaactag

SEQ ID NO: 295998 - DNA, 1734 bp, Artificial Sequence
  derived and/or modified sequence
atgggccagacagtgaatgaagattccatggatgtgaagaaggagaaccaggagaagaccccccagagccagatcccccctgtgaatgacttcaaggtgggcatgaagctggaggcccgggaccccagaaatgccacctctgtgtgcatcgccaccgtcatcggcatcactggagcccggctgcggctgcggctggatggcagtgacaacagaaatgacttctggaggctggtggacagcccagacatccagcctgtgggcacctgtgagaaggagggggacctgctgcagccccccctgggctaccagatgaacaccagctcctggcccatgttcctgctgaagaccctgaatggcagcgagatggccagcgccaccctcttcaagaaggagccccccaagccacccctgaacaacttcaaggtgggcatgaagctggaggccatcgacaagaagaacccctacctgatctgcccagccaccatcggagatgtgaagggagatgaggtgcacatcacctttgatggctggagcggggcctttgactactggtgcaagtatgacagccgggacatcttccctgctggctggtgccgcctgactggagatgtgctgcagcccccaggcacctctgtgcccatcgtgaagaacatcgccaagacagagagcagccccagcgaggccagccagcacagcatgcagagcccccagaagaccaccctcatcctgcccacccagcaggtgagaagaagcagccgcatcaagcccccaggccccacagctgtgcccaagaggagcagctctgtgaagaacatcacccccaggaagaagggccccaacagcggcaagaaggagaagcccctgcctgtgatctgcagcaccagcgctgccagcctgaagagcctgacccgggaccggggcatgctgtacaaggatgtggccagcggcccctgcaagatcgtgatgagcacagtgtgtgtgtatgtgaacaagcacggcaactttggcccccacctggaccccaagaggatccagcagctgcctgaccactttggacctggccctgtgaatgtggtgctgcggagaattgtgcaggcctgtgtggactgtgccctggagaccaagacagtgtttggctacctgaagccagacaacagaggaggagaggtgatcacagccagctttgatggagagacccacagcatccagctgccccctgtgaacagcgccagctttgccctgcgcttcctggagaacttctgccacagcctgcagtgtgacaacctgctgagcagccagcccttcagcagcagccggggccacacccacagcagcgctgagcatgacaagaaccagagcgccaaggaggatgtgacagagcggcagagcaccaagaggagcccccagcagacagtgccctacgtggtgcccctgagccccaagctgcccaagaccaaggagtatgccagcgagggggagcccctgtttgctgggggcagcgccatccccaaggaggagaacctgtctgaggacagcaagagcagcagcctgaacagcggcaactacctgaacccagcctgcaggaaccccatgtacatccacacctctgtgtcccaggacttcagccgctctgtgcccggcaccaccagcagccccctggtgggggacatcagccccaagagcagcccccatgaggtgaagttccagatgcagaggaagtctgagggcaactag

SEQ ID NO: 295999 - DNA, 1038 bp, Artificial Sequence
  derived and/or modified sequence
atgcagagcccccagaagaccaccctgatcctgcccacccagcaggtcagacgaagttcgcgcatcaagcccccaggaccaacagccgttcctaagaggtcttcctctgtgaagaacataacccctcgaaaaaaaggcccaaactccggaaagaaggaaaagccgttgcccgtgatctgctcgacctctgcggcctcattaaagtctcttaccagagaccgagggatgctgtataaggatgtggcctctggaccatgcaaaattgtgatgagtaccgtttgtgtttatgtcaacaaacacggaaattttggcccgcatcttgaccccaagcggatccagcaactcccagatcacttcgggccgggacccgtgaacgtcgtgttacggcgcatcgtgcaggcctgtgtcgattgcgctctagagaccaaaaccgtgtttgggtaccttaaacccgacaacaggggtggggaagtgatcacagccagttttgacggcgaaacacacagcatccagctccctcctgtgaactctgcctccttcgcactgcggttcctggaaaatttctgccacagcttgcaatgcgacaatctcctgtcaagtcagcccttttcttcgagtagaggacacacgcactcttccgccgagcacgataagaaccagtccgccaaggaagacgtgactgagcgccagtcaaccaagaggtccccacagcagacagtgccatatgtcgtccccttaagtccaaagcttcccaaaaccaaagagtatgctagcgagggcgaacccctgtttgccggggggagcgctatacccaaagaggaaaacctgtcggaggactctaagtcaagcagccttaacagtggaaactaccttaacccagcatgcagaaatcccatgtacatccatacctctgtgtcacaggacttttcaaggtccgtccctggcacgacttcaagcccccttgtgggcgacatcagccccaaatcttccccccatgaggttaaattccagatgcagcgcaagtcagagggtaattag

SEQ ID NO: 296000 - DNA, 378 bp, Artificial Sequence
  derived and/or modified sequence
tgagccaaggaggacgtgaccgagcggcagagcaccaagcggagcccccagcagacagtcccatacgtggtgcctctgagccctaaactgcccaaaactaaggagtatgcaagtgagggagaacctctcttcgcagggggaagcgctattcccaaggaggaaaacttatcagaggattcaaaatcttcgtctctgaattccgggaactaccttaatccggcctgtcgcaatcccatgtatattcatactagtgtaagccaggatttcagtagatctgtgccagggaccactagttcaccactggtgggcgacatatctcccaagtcttccccacacgaagtgaagtttcaaatgcagcgtaaatcagaaggcaattag

SEQ ID NO: 296001 - DNA, 1734 bp, Artificial Sequence
  derived and/or modified sequence
atgggccagaccgtgaacgaggacagcatggacgtgaagaaggagaatcaagaaaagacaccccaaagccagatcccgcccgtcaacgattttaaagtggggatgaagcttgaagctcgtgatcctcgcaatgcaacttctgtgtgcatcgccaccgtgatcggcatcacaggtgccaggctgcggcttcggctcgatggctctgataatagaaacgatttctggagattggttgatagccctgatatccagcctgtgggaacgtgcgagaaagagggagacctgctgcaacctcctctggggtaccagatgaacacttcaagttggcccatgttcctgcttaaaacacttaacggtagtgagatggcctctgcgacgctgtttaaaaaggagcctcctaaaccaccccttaataacttcaaagtcggaatgaaactagaagccatagataagaaaaacccatacctgatctgccctgctaccattggcgacgtcaagggtgatgaagtccatatcacattcgacgggtggtcaggagcctttgactactggtgcaagtacgatagccgcgatatcttccctgcaggatggtgccgactaaccggagatgtcctacagcccccagggacttctgtgcccatcgtgaaaaatattgctaaaacagaaagctcgccaagcgaggccagccagcatagcatgcagtccccccaaaaaaccaccctgattctgcctacccagcaggtccgcaggtctagtcggattaagccaccgggtcctaccgccgtccccaaacgctcttcatccgtcaagaacattacaccacggaaaaaggggccaaacagtggcaagaaagaaaagcctctgccagttatctgcagtacttctgctgccagtctgaagtctcttacccgagaccgtgggatgctgtataaagacgtggcctcaggcccgtgcaagattgttatgagcacagtgtgcgtatatgtgaacaagcacgggaattttggtccgcacttggatccgaaaaggattcagcagctgccagaccactttggtccggggccagttaacgttgtgcttagacgaattgtgcaagcctgtgtggattgcgcccttgagaccaagacggtgttcgggtacctgaaaccagataacagaggaggcgaggtaatcacagctagcttcgatggggaaacgcattctattcaactccccccagtaaattcagcttcctttgcactgcgcttcttggagaatttctgtcactcccttcagtgcgataacctgttatctagccagccattttcatcctcacgcgggcacacacattcatcagccgagcacgacaagaaccagtctgctaaagaggacgttacagagagacagagcaccaaacgcagcccccagcagaccgttccctacgtcgtgccgctgtctcccaaactaccaaagacaaaggagtatgccagtgaaggtgaaccactctttgccggcgggtccgctatcccaaaggaggagaatctatccgaggattctaaatctagctcccttaactctgggaactacctgaatcccgcttgtcgcaaccccatgtatatccacacttctgtctctcaggacttcagcagaagcgtacccgggaccactagttctcccctggtgggggacatctcacccaagtcatcacctcatgaagtgaagtttcaaatgcagaggaaatccgaaggaaactag

SEQ ID NO: 296002 - DNA, 1038 bp, Artificial Sequence
  derived and/or modified sequence
atgcaatctcctcagaagaccactctgatcctgcccactcagcaggtccgccgtagttcacggatcaaaccgcctgggccaaccgccgtgccaaagagaagttctagtgttaagaatatcaccccccgaaaaaaagggcctaactccggcaaaaaggaaaagcccctgcctgtgatctgctcaacaagtgccgcttcactgaagtccctgacgagggataggggcatgctctacaaggatgtcgccagtgggccttgcaagattgtcatgtccaccgtgtgcgtgtacgttaataagcacggcaactttggccctcacctagaccccaaacggatccagcaactgcctgaccatttcggcccagggcctgtgaatgtcgtgctgaggagaatcgtccaggcttgcgtggactgtgccctagagaccaaaaccgtttttgggtatttgaagcctgacaaccgtggaggcgaggtgattaccgcctcatttgatggggaaacccacagcattcagctcccaccagtcaacagtgcgagtttcgcactgagatttctcgagaacttttgtcattccttgcagtgtgataatctgttgtcgtcccagccattctccagttctcgcggtcatacccattcaagtgccgaacacgacaaaaaccaaagtgcgaaagaggatgtgacagagagacagtctactaagcggagcccgcaacagaccgtcccctacgtggtacctctcagccctaagttgcctaagacaaaagaatacgcatcggagggcgaacccctctttgccggagggtcggccattcctaaagaagaaaacctgagtgaagattccaaatcgtcctctcttaattctggcaattacctgaatccggcttgccggaatccgatgtatattcatacgtctgtctcacaggacttcagtcgctctgttccgggaacgaccagctcgcccttggtgggagacatatcgcccaagtccagtccacacgaagtcaagtttcagatgcagcgtaaaagtgagggtaactag

SEQ ID NO: 296003 - DNA, 378 bp, Artificial Sequence
  derived and/or modified sequence
taagcaaaagaagatgtcacggagcggcaatccactaagaggtcaccacagcagaccgtcccctatgtggtgcccctatctcccaagcttcctaagactaaggagtacgccagcgaaggggagcctctgtttgccggtggatcagcgatccccaaagaagagaacctgtccgaggattcgaaatcatcctccttgaattctggcaactaccttaatcccgcttgcagaaacccaatgtatatccatacaagcgtatcccaggacttctcaaggagcgttcccggtactacatcgagtcccctcgtgggcgacatctctcccaaatcaagcccccacgaagtgaaattccagatgcagaggaaaagcgagggcaattag

SEQ ID NO: 296004 - DNA, 1734 bp, Artificial Sequence
  derived and/or modified sequence
atgggccagacagtgaatgaggattctatggacgtcaaaaaggagaaccaagagaagacacctcagtcccaaatcccacctgttaatgacttcaaggtgggaatgaaactggaagccagagacccacggaatgctacgtccgtctgtatcgctaccgtcatcggaataactggggctcggctgagactgaggctggacgggagcgacaatagaaacgatttttggcgcttagttgattcgccagatatccagcctgttggcacttgcgaaaaagaaggggatctcctgcagccaccccttggataccagatgaacacaagttcctggccaatgtttcttttgaagacgctgaacggaagcgagatggcatccgccaccctttttaaaaaggaaccacctaaaccccctctcaacaatttcaaggtgggtatgaaattagaggccatcgataaaaagaacccctacctcatttgccctgcaacaatcggggacgtaaagggggatgaggtccacatcacttttgacggatggtcaggcgcatttgactattggtgcaaatacgacagtcgggacatcttcccagctgggtggtgtcggttgactggagacgtccttcagccacccggtacatctgtgccaatcgtgaagaatatcgcaaagaccgagagctcccctagcgaggcgtcccaacatagcatgcagtccccccaaaaaaccaccctcatcctgccgacgcagcaggtacggagatcctcgcggatcaagcctccaggcccaaccgcggtccccaaacgatcgtcttcagtcaaaaatattacaccacgcaaaaagggacctaattccggcaagaaggagaagcctctccctgtgatatgctcgacaagcgcggcaagtctgaagtctctgacacgtgatcggggtatgctgtacaaggacgtggcgagcggcccttgcaaaatcgtaatgtcaacagtgtgtgtgtatgtgaacaagcacggcaactttgggcctcatctggacccaaagcgcatccagcagctccctgaccactttggccctggccctgtgaatgtggtcttgcgccgaattgtgcaggcatgtgtggattgtgcactcgaaaccaagactgtctttgggtaccttaagccagataatcggggaggtgaagtcattacggccagtttcgacggtgaaacccacagtattcaactcccacccgtaaacagcgcctcttttgctcttaggtttctggagaatttctgccacagtttgcagtgtgacaatctgctcagttcccagccttttagtagctcacggggacacactcacagctcggccgaacacgacaaaaaccaatctgcaaaggaggatgtaaccgaaaggcaatctactaaacgcagcccacagcagactgttccatatgtagtgccactgtctcccaagttgcctaagactaaggaatatgccagtgagggagagcccctgtttgctggagggtccgctattcctaaagaggagaatctttcagaggactctaaatccagcagcctgaacagcggcaattatctcaaccccgcttgccggaaccccatgtatatccacaccagtgtgtcacaagactttagcagaagtgtcccgggaacaacatcttcccccttggtgggagacatatctcccaagtcttcacctcacgaggttaaatttcaaatgcagagaaaaagcgagggtaattag

SEQ ID NO: 296005 - DNA, 1514 bp, Artificial Sequence
  derived and/or modified sequence
gctagaaattcaggcttgctcaggcaacatgggctttgttgacttgctttctccagaaaggcaattttattcctggtaaggagcaaggctatcctatcatttggaacctaaatcaccttaacggtaaaaacagcaacaacttgtttctctggaatattgataaagttcctattgtaaagaatatagcaaaaacagagtcttctccttccgaagcaagccagcattcaatgcagtctccacagaaaactactctaatattaccaacacagcaggtcaggagatcaagtcgaattaaaccacctggacctactgcagtccccaaaaggagcagttctgttaaaaatatcacaccaaggaaaaaaggtccaaactcaggaaaaaaggaaaaacctttgcccgtgatatgttctacatctgcagcttctctaaaatcgctgaccagagaccgtggcatgttatataaagatgtcgcttctgggccatgtaaaatagtgatgtctacagtctgtgtctatgtaaacaaacatggaaactttggccctcatctggatcccaagagaatccagcagctgcctgaccacttcggcccgggcccggtgaatgtggtgcttcgccggattgtgcaggcctgtgtggattgtgcccttgaaactaaaactgtttttggatacctgaagccagataatcgtggaggagaagtgataactgcctcctttgatggggaaactcattccatccagctccctccagtgaacagtgcatcatttgctcttcgctttcttgagaacttctgccacagtctgcagtgtgataaccttttgagtagccagccttttagttcttccaggggtcatactcacagctctgcagagcatgataaaaatcagtcagcaaaagaagatgtaacagaaaggcaaagcaccaaacgatctcctcagcaaactgtaccatatgttgttcctctctctcctaagctccccaaaacaaaggagtatgcgtctgaaggagaaccattgtttgctgggggaagtgccattcccaaagaggagaatctttcagaagattctaagagctcatcactaaattcaggaaattatttgaatcctgcctgtagaaatcctatgtatattcatacttcagtctcccaggatttttctcgaagtgtgccaggcaccacaagttcaccactagttggggacatatcccccaagagcagtccccatgaagttaaattccaaatgcagaggaaaagtgaaggaaattgatgggaaggctctgttcctactcaagagtgatgtgatgatgaagtatatggggctgaagctggggccagcattaaagctgtgttactacattgaaaagcttaaagaaggaaaatacagttaaaaaaatgtgtaagtttagattggacataattctcaggtgtactgttaacattttaatttaaaagtatttctcttagcagtttttgttttgtagacagttcccataaaaatattttatcagaattgcag

SEQ ID NO: 296006 - DNA, 2435 bp, Artificial Sequence
  derived and/or modified sequence
cagcaaaagaagatgtaacagaaaggcaaagcaccaaacgatctcctcagcaaactgtaccatatgttgttcctctctctcctaagctccccaaaacaaaggagtatgcgtctgaaggagaaccattgtttgctgggggaagtgccattcccaaagaggagaatctttcagaagattctaagagctcatcactaaattcaggaaattatttgaatcctgcctgtagaaatcctatgtatattcatacttcagtctcccaggatttttctcgaagtgtgccaggcaccacaagttcaccactagttggggacatatcccccaagagcagtccccatgaagttaaattccaaatgcagaggaaaagtgaaggaaattgatgggaaggctctgttcctactcaagagtgatgtgatgatgaagtatatggggctgaagctggggccagcattaaagctgtgttactacattgaaaagcttaaagaaggaaaatacagttaaaaaaatgtgtaagtttagattggacataattctcaggtgtactgttaacattttaatttaaaagtatttctcttagcagtttttgttttgtagacagttcccataaaaatattttatcagaattgcagaactgtagtaacagttcagtcaactttgtttttttcctggagtcaccaaccagctttgggagacacagccgccactcccccagtctacttctttaaaaagcatttaacaggttagtattggcatattcaaattggcagttctttatgtctttttaaattttcattgtacagtttacaaatatacttaatgtagttaacagagaaaaacctttgattttggttaacctttatatctagaaccaaaacagctaaatcccaaaggggaaaatatcagggattgacaacttctataattaaatccatgagaatttttcctcactagagaatttaaaggtgcacctgtagatatcatcttttctcagatattttgtgtgatactctgtggtgttctgttcatgttctatcagtatatctagaaagggaatagccatataaattattttccttttattatttctctgtatgttgtatttgatcatatttaaaggaaaaaagcaagcttataagctttcatgaagtgttcttaccagtttttgataaattttttaaattataggatagaattgtcattttatgcaggagatatttatactacgagggttgtttggatggagtcagattaaattttttcagtgaaattcctattattttaaaactttccatattttcactacgcttggacatttaactaggcattcttttcttacatctctatatgaagatacctgtgtccaaaatttttgaagatatatattgtatgtgtttattcttcatatggtactttaccatatttatatattgttttatacctgtaggtttacacacaagtaaatcttttttttcttgaatttaatctggcactttgcactgccacagaggtgacgatgaactatgtatatagttagatgttttgatttcgtaaaaaatatatgtccatcgtttgctatcaccagtacctctcagcttactcttcaggggatatgaaacaatctgtagattggtttccatacagggaagttctctgtcctatgcaatgtttctaattaatttgcttagttctgagccatttattctgctacactttgaaagatatattagttctgacttattgtttggggctttattttatttttatttttttgagatggagtttcactcttgttgcccaggctggagtgcaatagctcgatctcggctcactgcaacctcgcctccctggttcaagcaattctcctgcctcagcgattacaggaatgcaccaccacgcccagctaattttgtagagatggggtttctccatgttggtcaggctggtctcaaactcctgacctcaggtgatccgcccacctcggccttgcaaaatgctgggattacaggcatgagccaccatgcccagccatgtttggggctttattttataagttagaactttgaagaggaaatggtgctatatgtttattgttattactttgtgtaactttgatgtaatgtttataagctatgagaatcagttataaaagtattagccatttgttgtaaatgccaataaaatattcaccaggggcaagaatgtacattttctttttagaaaaccaaatgtactttagacatgaatgcaactatttaaagaatagcttcatttatgttattccttacatgtcataagattcttacttaaacttggtcttctttcaagttgtttgtatgaagatgctgtacccacttgaacagtcctcaggtgtttacataaatactatgttttacagttttcatattttaaaatattaataaagttaatcgcaacgattc

SEQ ID NO: 296007 - DNA, 1957 bp, Artificial Sequence
  derived and/or modified sequence
ggcttctcaaacatggcggcggcggtgtgaagctcggtgccggctcgcgcgatcggtgggacagaatttcgttgttttcaccgacgagactggaggaaacaacaccaaatagggataccatgggacaaacagtgaatgaagattccatggatgtcaagaaggagaatcaagagaaaactcctcagtctcagattccacctgtgaatgatttcaaagttggtatgaaattggaagcccgtgaccctcgcaatgccacttcagtatgtattgctacggttattggaattactggggccaggttacggttacgactggatggtagtgacaacagaaatgatttttggaggcttgtcgattccccagacatacaacctgttgggacatgtgaaaaggaaggagacttacttcaacctccactagggtaccagatgaatacatcctcctggccgatgttcctcttaaagacactaaatgggtctgaaatggcatctgccacattatttaagaaggaaccaccaaagcccccactaaataattttaaagtggggatgaaactggaagctattgacaaaaagaacccgtatctcatctgtcctgcgaccattggagatgttaaaggggatgaagttcatatcacatttgatggctggagtggagcttttgattactggtgcaagtatgattctcgagatattttcccagctgggtggtgtcgcctgacaggagatgtattacaacccccaggaactagtgttcctattgtaaagaatatagcaaaaacagagtcttctccttccgaagcaagccagcattcaatgcagtctccacagaaaactactctaatattaccaacacagcaggtcaggagatcaagtcgaattaaaccacctggacctactgcagtccccaaaaggagcagttctgttaaaaatatcacaccaaggaaaaaaggtccaaactcaggaaaaaaggaaaaacctttgcccgtgatatgttctacatctgcagcttctctaaaatcgctgaccagagaccgtggcatgttatataaagatgtcgcttctgggccatgtaaaatagtgatgtctacagtctgtgtctatgtaaacaaacatggaaactttggccctcatctggatcccaagagaatccagcagctgcctgaccacttcggcccgggcccggtgaatgtggtgcttcgccggattgtgcaggcctgtgtggattgtgcccttgaaactaaaactgtttttggatacctgaagccagataatcgtggaggagaagtgataactgcctcctttgatggggaaactcattccatccagctccctccagtgaacagtgcatcatttgctcttcgctttcttgagaacttctgccacagtctgcagtgtgataaccttttgagtagccagccttttagttcttccaggggtcatactcacagctctgcagagcatgataaaaatcagtcagcaaaagaagatgtaacagaaaggcaaagcaccaaacgatctcctcagcaaactgtaccatatgttgttcctctctctcctaagctccccaaaacaaaggagtatgcgtctgaaggagaaccattgtttgctgggggaagtgccattcccaaagaggagaatctttcagaagattctaagagctcatcactaaattcaggaaattatttgaatcctgcctgtagaaatcctatgtatattcatacttcagtctcccaggatttttctcgaagtgtgccaggcaccacaagttcaccactagttggggacatatcccccaagagcagtccccatgaagttaaattccaaatgcagaggaaaagtgaaggaaattgatgggaaggctctgttcctactcaagagtgatgtgatgatgaagtatatggggctgaagctggggccagcattaaagctgtgttactacattgaaaagcttaaag

SEQ ID NO: 296008 - DNA, 1038 bp, Artificial Sequence
  derived and/or modified sequence
atgcagagcccccagaagaccaccctgatcctgcccacccagcaggtgagaagaagcagcagaatcaagccccccggccccaccgccgtgcccaagagaagcagcagcgtgaagaacatcacccccagaaagaagggccccaacagcggcaagaaggagaagcccctgcccgtgatctgcagcaccagcgccgccagcctgaagagcctgaccagagacagaggcatgctgtacaaggacgtggccagcggcccctgcaagatcgtgatgagcaccgtgtgcgtgtacgtgaacaagcacggcaacttcggcccccacctggaccccaagagaatccagcagctgcccgaccacttcggccccggccccgtgaacgtggtgctgagaagaatcgtgcaggcctgcgtggactgcgccctggagaccaagaccgtgttcggctacctgaagcccgacaacagaggcggcgaggtgatcaccgccagcttcgacggcgagacccacagcatccagctgccccccgtgaacagcgccagcttcgccctgagattcctggagaacttctgccacagcctgcagtgcgacaacctgctgagcagccagcccttcagcagcagcagaggccacacccacagcagcgccgagcacgacaagaaccagagcgccaaggaggacgtgaccgagagacagagcaccaagagaagcccccagcagaccgtgccctacgtggtgcccctgagccccaagctgcccaagaccaaggagtacgccagcgagggcgagcccctgttcgccggcggcagcgccatccccaaggaggagaacctgagcgaggacagcaagagcagcagcctgaacagcggcaactacctgaaccccgcctgcagaaaccccatgtacatccacaccagcgtgagccaggacttcagcagaagcgtgcccggcaccaccagcagccccctggtgggcgacatcagccccaagagcagcccccacgaggtgaagttccagatgcagagaaagagcgagggcaactag

SEQ ID NO: 296009 - DNA, 378 bp, Artificial Sequence
  derived and/or modified sequence
tgagccaaggaggacgtgaccgagagacagagcaccaagagaagcccccagcagaccgtgccctacgtggtgcccctgagccccaagctgcccaagaccaaggagtacgccagcgagggcgagcccctgttcgccggcggcagcgccatccccaaggaggagaacctgagcgaggacagcaagagcagcagcctgaacagcggcaactacctgaaccccgcctgcagaaaccccatgtacatccacaccagcgtgagccaggacttcagcagaagcgtgcccggcaccaccagcagccccctggtgggcgacatcagccccaagagcagcccccacgaggtgaagttccagatgcagagaaagagcgagggcaactag

SEQ ID NO: 296010 - DNA, 1734 bp, Artificial Sequence
  derived and/or modified sequence
atgggccagaccgtgaacgaggacagcatggacgtgaagaaggagaaccaggagaagaccccccagagccagatcccccccgtgaacgacttcaaggtgggcatgaagctggaggccagagaccccagaaacgccaccagcgtgtgcatcgccaccgtgatcggcatcaccggcgccagactgagactgagactggacggcagcgacaacagaaacgacttctggagactggtggacagccccgacatccagcccgtgggcacctgcgagaaggagggcgacctgctgcagccccccctgggctaccagatgaacaccagcagctggcccatgttcctgctgaagaccctgaacggcagcgagatggccagcgccaccctgttcaagaaggagccccccaagccccccctgaacaacttcaaggtgggcatgaagctggaggccatcgacaagaagaacccctacctgatctgccccgccaccatcggcgacgtgaagggcgacgaggtgcacatcaccttcgacggctggagcggcgccttcgactactggtgcaagtacgacagcagagacatcttccccgccggctggtgcagactgaccggcgacgtgctgcagccccccggcaccagcgtgcccatcgtgaagaacatcgccaagaccgagagcagccccagcgaggccagccagcacagcatgcagagcccccagaagaccaccctgatcctgcccacccagcaggtgagaagaagcagcagaatcaagccccccggccccaccgccgtgcccaagagaagcagcagcgtgaagaacatcacccccagaaagaagggccccaacagcggcaagaaggagaagcccctgcccgtgatctgcagcaccagcgccgccagcctgaagagcctgaccagagacagaggcatgctgtacaaggacgtggccagcggcccctgcaagatcgtgatgagcaccgtgtgcgtgtacgtgaacaagcacggcaacttcggcccccacctggaccccaagagaatccagcagctgcccgaccacttcggccccggccccgtgaacgtggtgctgagaagaatcgtgcaggcctgcgtggactgcgccctggagaccaagaccgtgttcggctacctgaagcccgacaacagaggcggcgaggtgatcaccgccagcttcgacggcgagacccacagcatccagctgccccccgtgaacagcgccagcttcgccctgagattcctggagaacttctgccacagcctgcagtgcgacaacctgctgagcagccagcccttcagcagcagcagaggccacacccacagcagcgccgagcacgacaagaaccagagcgccaaggaggacgtgaccgagagacagagcaccaagagaagcccccagcagaccgtgccctacgtggtgcccctgagccccaagctgcccaagaccaaggagtacgccagcgagggcgagcccctgttcgccggcggcagcgccatccccaaggaggagaacctgagcgaggacagcaagagcagcagcctgaacagcggcaactacctgaaccccgcctgcagaaaccccatgtacatccacaccagcgtgagccaggacttcagcagaagcgtgcccggcaccaccagcagccccctggtgggcgacatcagccccaagagcagcccccacgaggtgaagttccagatgcagagaaagagcgagggcaactag

SEQ ID NO: 296011 - protein, 530 aa, Artificial Sequence
  derived and/or modified sequence
MDDLQSQNLSMDMTDSPPALANNRLENGMAQLITTEAWNINSTDLVKKALVTVPAPSILNPPAESQSGMALKVAATVLQPLCLGESPVVMPIHMQVEGSSAPELNPNGNATYVMTTQGPVQLPVVLEQHVFQHLNSPLVLPQEAPCSSSTIHNNLFQGAEDPEAQPQLLDLRIPSQPQEPTLPFEAVLQNLFPSQGTLGPPPCQPPPGYAPVPPQPFSSPLSPLVPPATLLVPYPVIVPLPVPVPIPIPIPMPQSSESKFSSSFPKPPSSFGLHPFKGTQTPLEKDELKPFDILQPKEYFQLSRHTVIKMGSENEALDLSMKSVPWLKAGEVSPPIFQEDAALDLSVAAHRKSEPPPETLYDSGASVDSSGHTVMEKLPSGMEISFAPATSHEAPAMMDSHISSSDAATEMLSQPNHPSGEVKAENNIEMVGESQAAKVIVSVEDAVPTIFCGKIKGLSGVSTKNFSFKREDSVLQGYDINSQGEESMGNAEPLRKPIKNRSIKLKKVNSQEIHMLPIKKQRLATFFPRK

SEQ ID NO: 296012 - DNA, 1593 bp, Artificial Sequence
  derived and/or modified sequence
atggacgatctccagagtcaaaacctttccatggacatgacggatagcccaccagcactggcgaacaaccgattagaaaacgggatggctcagcttataactactgaagcctggaatattaactctactgacctcgtgaagaaggctctcgttactgtccccgcgccctctatccttaatccacccgccgagagtcagtcgggcatggccctgaaagtagctgctacagtgctgcagcccctgtgtctcggtgagagcccagtcgttatgccaattcatatgcaggttgaaggcagctcagctccggagctgaatcctaacgggaatgctacttacgtgatgactacacaggggcccgtgcagctgccggttgtgctggaacaacacgtgttccaacacttaaacagcccgttagtgctcccacaggaagccccctgctcttcatctacaatacacaacaacctcttccagggggcggaagaccccgaggctcagcctcagctgcttgacctcaggatcccatctcagccccaggaacccactctgcccttcgaggccgtgctgcagaacctcttcccttcacagggcacgctgggaccaccaccatgccagcctccacctgggtacgctccagtgcccccacagcctttcagctccccattatctccactagttccccctgccactctgctggtgccctaccccgtgatcgttcccctccccgtaccagtgcccatccccatacctatccctatgccgcagagctccgaatccaagttttcctcctcctttcctaagccccccagttctttcggcctccacccatttaaaggcacccaaacccctttggaaaaggacgaactgaagccttttgacatcttgcagcccaaggagtattttcaactgagtcggcacacagtgataaagatggggtctgagaacgaagccctggacctctcaatgaagtctgtgccctggcttaaagcaggagaagtgtctcccccaattttccaggaggacgccgcacttgatttatcagtcgcagcgcacaggaagtctgaacctcctcctgagaccctgtacgattcgggggctagcgtggattctagcggtcataccgtgatggaaaagctgcccagtggcatggaaatcagttttgcccccgccacaagccacgaggctccagcaatgatggatagccacatttccagctcagacgccgccactgagatgctgtcacaaccaaaccatcctagtggggaggtaaaagccgaaaacaacatcgagatggtgggggagtctcaggcagccaaagtgatagtttccgtcgaggatgcagtccccacaattttctgcgggaagattaagggcctgtctggggtgtctacaaagaacttcagctttaagagagaggatagtgtgctccaggggtacgatattaactcccaaggggaagagagcatgggcaatgcagaacctctccgcaaacccatcaagaatcggtcaattaaattaaagaaggttaactcgcaagaaattcatatgctgcctatcaagaagcagaggcttgcgaccttctttccaaggaagtag

SEQ ID NO: 296013 - DNA, 1593 bp, Artificial Sequence
  derived and/or modified sequence
atggacgatctccaaagccagaacctgtcaatggatatgaccgattccccaccagctctggctaataaccgcctcgaaaatgggatggcccagttaattacaaccgaagcatggaatattaactcaacagacctggttaaaaaggcactcgtgactgtaccggcaccatcaatcctcaatccgccagctgagagtcagtctggaatggccctgaaggtggccgcgactgtgctacaaccgctctgcctgggtgaatctcctgtggtcatgcccattcacatgcaggtggaaggctctagcgcgccggaacttaatcctaatggtaatgcaacctacgtcatgactacgcagggtcctgtccaactgccggtagtgctcgagcagcatgtctttcaacaccttaacagtccgctggtcctgcctcaggaggccccttgctcatccagcaccatccacaataatctgttccagggggccgaagaccctgaagcacaaccacaacttctcgatctcagaattcccagccagcctcaggaaccaactctccccttcgaggccgtgctacagaacctgttcccaagccagggtacactggggcccccgccctgtcagccacctcctggttatgcgcctgtccctcctcagcctttctcttctccgctctcacccctggtgcccccagccaccctgctggtgccgtacccagtgattgtcccattgcccgtgccggttccgattcctatccctattcccatgcctcagagtagcgaaagcaagttctccagctccttccccaaacctccaagctctttcggtctgcaccctttcaagggcactcagactccacttgagaaagatgagctcaaaccatttgacattctgcagcccaaagaatactttcaactgtctagacatacagtaataaagatgggctctgaaaacgaggcactggacttgtccatgaagtccgtaccgtggttaaaggccggggaggtcagtcctcccattttccaagaggacgcagcgctcgacctgtccgtcgctgctcatcggaagagtgagccccctcctgaaaccctttacgattcaggcgcgtcagttgacagctccggccacaccgttatggagaaactgccatcaggtatggaaatctctttcgcccctgcgacaagccacgaggccccagcgatgatggattcccatataagctcttcagacgctgccacagaaatgctcagtcagcctaaccacccctctggggaagtcaaggctgaaaacaatattgaaatggtgggcgaatctcaagccgctaaagtaattgtttcagtcgaggacgccgtgcccaccattttctgcggcaaaatcaagggcctgagtggcgtgtctactaaaaatttttcattcaagcgcgaggacagcgtgctgcaaggctacgacataaatagccaaggcgaagagagcatgggaaacgcagaacccttgcgaaagccaataaagaaccggagtatcaaactgaagaaagtgaactcacaggaaatacatatgctccctattaaaaagcagaggcttgctacctttttcccccgcaaatag

SEQ ID NO: 296014 - DNA, 1593 bp, Artificial Sequence
  derived and/or modified sequence
atggacgatcttcagtcccagaatttgagcatggatatgaccgacagccctccggcactcgcaaacaaccggcttgaaaatggcatggcacagctgatcaccactgaagcttggaatatcaactccacagacctcgtaaagaaggccctggtgacagtccctgcccctagtattcttaacccacctgccgaaagtcagagcggcatggccctgaaggttgctgccacagtgctccagcccctctgcttgggggagtccccagtcgtgatgcctattcacatgcaagtggagggctcgtctgcgcccgaactgaacccaaatggtaatgccacctatgttatgacaacccagggacctgtgcaattgccagtcgtgctggaacagcacgtcttccagcatctaaattcgccacttgtcttgccacaggaagcaccgtgctctagctcgactattcataacaacctctttcaaggagctgaggacccagaagcgcagcctcagctactggaccttagaatcccaagccagcctcaggagcctacgttgcccttcgaagctgtcctgcagaacctgtttccaagccaaggcacactgggtccgccaccttgccagcctcctcctggctacgctcctgtacccccacaacccttctcctcacccctatcccccctggtgccaccggcgaccctcctggtcccctaccctgtgatcgtgccactgcccgtgcccgtccctatcccgatcccaatccctatgccgcagtcatccgaatctaagttctctagttcatttcccaaacccccatccagttttggtctacacccttttaaaggtacccaaaccccgctagagaaggacgagctaaagccattcgatattctccaacccaaggagtacttccaactctccaggcatacagttattaaaatgggctccgaaaatgaggctcttgatttgtctatgaagtccgtgccatggttgaaggccggcgaggtatcaccccctattttccaggaagacgctgcgcttgacctctccgtggccgctcaccgcaagagcgagccaccacccgaaacgctgtacgactccggcgcctccgtcgacagtagcggtcatacagttatggagaagttgccaagcgggatggagatctccttcgcacctgctacgagccacgaggcaccagcaatgatggacagccacatatcttccagcgacgctgctacagagatgctctctcagcccaaccatcccagtggagaggtcaaagctgagaacaatatcgagatggtgggagagagccaggcggctaaagtgatcgtctcagtggaggatgccgtccctacaattttctgcggaaaaataaaagggctgtccggcgtctcaacaaagaactttagcttcaaaagggaggattctgtgctccaggggtatgatataaatagccaaggagaggagtctatgggcaatgccgagccattgcggaaaccaataaaaaataggtctataaaactcaagaaggtcaactcacaggaaattcacatgctgcctataaaaaaacagagattagccaccttctttcctcggaagtag

SEQ ID NO: 296015 - DNA, 1593 bp, Artificial Sequence
  derived and/or modified sequence
atggatgatctccagagccagaatttgtccatggatatgactgattctccaccggccctggctaacaacagactggagaacggtatggctcagttgatcaccaccgaggcctggaacattaattctaccgacctggtgaagaaggcgctggtaacagtgcctgcaccctcaattcttaaccccccggccgagagtcagagcggaatggcactcaaggttgccgcgacagtcttacagccgctgtgccttggtgagagcccagtcgtgatgccgatacatatgcaggtggagggaagctctgcacccgagctcaatccaaatggcaacgccacgtatgtcatgacaacacaaggacccgtgcagctgcccgtggtgctagagcagcacgtattccaacacttgaattcccctctggtgctaccgcaggaggcaccctgctcgtctagtacgatacataacaatctgttccagggggctgaggatcctgaagcacagccgcagctgcttgatctccgaatcccttcgcagccccaggaaccaacactgccatttgaggcagtgttgcagaatctctttccaagtcaggggactctcggacccccaccttgccaaccccctcccggctatgcacctgtgcccccacagccattctcctctccactgagccctctggttcctcccgccactctgctggttccgtatcctgtcatcgtccccttacctgtccctgttcccatccctattcccatcccaatgcctcagtcatccgagtctaaattctcaagctcttttcctaaaccgcctagctcattcggcctgcatccctttaagggaactcagaccccattggaaaaagacgagcttaaacctttcgatattttgcagcccaaagaatacttccaactttctcgtcacactgtaatcaagatgggctcggagaacgaagccctggatctatctatgaagagcgtcccttggctgaaggcaggcgaagtgtctccccctatcttccaggaagacgctgccctggatctcagtgtggccgcccaccggaagagtgagcccccacccgaaaccctctacgacagcggggcttccgtggattcatcaggacataccgtgatggagaagctgccatcgggaatggagatcagctttgctccagcaacctcacatgaggcgcctgcgatgatggactcacacatttcatcttctgatgctgccaccgagatgcttagccagcccaaccatcctagcggggaagtcaaagcagagaacaacatagagatggtgggcgaaagtcaagcagccaaggtcatcgtatcggtggaggatgcagtccccaccatattttgcgggaagatcaaaggtttaagcggcgtctctactaaaaatttctccttcaagagggaggatagtgttctacagggttatgatatcaattcacagggtgaagagagtatgggaaacgcagaaccgctgagaaaaccgatcaaaaacagaagtatcaaattgaaaaaagtgaactcacaggagatacacatgttgccaattaaaaagcaaaggctcgccacattcttcccacgtaaatag

SEQ ID NO: 296016 - DNA, 1593 bp, Artificial Sequence
  derived and/or modified sequence
atggatgacctgcagagccagaacctgtccatggacatgacagacagccccccagccctggccaacaaccggctggagaatggcatggcccagctgatcaccacagaggcctggaacatcaacagcacagacctggtgaagaaggccctggtgacagtgcctgcccccagcatcctgaaccccccagctgagagccagagcggcatggccctgaaggtggccgccaccgtgctgcagcccctgtgcctgggggagagccctgtggtgatgcccatccacatgcaggtggagggcagcagcgcccctgagctgaaccccaatggaaatgccacctacgtgatgaccacccagggccctgtgcagctgcctgtggtgctggagcagcacgtgttccagcacctgaacagccccctggtgctgccccaggaggccccctgcagcagcagcaccatccacaacaacctcttccagggcgctgaggaccctgaggcccagccccagctgctggacctgcgcatccccagccagccccaggagcccaccctgccctttgaggccgtgctgcagaacctcttccccagccagggcaccctgggccccccaccctgccagcccccacctggctacgcccctgtgcccccccagcccttcagcagccccctgagccccctggtgcccccagccaccctgctggtgccctaccctgtgattgtgcccctgcctgtgcctgtgcccatccccatccccatccccatgccccagagcagcgagagcaagttcagcagcagcttccccaagccacccagcagctttggcctgcaccccttcaagggcacccagacccccctggagaaggatgagctgaagccctttgacatcctgcagcccaaggagtacttccagctgagccgccacacagtcatcaagatgggctctgaaaatgaggccctggacctgtccatgaagtctgtgccctggctgaaggccggggaggtgagcccccccatcttccaggaggatgctgccctggacctgtctgtggccgcccacaggaagtctgagcccccacctgagaccctgtatgattctggggcctctgtggacagcagcggccacacagtgatggagaagctgcccagcggcatggagatcagctttgccccagccaccagccatgaggccccagccatgatggacagccacatcagcagcagtgatgctgccacagagatgctgagccagcccaaccaccccagcggggaggtgaaggccgagaacaacatcgagatggtgggggagagccaggccgccaaggtgattgtgtctgtggaggatgctgtgcccaccatcttctgtgggaagatcaagggcctgtctggagtgtccaccaagaacttctccttcaagagagaagattctgtgctgcagggctatgacatcaacagccagggcgaggagagcatgggaaatgctgagcccctgaggaagcccatcaagaacagaagcatcaagctgaagaaggtgaacagccaggagatccacatgctgcccatcaagaagcagaggctggccaccttcttccccaggaagtag

SEQ ID NO: 296017 - DNA, 1593 bp, Artificial Sequence
  derived and/or modified sequence
atggacgacctgcagagccagaacctgagcatggacatgaccgacagtcccccagccctggctaataatcggctggagaatggaatggcccaactgattactaccgaggcctggaatattaacagcacggacctggtgaagaaggccctggtgacggtgcctgctccaagcatcctgaaccccccagctgagagtcagtcaggaatggccctgaaggtggctgctaccgtcctgcagccactctgtctaggtgagtctcccgtcgtgatgcccatccacatgcaggtggagggttcctccgcccccgagctaaacccaaacggaaatgcaacttatgtgatgactacccagggccccgtccaacttcccgtcgtgctggagcagcacgtctttcagcatctcaactcccccctggttcttccccaagaagctccctgttcttcttccactatccataataatctgtttcagggcgcagaagaccctgaagcccagccccaactcctggacctcaggatccccagccaaccacaagaacctactttgccatttgaggctgtgttgcagaaccttttccccagtcagggaaccctcgggcctccaccgtgtcagccacccccgggatacgcgccagtacctccacaaccgttcagcagtccactttctccattggtgcctcccgccacactattagtaccataccctgttattgtgccgctgccggtccccgtccccatcccaatccccatccctatgccacagagctctgagagcaagttctcatcatcatttccgaagcccccaagttccttcggcctccatccctttaaaggcacacagactcccctggaaaaagacgagctgaaacctttcgacatactgcagcctaaggagtatttccagctgtctaggcacacagtgatcaaaatgggttcggagaatgaagcactggatcttagcatgaagagtgtgccctggctgaaggctggggaggtctctccgcccattttccaggaggacgcagcactagatctttctgtcgccgcccacagaaaaagcgagcctccaccagaaactctgtatgattccggagcgagcgtcgactcgtccggtcatacggtcatggagaaactgccctcaggaatggagataagcttcgctccagccacatcccacgaggcaccagctatgatggatagccatatttcatcctccgatgcggccactgaaatgctgtcacagcccaaccacccatcaggagaggtgaaggcggagaataatatcgagatggttggagagtctcaggccgccaaagtgatcgtgtccgtagaggatgctgtgccgactatattttgcggcaagattaaaggtctctctggagtgagcactaagaacttttcattcaaacgcgaagacagtgtgctgcagggctacgacattaattcccagggagaggagtcaatgggcaatgcagagcctctgcggaagcccatcaaaaatcgctcaatcaagctgaagaaggtgaactcgcaagaaatccatatgctgcctattaagaaacagaggcttgccacgttcttcccgcggaagtag

SEQ ID NO: 296018 - DNA, 1593 bp, Artificial Sequence
  derived and/or modified sequence
atggacgacctgcagagccagaacctgagcatggacatgaccgactcaccacccgcgttggctaataacaggttagagaatggcatggcacaactcatcacgaccgaagcctggaatataaatagtacagacctggtgaagaaggctctggtgacggtccccgcaccttccattctgaatccccctgccgagagtcagagcggcatggccctgaaggttgcagctacggtgctacagcccttgtgcttaggagagtctcctgtggtgatgcctatccacatgcaggtggagggtagctccgcccccgaattgaatcccaacggcaacgctacgtacgttatgactacacaaggaccggtccagctaccagtcgtcctggagcaacacgtgttccagcacctgaacagccccttagtgctgccgcaggaggccccctgcagcagttcaacaatccacaacaatctctttcagggtgctgaggatcctgaagcccagcctcaactgctggatttacgcatcccctcccagcctcaagaacccacactgcctttcgaggcagtcctgcaaaacctctttccttcacagggtaccctgggtccaccgccatgtcaaccccctcctggttacgcgcctgtgcctccccaaccatttagtagcccactgtcacccttagtccctccggctactctcttagttccctaccctgtcatcgttccactgcctgtgcctgtccccatccctattccaatcccgatgccacagtctagcgaaagtaagttcagctccagcttcccaaaaccgccttcctctttcgggctccacccctttaagggcacccagacgccactagagaaagatgagctgaagccctttgatattcttcagccaaaggagtacttccaactgagccggcacacagtgatcaagatgggaagcgagaatgaagcactagatctgtcaatgaagtccgtcccttggctaaaggcaggggaagtgagcccacctattttccaggaagacgccgcgctagacctgagtgttgccgcccaccggaagagtgaaccaccacccgagactctctacgatagtggcgcttccgttgattcctcgggccatacagtaatggaaaaactcccgtctggcatggaaatctcattcgcaccagccacctcacacgaagccccagctatgatggacagtcacatttcttcctctgacgcagctacagagatgctatcccagccaaatcacccatctggggaggtgaaagccgagaataacattgagatggtgggcgagtcccaggctgccaaagtgatagtttccgtggaggatgcggtaccaactatattctgcggtaaaataaagggcttgtccggcgtgagcaccaagaatttctcctttaagcgagaagatagcgtcctgcagggatatgacatcaactcccaaggcgaagagagcatggggaacgcagaaccactgcgaaagcccatcaagaatagaagtatcaaactcaaaaaggttaactctcaggaaatacacatgctccccattaaaaagcagaggctcgccaccttcttcccccggaagtag

SEQ ID NO: 296019 - DNA, 1593 bp, Artificial Sequence
  derived and/or modified sequence
atggacgacctgcagagccagaacctgagcatggacatgaccgacagcccgccagcccttgcaaacaataggcttgaaaacggaatggcccaactgataactacagaagcgtggaacattaactccactgacctggtgaagaaggcgctggtgactgtccccgcacccagcattctcaatccaccagccgaatcacagtccggtatggcactgaaagtggccgcaacagttttacagcctctgtgcttgggcgaatctccagtagtcatgccaatccacatgcaagtggagggatctagcgcccctgaactcaatcctaatgggaatgctacttacgtaatgacgactcaaggcccagtccagctgcccgttgtactcgaacagcacgtgttccaacacttgaactcacctctggtgctgcctcaggaggccccatgcagcagcagcactatccataataatctgtttcagggggccgaggacccggaggcccagcctcaattgttagacttgcgaatcccgtctcagccacaggagcctacattaccgtttgaagccgttctgcagaaccttttccccagtcagggtacattagggccccctccttgccagccgccaccaggctacgctccagtcccaccacaaccatttagcagccccctgtctcccctggtgccccccgcaactctgttagtcccctatcctgttatcgtccccctgcccgtgcctgtgcccatccctattcccattccaatgccacagagctcagaatccaaattttccagctcgttcccaaaaccaccttccagctttggactccatccattcaagggcacccaaactccgctcgagaaagatgagctgaagccattcgatatcctgcagccgaaggagtattttcaattgtcccgccacacagtgatcaagatggggtctgagaacgaagcattggacctctccatgaagagcgttccttggctgaaggccggagaggtgagcccacctattttccaggaagacgccgccctggatctgtctgtagcagcccacagaaagagcgagcccccccccgagactctgtacgatagcggagcctccgtggattcctctggccatactgtgatggagaaacttcccagcggcatggaaattagcttcgctcctgcaaccagccacgaggctcccgctatgatggattcccacatatccagttcagacgctgctaccgaaatgctctctcagcctaatcaccctagcggggaggtgaaggctgagaataacatagaaatggtgggagagagtcaggccgccaaggtcattgtttctgtggaggacgctgtccctacaatcttctgcggaaaaatcaagggcctgtccggcgtgagcacaaaaaacttttccttcaaaagagaggattctgtactgcaggggtacgatattaattcccagggggaagagtccatgggtaacgctgaacctctaaggaagcccatcaagaaccgcagtatcaagcttaagaaggttaactcacaggaaattcacatgttgccaatcaaaaaacagaggctagctaccttctttcctcggaaatag

SEQ ID NO: 296020 - DNA, 1593 bp, Artificial Sequence
  derived and/or modified sequence
atggacgacctgcagagccagaacctgagcatggacatgaccgacagcccaccagcgctggcaaacaatagactcgagaacggaatggcacagctcatcactacggaagcttggaacatcaatagtacggatctggtgaagaaggcactggtgacagtacccgccccctctattctcaacccccctgctgaatctcagagcgggatggctctcaaagttgctgctacagtgctccaacctctctgcctgggagagagtccagttgttatgccaatccacatgcaggtggaagggtcatccgcgccagagcttaatcccaacggcaacgctacctatgtcatgactactcaaggtcccgttcagctgcctgttgtgttggagcagcacgtcttccaacaccttaactctccgctcgtgttaccccaggaggcaccgtgctccagctcaacgatccataacaatctcttccagggtgcagaggaccccgaagcccagccccagttgctggacctacgaattcccagccaacctcaggagcctacactccctttcgaggctgtgctccaaaaccttttcccctcgcagggcaccctggggcctccgccgtgtcaaccccctcctggatacgccccagtcccgccccagcccttcagcagccccctgagcccgctcgtgccacccgctacgcttctggtcccttaccctgtgattgtgcccttaccagtcccagtcccaattcctattcctattccgatgccccagagtagcgaaagtaagttctcgtcttctttccctaaacctccatccagtttcggattgcacccattcaagggtacccagactccactggaaaaggatgagctaaagccatttgatattcttcaacctaaagagtatttccagctgtctcggcatacagtgataaagatgggcagcgagaacgaagctcttgatttgtccatgaagtctgttccctggctcaaggcaggcgaggtttctccaccaatcttccaggaagacgccgccctggacctatccgtggccgcccacaggaagtctgaaccgccccctgagactctgtacgatagtggcgcgtcagtggattcaagcggacacacagtcatggaaaagctgcccagcggtatggagatatcatttgctccagcaaccagccacgaggccccagctatgatggactcacacatcagctccagcgacgcagctaccgaaatgctgtcgcagcctaatcaccctagcggcgaggtgaaagctgagaacaatatcgaaatggtcggcgaatcacaggcagccaaggttattgttagcgtggaagacgctgtgccgactattttttgtggaaaaatcaaggggctgagcggagtaagtaccaagaattttagctttaaaagagaagacagcgtattacagggatacgatataaatagtcagggagaggagtccatgggtaatgccgagcccctgagaaagcctataaaaaacagatcgattaagctgaaaaaggtgaacagccaggaaatacacatgctgccaatcaagaaacagcgcctggcaacattctttccccgcaagtag

SEQ ID NO: 296021 - DNA, 1593 bp, Artificial Sequence
  derived and/or modified sequence
atggatgacctgcagagtcagaacttatctatggatatgacggactctccacccgctctggccaataaccgactggagaacggtatggcccagttgattaccacagaagcttggaacatcaattccacggacctcgtcaagaaggccctcgttaccgtgccggcaccttctattcttaacccccctgctgaatcccagtccggaatggctctaaaggtggcagccacagtcctgcagccattatgcctgggggaaagtcctgtcgttatgccaattcatatgcaagtcgagggtagcagcgcccctgagcttaacccaaatggaaacgccacatacgtcatgaccactcaggggcctgtgcagctgcctgtggtactggaacagcacgtctttcagcatctaaatagtcccttggtactgccgcaggaagcaccctgttcttcctcaactatacacaacaacctctttcagggggcagaggacccagaggcccagccgcagcttctggacctccggataccaagccagccccaagagcctacactacccttcgaggccgttctgcagaacctgttcccttcacagggcaccctagggcctcctccatgccagccaccccctgggtacgctcccgttcctccgcagcctttttcaagtcctctgtccccccttgtgccccctgcgactttactggtcccctatcccgtgatagttcctctccccgtgcccgtgccaatccctatccccattccaatgcctcagtcctccgagagcaaattcagtagcagttttccgaaacccccttcatcattcggtcttcaccctttcaagggaacacaaactcctctagagaaggacgagctcaaaccctttgacatactgcaacctaaggagtatttccaactgagcagacatacggtgattaagatgggtagcgagaacgaggctttagacttatccatgaagagcgtgccttggttgaaggcaggtgaggtgagtccccctattttccaggaggatgctgcgctcgacctttcggtggccgcacaccgaaagagcgagccgccacctgagactctttatgactctggcgcatcagtggactccagcggccacacagtcatggagaagttaccttcagggatggaaatctcttttgcccctgcgacctcacacgaggcacctgctatgatggattcccacatttcttccagtgacgccgctacagagatgctctctcagcccaatcatccctctggggaggtgaaggccgagaataatatagagatggtaggtgagtctcaggccgctaaggtgatcgtgagcgtagaggacgcggtgcctaccattttctgtggcaaaatcaagggactgtcaggcgtctcaaccaaaaacttctcgttcaaacgggaggactccgttctgcagggttatgacatcaatagccagggcgaggagagcatgggcaacgccgagccactgcggaagccaattaaaaaccgtagtatcaaattaaagaaagttaactcacaagagatccacatgctgcctatcaagaagcagcgacttgccaccttttttcctcgaaagtag

SEQ ID NO: 296022 - DNA, 1593 bp, Artificial Sequence
  derived and/or modified sequence
atggatgacctgcagagccagaacctgagcatggatatgactgatagtccaccggctttggccaacaatcgcctggagaatggaatggcacagctgataaccaccgaggcatggaatattaatagcaccgacttggttaaaaaagctctggtaactgtccctgccccaagcatcctgaaccctccagccgagagccagagcggaatggcccttaaggtggcagctaccgttcttcaaccgctttgcctcggagagtcaccggtggtaatgccaattcacatgcaggttgaaggctcctcagctcccgagttgaatcccaatggcaatgcaacctacgttatgaccacgcagggacctgtgcagttgcctgttgttctggagcagcatgttttccagcacctcaattctcctcttgtcctgcctcaggaggccccatgtagctctagcacaatccacaacaatctttttcaaggcgctgaggaccctgaggcacagccacagctgctggacctgcggattccatctcagccccaggaacccacgctcccattcgaggcagtgctccagaatttattcccttctcagggaactctgggtccacccccatgccagccaccaccgggatatgctcccgttccgcctcagcccttcagttcccccctgtcccctctggtgcctccagcaaccctgctggtcccatatcctgtcatcgtaccattgccagtgccagtgccgattcccattcccattcctatgccccaaagtagcgagtcgaagtttagttccagttttccaaagcctccctcaagtttcggactacaccccttcaaaggaacccagacacctctagaaaaggacgaactgaagccatttgatattcttcagccaaaagagtacttccagttgtcccgtcatactgtgattaaaatggggtccgaaaacgaggcacttgatctatccatgaagtctgtgccctggctgaaggcaggtgaagtctcccccccaatcttccaggaagacgcggcactggatttgagcgtcgccgctcatcgcaagagcgaacctccccctgagaccctctatgactccggtgcatctgtggactcgagtgggcacaccgtcatggagaaattgccttccggcatggaaattagcttcgcgcctgccaccagtcatgaggcacctgctatgatggattcacacatttcctcttccgacgctgcaaccgagatgctgtctcaacctaatcatcccagcggagaggtgaaagcagagaataacattgagatggttggcgaatctcaggccgctaaggtgattgtttcagtcgaggatgcagttccaacaattttctgtggaaaaatcaagggcctttcgggggtgtcgaccaaaaacttctccttcaaaagggaggatagcgtgctgcagggatacgatattaacagtcagggtgaggagtcaatgggcaacgcagagcccctgcgtaagcctatcaaaaaccgctccatcaagttaaaaaaggtgaattctcaggaaatacacatgttgccgattaagaagcagcgccttgcaacctttttcccaaggaaatag

SEQ ID NO: 296023 - DNA, 1593 bp, Artificial Sequence
  derived and/or modified sequence
atggatgaccttcaaagccaaaatctctccatggacatgacggactccccccctgccttggctaataaccgcttagagaacggcatggcccagctcatcactacagaagcctggaacattaacagcaccgacctagtgaagaaggcactggtcaccgtgcctgccccatctatattaaatccacccgctgagtcgcaaagtggcatggctttaaaggttgcagcgactgttctacagcccctgtgcctgggggaatctccggtggtgatgccaattcacatgcaagtggagggcagttctgcacctgaacttaatcccaacggcaatgccacatatgtaatgacaacccaggggcctgtgcagttgcccgtggttctggaacagcacgtgttccagcacctcaactctccactcgtccttcctcaggaggcaccgtgttcatcctcaactatccacaataatctgttccaaggtgcagaggaccccgaagcccagcctcagctgcttgacctccgaatccctagtcagccccaggaacctacactacccttcgaagctgtattgcaaaatctgttccctagccagggtaccctgggtcccccaccttgccagccacctccagggtatgctcccgtccccccacagccctttagctcccccctgtcccccctcgtccccccagcgacactgctggtaccgtacccggtcatagtgcctctgccagtccctgtccccattccgattcccattcccatgccccagtcctcggagtccaaattcagttccagttttcctaaacctcccagttcctttggtcttcatccctttaagggcacacagacaccacttgagaaagacgagctaaagccctttgatatcttgcagcctaaagaatacttccaactcagtcgccataccgtgattaagatgggctctgagaatgaggcacttgatcttagtatgaagtctgtgccgtggctgaaggctggggaagtttctcccccaatcttccaggaggacgccgcactggatctgtcagtggctgctcaccggaagagcgaaccccctcctgaaactttgtacgacagcggcgcaagcgtcgactcgtccggtcacacagttatggaaaagctaccatctggaatggagatcagctttgccccagccaccagccacgaagccccagcgatgatggattctcacataagtagcagcgatgccgcaaccgaaatgctcagtcaacctaatcacccctcaggagaagttaaggccgagaacaacattgagatggttggagaatctcaggcagcaaaggttatcgtctcagtcgaggacgccgttcccaccatattttgcggaaaaatcaaagggctaagcggtgtgtcaaccaagaatttttcgttcaaaagagaggactcagttctacagggatatgacataaactcacagggggaggaatctatgggtaacgcagaacctctgcggaaaccgataaaaaatcgctcaataaagctcaagaaagtgaactcccaggaaattcacatgctgccgatcaagaaacaaagacttgcaaccttcttcccacggaagtag

SEQ ID NO: 296024 - DNA, 1593 bp, Artificial Sequence
  derived and/or modified sequence
atggacgatcttcagtcacagaacctctcaatggacatgacagactcgccacccgctttagccaacaataggcttgagaacggtatggcacagctgattaccacagaggcctggaacattaacagtactgatctggtgaagaaagctctcgtgaccgtgcccgctccaagcatcttgaatcccccagctgagtctcaatccggtatggcccttaaggttgcagcgaccgttctgcagcctctttgcctcggcgaatcgcccgtggtcatgcctattcacatgcaagtggagggttcttcggcaccagagctaaatccaaatgggaacgctacttatgtcatgacaactcagggcccagtgcaactgccagtcgttctcgagcagcacgtgtttcagcacttaaatagccccctcgtgctcccccaggaagcaccctgctccagcagcacgatccacaataatcttttccagggtgcagaagatccagaggcacagccacagttactggacttaagaatcccctcccagccccaagagcccactctgccgtttgaggccgtgctgcagaacctgttcccttctcagggcactcttggaccacctccatgtcaacctccgcctggatacgccccagtgccccctcagcccttttcaagtcccttgtctcccctggtgccaccagcaacgctgctggtgccttaccccgtgatcgtgccactaccagtccctgttccaattcctattccaatccccatgccccaaagtagcgagtccaaattctcttccagcttcccaaagccccctagcagcttcggcttacacccatttaagggcacccagacacctcttgagaaggatgagttaaaaccattcgatatacttcagcctaaagaatattttcaactgtctagacacactgtaattaaaatggggtcagagaacgaggccctggatctttctatgaaatctgtgccatggctaaaggccggagaagtcagcccccctattttccaggaggatgccgctctggacctctccgtggcagctcatcgcaagtcagaaccacctcccgagaccctgtacgactcgggtgcctcagtagacagttccggccatacagtaatggagaagctgccttcaggaatggaaatcagcttcgccccagccacgtcacacgaagcaccagccatgatggattctcacatcagcagttccgatgctgccacagaaatgctgagtcagcccaatcacccctccggtgaagtgaaggccgagaataacatcgaaatggtcggagagtctcaggctgcaaaggtgattgtctcagttgaggacgccgtccctacaattttctgcggcaagatcaaggggctgtctggagtcagtacaaaaaatttttctttcaagcgcgaggatagcgtcttgcagggctacgacatcaatagccaaggggaggagtccatgggtaatgccgagccgctgcggaaacccattaaaaatcgctctataaaacttaagaaagtgaacagccaggagattcacatgcttcctatcaaaaagcaaagactagcgacattctttcctcgaaagtag

SEQ ID NO: 296025 - DNA, 2317 bp, Artificial Sequence
  derived and/or modified sequence
agcgactcggtgacagcggcgacggcggctcccaccgcggcgcacccccttcaggcggccggcggcgaggccagaccggagagttccagcacactcgaccaccccgcggcttcctggaggcggcggccgcgattgcgaggcttcccaggaagaatgaagcagtcaacttgcataaggcctgtcttgacttctctcctttgggggaagaggatcacattaagaagggtggcaggcttgcctggacacagaattccactaccaaacagacatcatttctgagaacttcagagtttatgatccaggtttcccagtgattaaattactccttggaaggccaagtggcatcagagctgagtgatggacgacctgcagtcccagaacctctccatggacatgactgactcccctcctgccttggctaataacagactggagaatggcatggctcagctgatcaccaccgaggcctggaacatcaactccactgacctggtaaagaaggccctggtgaccgtgccagccccatccattctgaacccccctgccgagtctcagagtggcatggctctgaaggtggcggccactgtgttgcagcccctgtgcctcggggagagcccagtggtgatgcccattcacatgcaggtggagggaagctccgcaccagagctcaatccgaatggcaatgccacctacgtcatgaccacccagggccccgtgcaactgcccgtggtgctggagcagcacgtctttcagcacctcaactcccctctggtcctgccgcaggaggccccatgctcctccagtaccatccacaacaacctcttccagggagcggaggaccccgaggcccagccccagctcctggacctgaggatccccagccagccgcaggagcccactttgccatttgaagctgtgctccagaatttgtttccctcccagggcactctcgggcccccaccctgtcagcctcctcctggctatgcccctgtgcccccacagccttttagctcccccttgtcccccctggtcccaccagccaccctcttggtgccgtatcctgtaatcgtccccttgcctgtgccagtccctattcccatccccatcccgatgcctcagagttctgaatccaagttcagctccagtttccccaagccaccatcttccttcggcctgcacccctttaaaggcacccagacccctctggaaaaagatgaactgaagccctttgacatcctccagcctaaggagtacttccagctcagccgccacacggtcattaagatgggaagtgagaacgaggccctggatctctccatgaagtcagtgccctggctcaaggctggtgaagtcagtcccccaatcttccaggaagatgcagccctagacctgtcagtggcagcccaccggaaatccgagcctccccctgagacactgtatgacagtggtgcatcagtggacagctcaggtcacacagtgatggagaaacttcccagtggcatggaaatttcttttgcccctgccacgtcccatgaggccccagccatgatggatagtcacatcagcagcagtgatgctgctaccgagatgctcagccagcccaaccaccccagcggcgaagtcaaggctgaaaataacattgagatggtgggcgagtcccaggcggccaaggtcattgtctctgtcgaagatgctgtgcctaccatattctgtggcaagatcaaaggcctctcaggggtgtccaccaaaaacttctccttcaaaagagaagactccgtgcttcagggctatgacatcaacagccaaggggaagagtccatgggaaatgcagagccccttaggaaacccatcaaaaaccggagcataaagttaaagaaagtgaactcccaggaaatacacatgctcccaatcaaaaaacaacggctggccaccttttttccaagaaagtaaataacggctttttaaaatttgtatgattataatatggggaaaggtgcattggttttataaaaaggcatttaaaacaaattatctttgttaattattttggggagtagttgggaaatggaaaggtgaattggctctagaggccctgtatgctagtatcattttcttttttaatttttgacttttcacaaatgagtaaataagagcaacctatttttcaagcagattgcacattttttgcagctttaatggaatattgggtgaattagaggggtaaaaaaagctattttcattgccacaaagtgctttgatgatgtaatacctaataaagggtaggatgaatatttcacaataaatgtttgtttgcact

SEQ ID NO: 296026 - DNA, 2377 bp, Artificial Sequence
  derived and/or modified sequence
ggcaccgcaccgggcagtctccggatctgccgttctgccccggcccggaaaacccggcgccttccaggcccttcgaaagatggattctgttgacgtatctggcggccctggcgagcctggtggaaagttgggttttgccagattgcgccgggctcctctttgtgacgcgcggccagccccgcatcccccccggagccgggcttcccaggaagaatgaagcagtcaacttgcataaggcctgtcttgacttctctcctttgggggaagaggatcacattaagaagggtggcaggcttgcctggacacagaattccactaccaaacagacatcatttctgagaacttcagagtttatgatccaggtttcccagtgattaaattactccttggaaggccaagtggcatcagagctgagtgatggacgacctgcagtcccagaacctctccatggacatgactgactcccctcctgccttggctaataacagactggagaatggcatggctcagctgatcaccaccgaggcctggaacatcaactccactgacctggtaaagaaggccctggtgaccgtgccagccccatccattctgaacccccctgccgagtctcagagtggcatggctctgaaggtggcggccactgtgttgcagcccctgtgcctcggggagagcccagtggtgatgcccattcacatgcaggtggagggaagctccgcaccagagctcaatccgaatggcaatgccacctacgtcatgaccacccagggccccgtgcaactgcccgtggtgctggagcagcacgtctttcagcacctcaactcccctctggtcctgccgcaggaggccccatgctcctccagtaccatccacaacaacctcttccagggagcggaggaccccgaggcccagccccagctcctggacctgaggatccccagccagccgcaggagcccactttgccatttgaagctgtgctccagaatttgtttccctcccagggcactctcgggcccccaccctgtcagcctcctcctggctatgcccctgtgcccccacagccttttagctcccccttgtcccccctggtcccaccagccaccctcttggtgccgtatcctgtaatcgtccccttgcctgtgccagtccctattcccatccccatcccgatgcctcagagttctgaatccaagttcagctccagtttccccaagccaccatcttccttcggcctgcacccctttaaaggcacccagacccctctggaaaaagatgaactgaagccctttgacatcctccagcctaaggagtacttccagctcagccgccacacggtcattaagatgggaagtgagaacgaggccctggatctctccatgaagtcagtgccctggctcaaggctggtgaagtcagtcccccaatcttccaggaagatgcagccctagacctgtcagtggcagcccaccggaaatccgagcctccccctgagacactgtatgacagtggtgcatcagtggacagctcaggtcacacagtgatggagaaacttcccagtggcatggaaatttcttttgcccctgccacgtcccatgaggccccagccatgatggatagtcacatcagcagcagtgatgctgctaccgagatgctcagccagcccaaccaccccagcggcgaagtcaaggctgaaaataacattgagatggtgggcgagtcccaggcggccaaggtcattgtctctgtcgaagatgctgtgcctaccatattctgtggcaagatcaaaggcctctcaggggtgtccaccaaaaacttctccttcaaaagagaagactccgtgcttcagggctatgacatcaacagccaaggggaagagtccatgggaaatgcagagccccttaggaaacccatcaaaaaccggagcataaagttaaagaaagtgaactcccaggaaatacacatgctcccaatcaaaaaacaacggctggccaccttttttccaagaaagtaaataacggctttttaaaatttgtatgattataatatggggaaaggtgcattggttttataaaaaggcatttaaaacaaattatctttgttaattattttggggagtagttgggaaatggaaaggtgaattggctctagaggccctgtatgctagtatcattttcttttttaatttttgacttttcacaaatgagtaaataagagcaacctatttttcaagcagattgcacattttttgcagctttaatggaatattgggtgaattagaggggtaaaaaaagctattttcattgccacaaagtgctttgatgatgtaatacctaataaagggtaggatgaatatttcacaataaatgtttgtttgcact

SEQ ID NO: 296027 - DNA, 2224 bp, Artificial Sequence
  derived and/or modified sequence
cttggtgtatatagtaaaggccgggcgccgcacgcagacacacactcgccaggacacaggcgcacacacgctcacgcacaaccagcagcggcggcggcgacagcgactcggtgacagcggcgacggcggctcccaccgcggcgcacccccttcaggcggccggcggcgaggccagaccggagagttccagcacactcgaccaccccgcggcttcctggaggcggcggccgcgattgcgaggccaagtggcatcagagctgagtgatggacgacctgcagtcccagaacctctccatggacatgactgactcccctcctgccttggctaataacagactggagaatggcatggctcagctgatcaccaccgaggcctggaacatcaactccactgacctggtaaagaaggccctggtgaccgtgccagccccatccattctgaacccccctgccgagtctcagagtggcatggctctgaaggtggcggccactgtgttgcagcccctgtgcctcggggagagcccagtggtgatgcccattcacatgcaggtggagggaagctccgcaccagagctcaatccgaatggcaatgccacctacgtcatgaccacccagggccccgtgcaactgcccgtggtgctggagcagcacgtctttcagcacctcaactcccctctggtcctgccgcaggaggccccatgctcctccagtaccatccacaacaacctcttccagggagcggaggaccccgaggcccagccccagctcctggacctgaggatccccagccagccgcaggagcccactttgccatttgaagctgtgctccagaatttgtttccctcccagggcactctcgggcccccaccctgtcagcctcctcctggctatgcccctgtgcccccacagccttttagctcccccttgtcccccctggtcccaccagccaccctcttggtgccgtatcctgtaatcgtccccttgcctgtgccagtccctattcccatccccatcccgatgcctcagagttctgaatccaagttcagctccagtttccccaagccaccatcttccttcggcctgcacccctttaaaggcacccagacccctctggaaaaagatgaactgaagccctttgacatcctccagcctaaggagtacttccagctcagccgccacacggtcattaagatgggaagtgagaacgaggccctggatctctccatgaagtcagtgccctggctcaaggctggtgaagtcagtcccccaatcttccaggaagatgcagccctagacctgtcagtggcagcccaccggaaatccgagcctccccctgagacactgtatgacagtggtgcatcagtggacagctcaggtcacacagtgatggagaaacttcccagtggcatggaaatttcttttgcccctgccacgtcccatgaggccccagccatgatggatagtcacatcagcagcagtgatgctgctaccgagatgctcagccagcccaaccaccccagcggcgaagtcaaggctgaaaataacattgagatggtgggcgagtcccaggcggccaaggtcattgtctctgtcgaagatgctgtgcctaccatattctgtggcaagatcaaaggcctctcaggggtgtccaccaaaaacttctccttcaaaagagaagactccgtgcttcagggctatgacatcaacagccaaggggaagagtccatgggaaatgcagagccccttaggaaacccatcaaaaaccggagcataaagttaaagaaagtgaactcccaggaaatacacatgctcccaatcaaaaaacaacggctggccaccttttttccaagaaagtaaataacggctttttaaaatttgtatgattataatatggggaaaggtgcattggttttataaaaaggcatttaaaacaaattatctttgttaattattttggggagtagttgggaaatggaaaggtgaattggctctagaggccctgtatgctagtatcattttcttttttaatttttgacttttcacaaatgagtaaataagagcaacctatttttcaagcagattgcacattttttgcagctttaatggaatattgggtgaattagaggggtaaaaaaagctattttcattgccacaaagtgctttgatgatgtaatacctaataaagggtaggatgaatatttcacaataaatgtttgtttgcact

SEQ ID NO: 296028 - DNA, 2421 bp, Artificial Sequence
  derived and/or modified sequence
cttggtgtatatagtaaaggccgggcgccgcacgcagacacacactcgccaggacacaggcgcacacacgctcacgcacaaccagcagcggcggcggcgacagcgactcggtgacagcggcgacggcggctcccaccgcggcgcacccccttcaggcggccggcggcgaggccagaccggagagttccagcacactcgaccaccccgcggcttcctggaggcggcggccgcgattgcgagcaggcttcccaggaagaatgaagcagtcaacttgcataaggcctgtcttgacttctctcctttgggggaagaggatcacattaagaagggtggcaggcttgcctggacacagaattccactaccaaacagacatcatttctgagaacttcagagtttatgatccaggtttcccagtgattaaattactccttggaaggccaagtggcatcagagctgagtgatggacgacctgcagtcccagaacctctccatggacatgactgactcccctcctgccttggctaataacagactggagaatggcatggctcagctgatcaccaccgaggcctggaacatcaactccactgacctggtaaagaaggccctggtgaccgtgccagccccatccattctgaacccccctgccgagtctcagagtggcatggctctgaaggtggcggccactgtgttgcagcccctgtgcctcggggagagcccagtggtgatgcccattcacatgcaggtggagggaagctccgcaccagagctcaatccgaatggcaatgccacctacgtcatgaccacccagggccccgtgcaactgcccgtggtgctggagcagcacgtctttcagcacctcaactcccctctggtcctgccgcaggaggccccatgctcctccagtaccatccacaacaacctcttccagggagcggaggaccccgaggcccagccccagctcctggacctgaggatccccagccagccgcaggagcccactttgccatttgaagctgtgctccagaatttgtttccctcccagggcactctcgggcccccaccctgtcagcctcctcctggctatgcccctgtgcccccacagccttttagctcccccttgtcccccctggtcccaccagccaccctcttggtgccgtatcctgtaatcgtccccttgcctgtgccagtccctattcccatccccatcccgatgcctcagagttctgaatccaagttcagctccagtttccccaagccaccatcttccttcggcctgcacccctttaaaggcacccagacccctctggaaaaagatgaactgaagccctttgacatcctccagcctaaggagtacttccagctcagccgccacacggtcattaagatgggaagtgagaacgaggccctggatctctccatgaagtcagtgccctggctcaaggctggtgaagtcagtcccccaatcttccaggaagatgcagccctagacctgtcagtggcagcccaccggaaatccgagcctccccctgagacactgtatgacagtggtgcatcagtggacagctcaggtcacacagtgatggagaaacttcccagtggcatggaaatttcttttgcccctgccacgtcccatgaggccccagccatgatggatagtcacatcagcagcagtgatgctgctaccgagatgctcagccagcccaaccaccccagcggcgaagtcaaggctgaaaataacattgagatggtgggcgagtcccaggcggccaaggtcattgtctctgtcgaagatgctgtgcctaccatattctgtggcaagatcaaaggcctctcaggggtgtccaccaaaaacttctccttcaaaagagaagactccgtgcttcagggctatgacatcaacagccaaggggaagagtccatgggaaatgcagagccccttaggaaacccatcaaaaaccggagcataaagttaaagaaagtgaactcccaggaaatacacatgctcccaatcaaaaaacaacggctggccaccttttttccaagaaagtaaataacggctttttaaaatttgtatgattataatatggggaaaggtgcattggttttataaaaaggcatttaaaacaaattatctttgttaattattttggggagtagttgggaaatggaaaggtgaattggctctagaggccctgtatgctagtatcattttcttttttaatttttgacttttcacaaatgagtaaataagagcaacctatttttcaagcagattgcacattttttgcagctttaatggaatattgggtgaattagaggggtaaaaaaagctattttcattgccacaaagtgctttgatgatgtaatacctaataaagggtaggatgaatatttcacaataaatgtttgtttgcact

SEQ ID NO: 296029 - DNA, 1593 bp, Artificial Sequence
  derived and/or modified sequence
atggacgacctgcagagccagaacctgagcatggacatgaccgacagcccccccgccctggccaacaacagactggagaacggcatggcccagctgatcaccaccgaggcctggaacatcaacagcaccgacctggtgaagaaggccctggtgaccgtgcccgcccccagcatcctgaacccccccgccgagagccagagcggcatggccctgaaggtggccgccaccgtgctgcagcccctgtgcctgggcgagagccccgtggtgatgcccatccacatgcaggtggagggcagcagcgcccccgagctgaaccccaacggcaacgccacctacgtgatgaccacccagggccccgtgcagctgcccgtggtgctggagcagcacgtgttccagcacctgaacagccccctggtgctgccccaggaggccccctgcagcagcagcaccatccacaacaacctgttccagggcgccgaggaccccgaggcccagccccagctgctggacctgagaatccccagccagccccaggagcccaccctgcccttcgaggccgtgctgcagaacctgttccccagccagggcaccctgggcccccccccctgccagcccccccccggctacgcccccgtgcccccccagcccttcagcagccccctgagccccctggtgccccccgccaccctgctggtgccctaccccgtgatcgtgcccctgcccgtgcccgtgcccatccccatccccatccccatgccccagagcagcgagagcaagttcagcagcagcttccccaagccccccagcagcttcggcctgcaccccttcaagggcacccagacccccctggagaaggacgagctgaagcccttcgacatcctgcagcccaaggagtacttccagctgagcagacacaccgtgatcaagatgggcagcgagaacgaggccctggacctgagcatgaagagcgtgccctggctgaaggccggcgaggtgagcccccccatcttccaggaggacgccgccctggacctgagcgtggccgcccacagaaagagcgagcccccccccgagaccctgtacgacagcggcgccagcgtggacagcagcggccacaccgtgatggagaagctgcccagcggcatggagatcagcttcgcccccgccaccagccacgaggcccccgccatgatggacagccacatcagcagcagcgacgccgccaccgagatgctgagccagcccaaccaccccagcggcgaggtgaaggccgagaacaacatcgagatggtgggcgagagccaggccgccaaggtgatcgtgagcgtggaggacgccgtgcccaccatcttctgcggcaagatcaagggcctgagcggcgtgagcaccaagaacttcagcttcaagagagaggacagcgtgctgcagggctacgacatcaacagccagggcgaggagagcatgggcaacgccgagcccctgagaaagcccatcaagaacagaagcatcaagctgaagaaggtgaacagccaggagatccacatgctgcccatcaagaagcagagactggccaccttcttccccagaaagtag

SEQ ID NO: 296030 - protein, 635 aa, Artificial Sequence
  derived and/or modified sequence
MREQLKGHETQTTCWDHPKMTELYQSLADLNNVRFSAYRTAMKLRRLQKALCLDLLSLSAACDALDQHNLKQNDQPMDILQIINCLTTIYDRLEQEHNNLVNVPLCVDMCLNWLLNVYDTGRTGRIRVLSFKTGIISLCKAHLEDKYRYLFKQVASSTGFCDQRRLGLLLHDSIQIPRQLGEVASFGGSNIEPSVRSCFQFANNKPEIEAALFLDWMRLEPQSMVWLPVLHRVAAAETAKHQAKCNICKECPIIGFRYRSLKHFNYDICQSCFFSGRVAKGHKMHYPMVEYCTPTTSGEDVRDFAKVLKNKFRTKRYFAKHPRMGYLPVQTVLEGDNMETPVTLINFWPVDSAPASSPQLSHDDTHSRIEHYASRLAEMENSNGSYLNDSISPNESIDDEHLLIQHYCQSLNQDSPLSQPRSPAQILISLESEERGELERILADLEEENRNLQAEYDRLKQQHEHKGLSPLPSPPEMMPTSPQSPRDAELIAEAKLLRQHKGRLEARMQILEDHNKQLESQLHRLRQLLEQPQAEAKVNGTTVSSPSTSLQRSDSSQPMLLRVVGSQTSDSMGEEDLLSPPQDTSTGLEEVMEQLNNSFPSSRGHNVGSLFHMADDLGRAMESLVSVMTDEEGAE

SEQ ID NO: 296031 - protein, 1230 aa, Artificial Sequence
  derived and/or modified sequence
MPSSLMLEVPALADFNRAWTELTDWLSLLDQVIKSQRVMVGDLEDINEMIIKQKATMQDLEQRRPQLEELITAAQNLKNKTSNQEARTIITDRIERIQNQWDEVQEHLQNRRQQLNEMLKDSTQWLEAKEEAEQVLGQARAKLESWKEGPYTVDAIQKKITETKQLAKDLRQWQTNVDVANDLALKLLRDYSADDTRKVHMITENINASWRSIHKRVSEREAALEETHRLLQQFPLDLEKFLAWLTEAETTANVLQDATRKERLLEDSKGVKELMKQWQDLQGEIEAHTDVYHNLDENSQKILRSLEGSDDAVLLQRRLDNMNFKWSELRKKSLNIRSHLEASSDQWKRLHLSLQELLVWLQLKDDELSRQAPIGGDFPAVQKQNDVHRAFKRELKTKEPVIMSTLETVRIFLTEQPLEGLEKLYQEPRELPPEERAQNVTRLLRKQAEEVNTEWEKLNLHSADWQRKIDETLERLRELQEATDELDLKLRQAEVIKGSWQPVGDLLIDSLQDHLEKVKALRGEIAPLKENVSHVNDLARQLTTLGIQLSPYNLSTLEDLNTRWKLLQVAVEDRVRQLHEAHRDFGPASQHFLSTSVQGPWERAISPNKVPYYINHETQTTCWDHPKMTELYQSLADLNNVRFSAYRTAMKLRRLQKALCLDLLSLSAACDALDQHNLKQNDQPMDILQIINCLTTIYDRLEQEHNNLVNVPLCVDMCLNWLLNVYDTGRTGRIRVLSFKTGIISLCKAHLEDKYRYLFKQVASSTGFCDQRRLGLLLHDSIQIPRQLGEVASFGGSNIEPSVRSCFQFANNKPEIEAALFLDWMRLEPQSMVWLPVLHRVAAAETAKHQAKCNICKECPIIGFRYRSLKHFNYDICQSCFFSGRVAKGHKMHYPMVEYCTPTTSGEDVRDFAKVLKNKFRTKRYFAKHPRMGYLPVQTVLEGDNMETPASSPQLSHDDTHSRIEHYASRLAEMENSNGSYLNDSISPNESIDDEHLLIQHYCQSLNQDSPLSQPRSPAQILISLESEERGELERILADLEEENRNLQAEYDRLKQQHEHKGLSPLPSPPEMMPTSPQSPRDAELIAEAKLLRQHKGRLEARMQILEDHNKQLESQLHRLRQLLEQPQAEAKVNGTTVSSPSTSLQRSDSSQPMLLRVVGSQTSDSMGEEDLLSPPQDTSTGLEEVMEQLNNSFPSSRGHNVGSLFHMADDLGRAMESLVSVMTDEEGAE

SEQ ID NO: 296032 - protein, 622 aa, Artificial Sequence
  derived and/or modified sequence
MREQLKGHETQTTCWDHPKMTELYQSLADLNNVRFSAYRTAMKLRRLQKALCLDLLSLSAACDALDQHNLKQNDQPMDILQIINCLTTIYDRLEQEHNNLVNVPLCVDMCLNWLLNVYDTGRTGRIRVLSFKTGIISLCKAHLEDKYRYLFKQVASSTGFCDQRRLGLLLHDSIQIPRQLGEVASFGGSNIEPSVRSCFQFANNKPEIEAALFLDWMRLEPQSMVWLPVLHRVAAAETAKHQAKCNICKECPIIGFRYRSLKHFNYDICQSCFFSGRVAKGHKMHYPMVEYCTPTTSGEDVRDFAKVLKNKFRTKRYFAKHPRMGYLPVQTVLEGDNMETPASSPQLSHDDTHSRIEHYASRLAEMENSNGSYLNDSISPNESIDDEHLLIQHYCQSLNQDSPLSQPRSPAQILISLESEERGELERILADLEEENRNLQAEYDRLKQQHEHKGLSPLPSPPEMMPTSPQSPRDAELIAEAKLLRQHKGRLEARMQILEDHNKQLESQLHRLRQLLEQPQAEAKVNGTTVSSPSTSLQRSDSSQPMLLRVVGSQTSDSMGEEDLLSPPQDTSTGLEEVMEQLNNSFPSSRGHNVGSLFHMADDLGRAMESLVSVMTDEEGAE

SEQ ID NO: 296033 - DNA, 7339 bp, Artificial Sequence
  derived and/or modified sequence
acactagcaatggcaaagctttgtgcggaggcattgctggctgctctgaactaaaagcatccgtggggaccgaaagaggtttttgcacaccttattaaggaactccaggatggcattgggcagcggcaaactgttgtcagaacattgaatgcaactggggaagaaataattcagcaatcctcaaaaacagatgccagtattctacaggaaaaattgggaagcctgaatctgcggtggcaggaggtctgcaaacagctgtcagacagaaaaaagaggctagaagaacaaaagaatatcttgtcagaatttcaaagagatttaaatgaatttgttttatggttggaggaagcagataacattgctagtatcccacttgaacctggaaaagagcagcaactaaaagaaaagcttgagcaagtcaagttactggtggaagagttgcccctgcgccagggaattctcaaacaattaaatgaaactggaggacccgtgcttgtaagtgctcccataagcccagaagagcaagataaacttgaaaataagctcaagcagacaaatctccagtggataaaggtttccagagctttacctgagaaacaaggagaaattgaagctcaaataaaagaccttgggcagcttgaaaaaaagcttgaagaccttgaagagcagttaaatcatctgctgctgtggttatctcctattaggaatcagttggaaatttataaccaaccaaaccaagaaggaccatttgacgttcaggaaactgaaatagcagttcaagctaaacaaccggatgtggaagagattttgtctaaagggcagcatttgtacaaggaaaaaccagccactcagccagtgaagaggaagttagaagatctgagctctgagtggaaggcggtaaaccgtttacttcaagagctgagggcaaagcagcctgacctagctcctggactgaccactattggagcctctcctactcagactgttactctggtgacacaacctgtggttactaaggaaactgccatctccaaactagaaatgccatcttccttgatgttggaggtacctgctctggcagatttcaaccgggcttggacagaacttaccgactggctttctctgcttgatcaagttataaaatcacagagggtgatggtgggtgaccttgaggatatcaacgagatgatcatcaagcagaaggcaacaatgcaggatttggaacagaggcgtccccagttggaagaactcattaccgctgcccaaaatttgaaaaacaagaccagcaatcaagaggctagaacaatcattacggatcgaattgaaagaattcagaatcagtgggatgaagtacaagaacaccttcagaaccggaggcaacagttgaatgaaatgttaaaggattcaacacaatggctggaagctaaggaagaagctgagcaggtcttaggacaggccagagccaagcttgagtcatggaaggagggtccctatacagtagatgcaatccaaaagaaaatcacagaaaccaagcagttggccaaagacctccgccagtggcagacaaatgtagatgtggcaaatgacttggccctgaaacttctccgggattattctgcagatgataccagaaaagtccacatgataacagagaatatcaatgcctcttggagaagcattcataaaagggtgagtgagcgagaggctgctttggaagaaactcatagattactgcaacagttccccctggacctggaaaagtttcttgcctggcttacagaagctgaaacaactgccaatgtcctacaggatgctacccgtaaggaaaggctcctagaagactccaagggagtaaaagagctgatgaaacaatggcaagacctccaaggtgaaattgaagctcacacagatgtttatcacaacctggatgaaaacagccaaaaaatcctgagatccctggaaggttccgatgatgcagtcctgttacaaagacgtttggataacatgaacttcaagtggagtgaacttcggaaaaagtctctcaacattaggtcccatttggaagccagttctgaccagtggaagcgtctgcacctttctctgcaggaacttctggtgtggctacagctgaaagatgatgaattaagccggcaggcacctattggaggcgactttccagcagttcagaagcagaacgatgtacatagggccttcaagagggaattgaaaactaaagaacctgtaatcatgagtactcttgagactgtacgaatatttctgacagagcagcctttggaaggactagagaaactctaccaggagcccagagagctgcctcctgaggagagagcccagaatgtcactcggcttctacgaaagcaggctgaggaggtcaatactgagtgggaaaaattgaacctgcactccgctgactggcagagaaaaatagatgagacccttgaaagactccaggaacttcaagaggccacggatgagctggacctcaagctgcgccaagctgaggtgatcaagggatcctggcagcccgtgggcgatctcctcattgactctctccaagatcacctcgagaaagtcaaggcacttcgaggagaaattgcgcctctgaaagagaacgtgagccacgtcaatgaccttgctcgccagcttaccactttgggcattcagctctcaccgtataacctcagcactctggaagacctgaacaccagatggaagcttctgcaggtggccgtcgaggaccgagtcaggcagctgcatgaagcccacagggactttggtccagcatctcagcactttctttccacgtctgtccagggtccctgggagagagccatctcgccaaacaaagtgccctactatatcaaccacgagactcaaacaacttgctgggaccatcccaaaatgacagagctctaccagtctttagctgacctgaataatgtcagattctcagcttataggactgccatgaaactccgaagactgcagaaggccctttgcttggatctcttgagcctgtcagctgcatgtgatgccttggaccagcacaacctcaagcaaaatgaccagcccatggatatcctgcagattattaattgtttgaccactatttatgaccgcctggagcaagagcacaacaatttggtcaacgtccctctctgcgtggatatgtgtctgaactggctgctgaatgtttatgatacgggacgaacagggaggatccgtgtcctgtcttttaaaactggcatcatttccctgtgtaaagcacatttggaagacaagtacagataccttttcaagcaagtggcaagttcaacaggattttgtgaccagcgcaggctgggcctccttctgcatgattctatccaaattccaagacagttgggtgaagttgcatcctttgggggcagtaacattgagccaagtgtccggagctgcttccaatttgctaataataagccagagatcgaagcggccctcttcctagactggatgagactggaaccccagtccatggtgtggctgcccgtcctgcacagagtggctgctgcagaaactgccaagcatcaggccaaatgtaacatctgcaaagagtgtccaatcattggattcaggtacaggagtctaaagcactttaattatgacatctgccaaagctgctttttttctggtcgagttgcaaaaggccataaaatgcactatcccatggtggaatattgcactccgactacatcaggagaagatgttcgagactttgccaaggtactaaaaaacaaatttcgaaccaaaaggtattttgcgaagcatccccgaatgggctacctgccagtgcagactgtcttagagggggacaacatggaaacgcctgcctcgtcccctcagctttcacacgatgatactcattcacgcattgaacattatgctagcaggctagcagaaatggaaaacagcaatggatcttatctaaatgatagcatctctcctaatgagagcatagatgatgaacatttgttaatccagcattactgccaaagtttgaaccaggactcccccctgagccagcctcgtagtcctgcccagatcttgatttccttagagagtgaggaaagaggggagctagagagaatcctagcagatcttgaggaagaaaacaggaatctgcaagcagaatatgaccgtctaaagcagcagcacgaacataaaggcctgtccccactgccgtcccctcctgaaatgatgcccacctctccccagagtccccgggatgctgagctcattgctgaggccaagctactgcgtcaacacaaaggccgcctggaagccaggatgcaaatcctggaagaccacaataaacagctggagtcacagttacacaggctaaggcagctgctggagcaaccccaggcagaggccaaagtgaatggcacaacggtgtcctctccttctacctctctacagaggtccgacagcagtcagcctatgctgctccgagtggttggcagtcaaacttcggactccatgggtgaggaagatcttctcagtcctccccaggacacaagcacagggttagaggaggtgatggagcaactcaacaactccttccctagttcaagaggacacaatgtaggaagtcttttccacatggcagatgatttgggcagagcgatggagtccttagtatcagtcatgacagatgaagaaggagcagaataaatgttttacaactcctgattcccgcatggtttttataatattcatacaacaaagaggattagacagtaagagtttacaagaaataaatctatatttttgtgaagggtagtggtattatactgtagatttcagtagtttctaagtctgttattgttttgttaacaatggcaggttttacacgtctatgcaattgtacaaaaaagttataagaaaactacatgtaaaatcttgatagctaaataacttgccatttctttatatggaacgcattttgggttgtttaaaaatttataacagttataaagaaagattgtaaactaaagtgtgctttataaaaaaaagttgtttataaaaacccctaaaaacaaaacaaacacacacacacacacatacacacacacacacaaaactttgaggcagcgcattgttttgcatccttttggcgtgatatccatatgaaattcatggctttttctttttttgcatattaaagataagacttcctctaccaccacaccaaatgactactacacactgctcatttgagaactgtcagctgagtggggcaggcttgagttttcatttcatatatctatatgtctataagtatataaatactatagttatatagataaagagatacgaatttctatagactgactttttccattttttaaatgttcatgtcacatcctaatagaaagaaattacttctagtcagtcatccaggcttacctgcttggtctagaatggatttttcccggagccggaagccaggaggaaactacaccacactaaaacattgtctacagctccagatgtttctcattttaaacaactttccactgacaacgaaagtaaagtaaagtattggatttttttaaagggaacatgtgaatgaatacacaggacttattatatcagagtgagtaatcggttggttggttgattgattgattgattgatacattcagcttcctgctgctagcaatgccacgatttagatttaatgatgcttcagtggaaatcaatcagaaggtattctgaccttgtgaacatcagaaggtattttttaactcccaagcagtagcaggacgatgatagggctggagggctatggattcccagcccatccctgtgaaggagtaggccactctttaagtgaaggattggatgattgttcataatacataaagttctctgtaattacaactaaattattatgccctcttctcacagtcaaaaggaactgggtggtttggtttttgttgcttttttagatttattgtcccatgtgggatgagtttttaaatgccacaagacataatttaaaataaataaactttgggaaaaggtgtaaaacagtagccccatcacatttgtgatactgacaggtatcaacccagaagcccatgaactgtgtttccatcctttgcatttctctgcgagtagttccacacaggtttgtaagtaagtaagaaagaaggcaaattgattcaaatgttacaaaaaaacccttcttggtggattagacaggttaaatatataaacaaacaaacaaaaattgctcaaaaaagaggagaaaagctcaagaggaaaagctaaggactggtaggaaaaagctttactctttcatgccattttatttctttttgatttttaaatcattcattcaatagataccaccgtgtgacctataattttgcaaatctgttacctctgacatcaagtgtaattagcttttggagagtgggctgacatcaagtgtaattagcttttggagagtgggttttgtccattattaataattaattaattaacatcaaacacggcttctcatgctatttctacctcactttggttttggggtgttcctgataattgtgcacacctgagttcacagcttcaccacttgtccattgcgttattttctttttcctttataattctttctttttccttcataattttcaaaagaaaacccaaagctctaaggtaacaaattaccaaattacatgaagatttggtttttgtcttgcatttttttcctttatgtgacgctggaccttttctttacccaaggatttttaaaactcagatttaaaacaaggggttactttacatcctactaagaagtttaagtaagtaagtttcattctaaaatcagaggtaaatagagtgcataaataattttgttttaatctttttgtttttcttttagacacattagctctggagtgagtctgtcataatatttgaacaaaaattgagagctttattgctgcattttaagcataattaatttggacattatttcgtgttgtgttctttataaccaccaagtattaaactgtaaatcataatgtaactgaagcataaacatcacatggcatgttttgtcattgttttcaggtactgagttcttacttgagtatcataatatattgtgttttaacaccaacactgtaacatttacgaattatttttttaaacttcagttttactgcattttcacaacatatcagacttcaccaaatatatgccttactattgtattatagtactgctttactgtgtatctcaataaagcacgcagttatgttac

SEQ ID NO: 296034 - DNA, 3693 bp, Artificial Sequence
  derived and/or modified sequence
atgccaagttccctgatgctcgaggtccccgctttggccgatttcaatagagcctggacagagctgacggactggttgtcactcctggaccaggtgattaaatctcagcgggtgatggttggagaccttgaagacattaatgaaatgattataaaacaaaaagccaccatgcaagacttggaacagcggcggccgcagcttgaagaattaattacagcggctcagaatcttaaaaataagacttcaaatcaggaggccagaacaatcatcacagataggatcgagagaattcagaaccagtgggatgaggtgcaggaacatcttcagaataggcggcagcagctcaacgagatgctaaaggattccacccagtggctagaggctaaagaggaagccgaacaggtactgggacaggctcgagctaaactcgaatcatggaaggagggaccctacactgtcgatgccatacagaagaagatcacagagactaagcagctggcgaaggatttacggcagtggcagacaaatgtggatgtcgccaacgacttagctctgaaactactcagggattattctgctgacgatacacgtaaggtccatatgatcacagagaatatcaatgcctcttggcgatctatccataagcgggtgagcgaacgagaagcagccctggaagagacacatcgcctgctgcagcagttcccccttgatttggagaaattcctggcatggctgacagaggcggaaacgactgctaatgtcctgcaagacgccaccagaaaagaacggctgttagaagatagcaaaggagtcaaagaactcatgaagcaatggcaggatctgcaaggcgagattgaggctcatactgatgtctaccataacctcgatgagaactcccagaagattctccgcagtctggaaggatccgacgatgcggttctgctgcagcgccgcctggacaatatgaacttcaagtggtccgagttgcggaaaaagagcctgaacattcgctcacatctcgaagctagttctgaccagtggaagcgcctgcacctgtcactgcaggagctgctcgtgtggctgcaactgaaagatgatgaactctcacggcaggctccaattggcggggatttccccgccgtgcaaaaacagaatgacgtccacagagcgttcaagcgcgagctcaagaccaaagagcctgtgattatgagtaccctggaaacagttcggatttttctcactgaacagccattggagggccttgagaaactctaccaagagccacgggagctgccaccagaagagcgggcccagaatgttactcgcttactccgcaaacaggcagaagaagtgaatacagaatgggagaaactgaatctccactccgccgactggcagaggaagatagacgaaacactcgagaggttacgggaactgcaggaagctaccgatgagctggacctgaagcttaggcaggctgaggttataaaaggatcttggcagcctgtcggcgacctcctgatagacagtctgcaagaccacttagagaaggttaaggccctgcgtggggagattgccccgttgaaagagaatgtgtcacatgttaacgatctggcccgtcagctaacaacacttggcatccaactgagtccatacaacctctcgacactcgaggatctcaacaccagatggaagctactgcaggtggctgtcgaggatcgcgtgcgccaactgcacgaggctcacagagatttcggcccagcttcccaacactttctgagtactagtgttcaaggcccctgggagagagccatttcccctaataaggtcccttattacattaaccacgaaacgcaaacaacatgctgggatcaccccaagatgaccgagttgtaccagagtcttgctgacctgaacaacgtgcgttttagcgcctatcgtaccgccatgaagctaagacgattacagaaagccctctgcttagacctgctgtccctttcagcagcctgtgacgcactggaccaacataacctcaagcagaacgaccagccaatggacattctgcaaattattaattgcctaaccactatctacgaccggctggagcaggagcataacaacctggtgaacgttcccctgtgtgtcgatatgtgccttaattggctgctgaacgtgtatgatacaggccgcactggcagaatccgtgttctctcctttaagacagggatcatttccttgtgcaaagcccatctcgaggacaagtataggtacttatttaaacaggtggcttcttcgactggcttttgtgaccaacgcagactgggattactcctgcacgactccatccaaattccgagacaactgggggaggtggccagctttggcggctctaatatagaaccttcagtgcgatcttgcttccaattcgccaataacaagcccgaaatagaggccgcgctgttccttgattggatgcgtttggagccgcagagtatggtgtggctgcctgtcctccaccgagtcgctgctgccgagaccgcgaagcatcaggccaagtgtaacatttgtaaagagtgccccatcatcgggtttcgataccgcagcctgaaacactttaactatgacatttgccagagttgctttttctcaggtcgcgttgctaaggggcacaaaatgcattatcccatggttgaatactgcacccccacgacgagcggtgaggacgtccgtgactttgccaaagtcttgaagaacaagttccgcaccaagagatattttgcaaaacatcctagaatgggttatctgcccgttcagacagtgctagagggagataacatggaaacacctgccagcagtcctcaactgagccatgacgacacacactcccgcattgaacattacgcaagtcgcctagcggagatggagaactccaacggtagctacctgaacgattcaatcagccctaacgagagcattgacgatgaacacctgttgatacagcactattgccaaagcttgaaccaggactcccctctgtcacaacccagatctccagcccagatattgataagccttgaatccgaggagaggggcgaattggaaagaattctcgctgacttggaggaggaaaatcgaaacctccaggccgagtacgaccgtttaaagcagcagcacgagcataaaggactctcacccctgccgagccctccagagatgatgcctacatccccccagtccccaagggacgcagagcttattgctgaagcaaagctacttcggcagcataagggtcgcctggaggcccgaatgcagattcttgaggatcacaacaaacagctggaaagtcagctccataggttgagacagctacttgagcaaccccaggcggaggccaaggtcaatggcaccacagtatctagcccatctactagtctgcaacggtctgacagcagtcagcccatgttgctccgcgtggtcggaagccagactagtgactcaatgggggaggaggatctgttgtcaccaccccaggatacctctaccgggctcgaagaggttatggagcaactgaacaactccttcccctcctctagggggcacaacgtgggctccctgtttcacatggctgacgatctgggccgcgccatggaatctcttgtcagtgtgatgacagatgaggagggcgctgaatag

SEQ ID NO: 296035 - DNA, 3693 bp, Artificial Sequence
  derived and/or modified sequence
atgcccagcagcctgatgctggaggtgcctgccctggccgacttcaacagagcctggacagagctgacagactggctgagcctgctggaccaggtgatcaagagccagagggtgatggtgggggacctggaggacatcaatgagatgatcatcaagcagaaggccaccatgcaggacctggagcagaggcggccccagctggaggagctgatcacagctgcccagaacctgaagaacaagaccagcaaccaggaggcccggaccatcatcacagaccgcatcgagcgcatccagaaccagtgggatgaggtgcaggagcacctgcagaacagacggcagcagctgaatgagatgctgaaggacagcacccagtggctggaggccaaggaggaggccgagcaggtgctgggccaggcccgggccaagctggagagctggaaggagggcccctacacagtggatgccatccagaagaagatcacagagaccaagcagctggccaaggacctgcggcagtggcagaccaacgtggatgtggccaatgacctggccctgaagctgctgcgggactacagcgcagatgacaccaggaaggtgcacatgatcacagagaacatcaatgcctcctggaggagcatccacaagagggtgtctgagcgggaggccgccctggaggagacccaccggctgctgcagcagttccccctggacctggagaagttcctggcctggctgacagaggccgagaccacagccaacgtgctgcaggatgccaccaggaaggagcggctgctggaggacagcaaaggagtgaaggagctgatgaagcagtggcaggacctgcagggcgagattgaggcccacacagatgtgtaccacaacctggatgagaacagccagaagatcctgcggagcctggagggcagtgatgatgctgtgctgctgcagaggcggctggacaacatgaacttcaagtggagcgagctgaggaagaagagcctgaacatccgcagccacctggaggccagcagtgaccagtggaagaggctgcacctgagcctgcaggagctgctggtgtggctgcagctgaaggatgatgagctgagccggcaggcccccatcggcggggacttccctgctgtgcagaagcagaatgatgtgcaccgggccttcaagcgggagctgaagaccaaggagcccgtcatcatgagcaccctggagaccgtgcgcatcttcctgacagagcagcccctggagggcctggagaagctgtaccaggagccccgggagctgcccccagaggagcgggcccagaatgtgacccggctgctgaggaagcaggccgaggaggtgaacacagagtgggagaagctgaacctgcacagcgctgactggcagaggaagattgatgagaccctggagcggctgcgggagctgcaggaggccacagatgagctggacctgaagctgcggcaggccgaggtgatcaagggctcctggcagcctgtgggggacctgctgattgacagcctgcaggaccacctggagaaggtgaaggccctgcggggggagatcgcccccctgaaggaaaatgtgagccacgtgaatgacctggcccggcagctgaccaccctgggcatccagctgagcccctacaacctgagcaccctggaggacctgaacacccgctggaagctgctgcaggtggccgtggaggacagagtgcggcagctgcacgaggcccaccgggactttggacctgccagccagcacttcctgagcacctctgtgcagggcccctgggagcgggccatcagccccaacaaggtgccctactacatcaaccacgagacccagaccacctgctgggaccaccccaagatgacagagctgtaccagagcctggccgacctgaacaacgtgcgcttcagcgcctacagaacagccatgaagctgcggcggctgcagaaggccctgtgcctggacctgctgagcctgtctgctgcctgtgatgccctggaccagcacaacctgaagcagaatgaccagcccatggacatcctgcagatcatcaactgcctgaccaccatctatgaccggctggagcaggagcacaacaacctggtgaatgtgcccctgtgtgtggacatgtgcctgaactggctgctgaatgtgtatgacaccggccgcacaggccgcatccgggtgctgtccttcaagacaggcatcatcagcctgtgcaaggcccacctggaggacaagtaccgctacctgttcaagcaggtggccagcagcacaggcttctgtgaccagaggcggctgggcctgctgctgcatgacagcatccagatcccccggcagctgggggaggtggccagctttggaggcagcaacatcgagcccagcgtgcgcagctgcttccagtttgccaacaacaagccagaaattgaggccgccctcttcctggactggatgaggctggagccccagagcatggtgtggctgcctgtgctgcaccgggtggccgctgctgagacagccaagcaccaggccaagtgcaacatctgcaaggagtgccccatcatcggcttccgctaccgcagcctgaagcacttcaactatgacatctgccagagctgcttcttcagcggccgggtggccaagggccacaagatgcactaccccatggtggagtactgcacccccaccaccagcggagaagatgtgcgggactttgccaaggtgctgaagaacaagttccgcaccaagcgctactttgccaagcaccccaggatgggctacctgcctgtgcagacagtgctggagggggacaacatggagaccccagccagcagcccccagctgagccatgatgacacccacagccgcatcgagcactacgccagccggctggccgagatggagaacagcaatggcagctacctgaatgacagcatcagccccaatgaaagcattgatgatgagcacctgctgatccagcactactgccagagcctgaaccaggacagccccctgagccagcccaggagccctgcccagatcctgatcagcctggagagcgaggagcggggggagctggagcgcatcctggccgacctggaggaggagaacagaaacctgcaggccgagtatgaccggctgaagcagcagcacgagcacaagggcctgagccccctgcccagccccccagagatgatgcccaccagcccccagagccccagagatgctgagctgattgctgaggccaagctgctgcggcagcacaagggccgcctggaggccaggatgcagatcctggaggaccacaacaagcagctggagagccagctgcaccggctgcggcagctgctggagcagccccaggccgaggccaaggtgaatggcaccaccgtgagcagccccagcaccagcctgcagaggagtgacagcagccagcccatgctgctgcgggtggtgggcagccagaccagtgacagcatgggagaggaggacctgctgagccccccccaggacaccagcacaggcctggaggaggtgatggagcagctgaacaacagcttccccagcagccggggccacaacgtgggcagcctcttccacatggctgatgacctgggccgggccatggagagcctggtgtctgtgatgacagatgaggagggcgctgagtag

SEQ ID NO: 296036 - DNA, 3693 bp, Artificial Sequence
  derived and/or modified sequence
atgcccagcagcctgatgctggaggtgcccgccctggccgacttcaatcgcgcatggactgaattaacagactggctgtcactgttggaccaagtgataaagtcccagagggtgatggtgggcgacttggaggatattaacgaaatgatcatcaagcagaaagctacaatgcaggatcttgaacagaggagacctcagctggaggagctcatcacagccgctcaaaatctcaaaaataaaacctctaaccaggaggcacgcaccatcattactgataggatagaaagaattcagaaccagtgggatgaagtgcaagagcatctgcaaaatcggcggcagcagttgaacgagatgctgaaggactcaacacagtggttggaggccaaagaggaggcagagcaagtgttgggacaggcacgcgcgaaactagagagctggaaggaagggccttatactgtggatgcaattcagaagaagattaccgagactaagcagctggctaaggacctcaggcagtggcagacaaatgtcgatgtggccaatgatctcgccttgaagttgctgcgcgactattccgctgacgacacccgaaaagtccatatgattactgaaaatataaatgcttcatggaggtcaatccacaaacgcgtctcagagcgggaagctgcactggaggagactcatcgcctcctccaacaatttcccctcgatctggaaaagttcctggcatggctcacagaggccgagaccaccgctaacgttctgcaggacgcgacacggaaagaacggttactggaggatagtaagggggttaaagagctgatgaagcaatggcaggacctccagggggagatagaggcccatacggatgtataccacaatcttgacgagaactctcaaaaaattttgaggagcctcgagggttccgacgatgcagttctactgcagaggaggctggataacatgaacttcaaatggtcagagttgaggaagaaaagtctgaacatccgaagccacctggaagccagtagcgaccagtggaaaagactccaccttagcctgcaggaactactcgtctggttacagctaaaagatgacgaattgagcagacaggccccaatcggtggagacttccctgccgtgcagaaacagaacgatgtgcacagggccttcaagagggagttgaagaccaaggagcccgtaataatgtccacactcgagaccgttcgtatctttttgacggagcaaccacttgagggcctggaaaagctctatcaagagccccgggaacttccccccgaggagcgcgctcagaacgtgacacggctcttaaggaagcaggccgaagaggtcaacacagagtgggaaaagctcaatctgcactcagctgattggcagagaaagatcgatgaaactctggaaaggttgagagaactgcaagaggccactgacgagcttgatctcaagctcaggcaagctgaagtaatcaaaggatcttggcagcctgtaggcgacctcctcatcgactcactgcaggatcatctggaaaaggtgaaggcactgaggggcgaaatcgcgcctctcaaggaaaacgtgagtcacgtgaatgacttggccaggcagctcaccactcttggaattcagctttcaccatacaacctgagtacgctcgaggacctgaacaccagatggaagctgctgcaggttgccgtggaggacagggtgaggcagctgcacgaggcacaccgtgattttggcccagcctcacaacatttcctgtctacttctgtccagggaccatgggagcgcgccatctcgcctaataaggttccctactacatcaaccacgaaactcagaccacctgctgggatcatccaaagatgaccgaactctatcaatctttggctgaccttaacaacgtccggttctccgcctaccgaaccgctatgaagttaaggcgtctgcagaaagccctgtgtttggacctcctctctttaagtgccgcttgtgacgccttagatcagcacaacctcaaacagaatgaccaaccaatggatatccttcaaattatcaactgtctcacaactatctacgaccgtctggagcaggaacataacaatttggtgaacgtgcctctgtgtgtggacatgtgtctcaattggctactcaatgtgtatgacacgggcaggactgggcggatccgagtactttcatttaaaactggtattatctctctctgcaaggcacatctcgaagacaaatatagatacctgttcaaacaagttgctagtagcacaggcttctgcgaccagcggcgcctgggcctactgctacacgacagcatacaaatcccacgacaactcggcgaagtcgcatccttcggcggcagcaatatagaaccatccgtgcggtcctgttttcagtttgccaataacaagcctgaaattgaggccgccctttttcttgattggatgagactggaaccccaatccatggtctggttgccagtgctgcaccgggtagccgctgcagagaccgccaaacatcaggctaaatgtaatatctgtaaggaatgtcccatcattggatttagataccgttccctcaagcactttaattacgatatatgtcagagttgtttctttagcgggcgggtcgctaaaggccataaaatgcactacccgatggttgagtattgtactccaacaaccagcggggaagacgtaagagactttgcaaaggtgttaaagaacaaattccgaacaaagcggtattttgccaagcacccacggatgggatatctgcctgtccagacagtcctggagggggataatatggagacccccgcgtccagcccacaactatctcatgatgatactcattcgaggatcgagcattacgccagccggctggctgagatggaaaatagtaatggcagctatctgaacgacagcatctcccccaacgagtcaatcgacgatgaacacctgctcattcagcactattgccagtccctgaaccaggacagcccactgtcacagcccaggtctccggcgcagatcctgataagcctggagtccgaagaacggggagagctcgagcgcattcttgccgatttggaggaggaaaataggaacctgcaggcagagtacgacagactgaagcaacagcacgagcacaaaggcctctctcccctccccagtccccccgaaatgatgcctacgagtccacagtcacccagggacgctgagcttatcgcagaggctaaattgctgcgtcagcataaaggtcgcttggaggcacgcatgcagatactcgaggatcataataagcaacttgagagccagcttcacagattgcgccagctgctcgaacaaccacaggctgaagcaaaggttaacggaacaaccgtgtccagcccttccacctctctccagcgcagtgattcatcccaaccaatgctgctgagggtggtcggaagccagacttctgactccatgggagaggaggatcttctaagccccccccaagacacttccacaggtttggaggaggtcatggagcaactcaataactcttttcccagcagcagagggcataacgttggctccctgtttcatatggctgacgacctgggcagagccatggagtccctggtgagtgtcatgactgatgaggagggcgcggaatag

SEQ ID NO: 296037 - DNA, 3693 bp, Artificial Sequence
  derived and/or modified sequence
atgccttcaagcctgatgctggaggtaccagctcttgctgattttaatcgtgcgtggaccgagctgacagattggctgtccttacttgaccaggtaatcaagagtcaacgtgttatggtgggcgatctcgaggacatcaatgagatgataatcaagcagaaagccaccatgcaagatcttgagcagaggcgacctcaactagaagagctgattacagctgcccagaatcttaaaaataaaacctctaatcaggaggcccgaactatcataaccgataggatcgagcgcatccaaaaccaatgggacgaggtccaagaacacttacagaatagacgtcaacaactgaatgaaatgctcaaggattccactcagtggctggaggcaaaggaagaggccgaacaggtattggggcaagccagggccaaactcgagtcctggaaagagggcccttacaccgttgatgccattcagaagaaaatcactgagacaaaacagctggccaaggatctacgccaatggcagaccaatgtggatgtcgccaatgacctggcgttgaagctgcttcgagactactctgccgatgacacacgcaaagtgcacatgattaccgaaaatattaacgcatcttggagaagtatacataaacgcgtgtccgagcgggaagctgcgctggaggaaactcaccggttgctgcagcagttccccttagacctcgagaagttcctggcctggctaaccgaggcagaaacaacggccaacgtgctccaggacgccacacgtaaggaacgtctgctggaggacagcaagggcgtgaaggagcttatgaagcagtggcaggacttgcagggggagatcgaggcgcataccgacgtctaccacaatctggatgaaaattcgcagaagatacttagaagcctcgaaggcagtgacgacgcagttctcctgcagcgcaggctggacaacatgaattttaaatggtccgagttacggaagaagagtttgaacatccgctctcatctagaggcctcttccgaccagtggaagcgactgcatctatcacttcaggaattactggtctggttgcagctgaaggatgacgaacttagtagacaagctcccatcggcggagactttcccgctgttcaaaaacaaaacgacgtgcatagggcttttaagagggagcttaaaaccaaagaacctgtgattatgtcaaccctcgaaacggtgcggatcttcctgacggaacaacctctggaggggttggagaaactgtaccaagagccaagggagctgcccccagaggaaagggctcaaaacgtaactcgcctgctccgaaagcaggccgaggaagtcaacactgagtgggagaagctcaatctgcacagcgcggattggcagagaaagattgatgagactctcgagcgcttaagggagctgcaggaggctacggatgagctggatctgaagttgaggcaggccgaggttatcaaggggagctggcagcctgtgggcgacctgcttatagattcgctgcaggaccaccttgagaaggtgaaagcactacgtggcgaaattgcccctctgaaagagaatgtctcacatgtgaatgacctggccaggcagctgacaaccttgggcattcagctatccccttacaacctctcaaccttggaagatctgaatacacgctggaaattacttcaggttgctgtggaggatcgcgtaagacaactacatgaggcccaccgtgactttggcccagcttcacagcacttcctcagcacttctgtccagggcccatgggagagggcaatctccccaaacaaggttccatattacattaaccacgagacccagaccacatgttgggaccaccccaaaatgacggaactctaccagtctctggctgacttgaataacgtgcggttctccgcctacagaactgcgatgaagctccgccgactgcagaaggcactctgtctagatttactgtccctgtccgccgcttgtgacgcattggatcagcacaatctcaagcagaacgatcaacccatggatatccttcaaatcattaactgtttaaccacaatttatgaccgattggagcaggagcacaataatctggttaatgtacccctgtgtgtggacatgtgcctaaattggctcttaaacgtgtacgatacaggtaggactggtcgcatcagggtgttaagtttcaaaaccggtataatttccctatgcaaggcccatctggaggacaaataccgttatttgttcaagcaggtcgcctcctccactggcttttgcgaccaaaggagactgggtttgcttctccacgattccatccagattccacggcagctgggagaggtggcctcatttgggggaagcaatattgagccaagcgttcggagttgctttcagtttgctaacaacaagcctgagatagaggctgctcttttcctcgactggatgcggttggagccccagagcatggtttggctccccgtgctacatagagtggccgctgcggagaccgcaaaacatcaggcgaagtgtaacatttgtaaagagtgcccaattatcgggttcagatacagatctctgaaacacttcaactacgatatatgtcagtcttgcttcttttctggcagggtcgccaagggacacaagatgcattacccgatggtcgagtattgcacccccaccacaagtggtgaggatgtgagagacttcgccaaagtgctgaaaaataagtttaggacaaagcgctatttcgccaagcaccctcgcatgggctacttaccggttcagaccgtgttggagggagataacatggaaacacccgcttcttcaccccagctaagccacgatgatactcattcgcgcatcgaacattatgccagccgactggccgaaatggagaattcaaatggatcatacctgaacgattctatttcgccaaatgaaagtatcgacgatgagcacctccttattcagcactactgccagagcctgaatcaggatagccccctgtcccaaccgaggtctcctgcccagatattgatttccttggaaagcgaagagcggggtgagctggagcggatcctagccgatctggaggaggagaaccggaacctgcaggctgaatatgatcggctaaaacagcaacatgaacacaaggggctaagtcccttaccttctcctcccgaaatgatgccaacctcccctcaatctccacgcgacgccgagctgatcgccgaggccaaactcctcaggcaacataaaggaaggcttgaggctcggatgcagatcctggaagatcacaataaacagctggagtcacagctgcacaggctccgccagctgctggaacagccacaggctgaagccaaggtgaatggtacgacagttagcagtccgagtacgagtctgcagcggtccgattccagccagccgatgcttctccgggttgtcggctcccagaccagcgattccatgggcgaggaagacctgttatctccgccacaggatacaagcaccggccttgaggaggtgatggaacagctgaataacagtttcccttcgtcgcgaggacacaatgttgggtccctgtttcatatggcagacgatttgggacgggctatggaatccttagtgtctgttatgactgatgaggagggagcagaatag

SEQ ID NO: 296038 - DNA, 3690 bp, Artificial Sequence
  derived and/or modified sequence
atgcccagcagcctgatgctggaggtgcccgccctggccgacttcaaccgcgcctggaccgagctgaccgactggctgagcctgctggaccaggtgatcaagagccagcgcgtgatggtgggcgacctggaggacatcaacgagatgatcatcaagcagaaggccaccatgcaggacctggagcagcgccgcccccagctggaggagctgatcaccgccgcccagaacctgaagaacaagaccagcaaccaggaggcccgcaccatcatcaccgaccgcatcgagcgcatccagaaccagtgggacgaggtgcaggagcacctgcagaaccgccgccagcagctgaacgagatgctgaaggacagcacccagtggctggaggccaaggaggaggccgagcaggtgctgggccaggcccgcgccaagctggagagctggaaggagggcccctacaccgtggacgccatccagaagaagatcaccgagaccaagcagctggccaaggacctgcgccagtggcagaccaacgtggacgtggccaacgacctggccctgaagctgctgcgcgactacagcgccgacgacacccgcaaggtgcacatgatcaccgagaacatcaacgccagctggcgcagcatccacaagcgcgtgagcgagcgcgaggccgccctggaggagacccaccgcctgctgcagcagttccccctggacctggagaagttcctggcctggctgaccgaggccgagaccaccgccaacgtgctgcaggacgccacccgcaaggagcgcctgctggaggacagcaagggcgtgaaggagctgatgaagcagtggcaggacctgcagggcgagatcgaggcccacaccgacgtgtaccacaacctggacgagaacagccagaagatcctgcgcagcctggagggcagcgacgacgccgtgctgctgcagcgccgcctggacaacatgaacttcaagtggagcgagctgcgcaagaagagcctgaacatccgcagccacctggaggccagcagcgaccagtggaagcgcctgcacctgagcctgcaggagctgctggtgtggctgcagctgaaggacgacgagctgagccgccaggcccccatcggcggcgacttccccgccgtgcagaagcagaacgacgtgcaccgcgccttcaagcgcgagctgaagaccaaggagcccgtgatcatgagcaccctggagaccgtgcgcatcttcctgaccgagcagcccctggagggcctggagaagctgtaccaggagccccgcgagctgccccccgaggagcgcgcccagaacgtgacccgcctgctgcgcaagcaggccgaggaggtgaacaccgagtgggagaagctgaacctgcacagcgccgactggcagcgcaagatcgacgagaccctggagcgcctgcgcgagctgcaggaggccaccgacgagctggacctgaagctgcgccaggccgaggtgatcaagggcagctggcagcccgtgggcgacctgctgatcgacagcctgcaggaccacctggagaaggtgaaggccctgcgcggcgagatcgcccccctgaaggagaacgtgagccacgtgaacgacctggcccgccagctgaccaccctgggcatccagctgagcccctacaacctgagcaccctggaggacctgaacacccgctggaagctgctgcaggtggccgtggaggaccgcgtgcgccagctgcacgaggcccaccgcgacttcggccccgccagccagcacttcctgagcaccagcgtgcagggcccctgggagcgcgccatcagccccaacaaggtgccctactacatcaaccacgagacccagaccacctgctgggaccaccccaagatgaccgagctgtaccagagcctggccgacctgaacaacgtgcgcttcagcgcctaccgcaccgccatgaagctgcgccgcctgcagaaggccctgtgcctggacctgctgagcctgagcgccgcctgcgacgccctggaccagcacaacctgaagcagaacgaccagcccatggacatcctgcagatcatcaactgcctgaccaccatctacgaccgcctggagcaggagcacaacaacctggtgaacgtgcccctgtgcgtggacatgtgcctgaactggctgctgaacgtgtacgacaccggccgcaccggccgcatccgcgtgctgagcttcaagaccggcatcatcagcctgtgcaaggcccacctggaggacaagtaccgctacctgttcaagcaggtggccagcagcaccggcttctgcgaccagcgccgcctgggcctgctgctgcacgacagcatccagatcccccgccagctgggcgaggtggccagcttcggcggcagcaacatcgagcccagcgtgcgcagctgcttccagttcgccaacaacaagcccgagatcgaggccgccctgttcctggactggatgcgcctggagccccagagcatggtgtggctgcccgtgctgcaccgcgtggccgccgccgagaccgccaagcaccaggccaagtgcaacatctgcaaggagtgccccatcatcggcttccgctaccgcagcctgaagcacttcaactacgacatctgccagagctgcttcttcagcggccgcgtggccaagggccacaagatgcactaccccatggtggagtactgcacccccaccaccagcggcgaggacgtgcgcgacttcgccaaggtgctgaagaacaagttccgcaccaagcgctacttcgccaagcacccccgcatgggctacctgcccgtgcagaccgtgctggagggcgacaacatggagacccccgccagcagcccccagctgagccacgacgacacccacagccgcatcgagcactacgccagccgcctggccgagatggagaacagcaacggcagctacctgaacgacagcatcagccccaacgagagcatcgacgacgagcacctgctgatccagcactactgccagagcctgaaccaggacagccccctgagccagccccgcagccccgcccagatcctgatcagcctggagagcgaggagcgcggcgagctggagcgcatcctggccgacctggaggaggagaaccgcaacctgcaggccgagtacgaccgcctgaagcagcagcacgagcacaagggcctgagccccctgcccagcccccccgagatgatgcccaccagcccccagagcccccgcgacgccgagctgatcgccgaggccaagctgctgcgccagcacaagggccgcctggaggcccgcatgcagatcctggaggaccacaacaagcagctggagagccagctgcaccgcctgcgccagctgctggagcagccccaggccgaggccaaggtgaacggcaccaccgtgagcagccccagcaccagcctgcagcgcagcgacagcagccagcccatgctgctgcgcgtggtgggcagccagaccagcgacagcatgggcgaggaggacctgctgagccccccccaggacaccagcaccggcctggaggaggtgatggagcagctgaacaacagcttccccagcagccgcggccacaacgtgggcagcctgttccacatggccgacgacctgggccgcgccatggagagcctggtgagcgtgatgaccgacgaggagggcgccgag

SEQ ID NO: 296039 - DNA, 3693 bp, Artificial Sequence
  derived and/or modified sequence
atgcccagcagcctgatgctggaggtgcccgccctggccgacttcaacagagcctggaccgagctgaccgactggctgagcctgctggaccaggtgatcaagagccagagagtgatggtgggcgacctggaggacatcaacgagatgatcatcaagcagaaggccaccatgcaggacctggagcagagaagaccccagctggaggagctgatcaccgccgcccagaacctgaagaacaagaccagcaaccaggaggccagaaccatcatcaccgacagaatcgagagaatccagaaccagtgggacgaggtgcaggagcacctgcagaacagaagacagcagctgaacgagatgctgaaggacagcacccagtggctggaggccaaggaggaggccgagcaggtgctgggccaggccagagccaagctggagagctggaaggagggcccctacaccgtggacgccatccagaagaagatcaccgagaccaagcagctggccaaggacctgagacagtggcagaccaacgtggacgtggccaacgacctggccctgaagctgctgagagactacagcgccgacgacaccagaaaggtgcacatgatcaccgagaacatcaacgccagctggagaagcatccacaagagagtgagcgagagagaggccgccctggaggagacccacagactgctgcagcagttccccctggacctggagaagttcctggcctggctgaccgaggccgagaccaccgccaacgtgctgcaggacgccaccagaaaggagagactgctggaggacagcaagggcgtgaaggagctgatgaagcagtggcaggacctgcagggcgagatcgaggcccacaccgacgtgtaccacaacctggacgagaacagccagaagatcctgagaagcctggagggcagcgacgacgccgtgctgctgcagagaagactggacaacatgaacttcaagtggagcgagctgagaaagaagagcctgaacatcagaagccacctggaggccagcagcgaccagtggaagagactgcacctgagcctgcaggagctgctggtgtggctgcagctgaaggacgacgagctgagcagacaggcccccatcggcggcgacttccccgccgtgcagaagcagaacgacgtgcacagagccttcaagagagagctgaagaccaaggagcccgtgatcatgagcaccctggagaccgtgagaatcttcctgaccgagcagcccctggagggcctggagaagctgtaccaggagcccagagagctgccccccgaggagagagcccagaacgtgaccagactgctgagaaagcaggccgaggaggtgaacaccgagtgggagaagctgaacctgcacagcgccgactggcagagaaagatcgacgagaccctggagagactgagagagctgcaggaggccaccgacgagctggacctgaagctgagacaggccgaggtgatcaagggcagctggcagcccgtgggcgacctgctgatcgacagcctgcaggaccacctggagaaggtgaaggccctgagaggcgagatcgcccccctgaaggagaacgtgagccacgtgaacgacctggccagacagctgaccaccctgggcatccagctgagcccctacaacctgagcaccctggaggacctgaacaccagatggaagctgctgcaggtggccgtggaggacagagtgagacagctgcacgaggcccacagagacttcggccccgccagccagcacttcctgagcaccagcgtgcagggcccctgggagagagccatcagccccaacaaggtgccctactacatcaaccacgagacccagaccacctgctgggaccaccccaagatgaccgagctgtaccagagcctggccgacctgaacaacgtgagattcagcgcctacagaaccgccatgaagctgagaagactgcagaaggccctgtgcctggacctgctgagcctgagcgccgcctgcgacgccctggaccagcacaacctgaagcagaacgaccagcccatggacatcctgcagatcatcaactgcctgaccaccatctacgacagactggagcaggagcacaacaacctggtgaacgtgcccctgtgcgtggacatgtgcctgaactggctgctgaacgtgtacgacaccggcagaaccggcagaatcagagtgctgagcttcaagaccggcatcatcagcctgtgcaaggcccacctggaggacaagtacagatacctgttcaagcaggtggccagcagcaccggcttctgcgaccagagaagactgggcctgctgctgcacgacagcatccagatccccagacagctgggcgaggtggccagcttcggcggcagcaacatcgagcccagcgtgagaagctgcttccagttcgccaacaacaagcccgagatcgaggccgccctgttcctggactggatgagactggagccccagagcatggtgtggctgcccgtgctgcacagagtggccgccgccgagaccgccaagcaccaggccaagtgcaacatctgcaaggagtgccccatcatcggcttcagatacagaagcctgaagcacttcaactacgacatctgccagagctgcttcttcagcggcagagtggccaagggccacaagatgcactaccccatggtggagtactgcacccccaccaccagcggcgaggacgtgagagacttcgccaaggtgctgaagaacaagttcagaaccaagagatacttcgccaagcaccccagaatgggctacctgcccgtgcagaccgtgctggagggcgacaacatggagacccccgccagcagcccccagctgagccacgacgacacccacagcagaatcgagcactacgccagcagactggccgagatggagaacagcaacggcagctacctgaacgacagcatcagccccaacgagagcatcgacgacgagcacctgctgatccagcactactgccagagcctgaaccaggacagccccctgagccagcccagaagccccgcccagatcctgatcagcctggagagcgaggagagaggcgagctggagagaatcctggccgacctggaggaggagaacagaaacctgcaggccgagtacgacagactgaagcagcagcacgagcacaagggcctgagccccctgcccagcccccccgagatgatgcccaccagcccccagagccccagagacgccgagctgatcgccgaggccaagctgctgagacagcacaagggcagactggaggccagaatgcagatcctggaggaccacaacaagcagctggagagccagctgcacagactgagacagctgctggagcagccccaggccgaggccaaggtgaacggcaccaccgtgagcagccccagcaccagcctgcagagaagcgacagcagccagcccatgctgctgagagtggtgggcagccagaccagcgacagcatgggcgaggaggacctgctgagccccccccaggacaccagcaccggcctggaggaggtgatggagcagctgaacaacagcttccccagcagcagaggccacaacgtgggcagcctgttccacatggccgacgacctgggcagagccatggagagcctggtgagcgtgatgaccgacgaggagggcgccgagtag

SEQ ID NO: 296040 - DNA, 7339 bp, Artificial Sequence
  derived and/or modified sequence
acactagcaatggcaaagctttgtgcggaggcattgctggctgctctgaactaaaagcatccgtggggaccgaaagaggtttttgcacaccttattaaggaactccaggatggcattgggcagcggcaaactgttgtcagaacattgaatgcaactggggaagaaataattcagcaatcctcaaaaacagatgccagtattctacaggaaaaattgggaagcctgaatctgcggtggcaggaggtctgcaaacagctgtcagacagaaaaaagaggctagaagaacaaaagaatatcttgtcagaatttcaaagagatttaaatgaatttgttttatggttggaggaagcagataacattgctagtatcccacttgaacctggaaaagagcagcaactaaaagaaaagcttgagcaagtcaagttactggtggaagagttgcccctgcgccagggaattctcaaacaattaaatgaaactggaggacccgtgcttgtaagtgctcccataagcccagaagagcaagataaacttgaaaataagctcaagcagacaaatctccagtggataaaggtttccagagctttacctgagaaacaaggagaaattgaagctcaaataaaagaccttgggcagcttgaaaaaaagcttgaagaccttgaagagcagttaaatcatctgctgctgtggttatctcctattaggaatcagttggaaatttataaccaaccaaaccaagaaggaccatttgacgttaaggaaactgaaatagcagttcaagctaaacaaccggatgtggaagagattttgtctaaagggcagcatttgtacaaggaaaaaccagccactcagccagtgaagaggaagttagaagatctgagctctgagtggaaggcggtaaaccgtttacttcaagagctgagggcaaagcagcctgacctagctcctggactgaccactattggagcctctcctactcagactgttactctggtgacacaacctgtggttactaaggaaactgccatctccaaactagaaatgccatcttccttgatgttggaggtacctgctctggcagatttcaaccgggcttggacagaacttaccgactggctttctctgcttgatcaagttataaaatcacagagggtgatggtgggtgaccttgaggatatcaacgagatgatcatcaagcagaaggcaacaatgcaggatttggaacagaggcgtccccagttggaagaactcattaccgctgcccaaaatttgaaaaacaagaccagcaatcaagaggctagaacaatcattacggatcgaattgaaagaattcagaatcagtgggatgaagtacaagaacaccttcagaaccggaggcaacagttgaatgaaatgttaaaggattcaacacaatggctggaagctaaggaagaagctgagcaggtcttaggacaggccagagccaagcttgagtcatggaaggagggtccctatacagtagatgcaatccaaaagaaaatcacagaaaccaagcagttggccaaagacctccgccagtggcagacaaatgtagatgtggcaaatgacttggccctgaaacttctccgggattattctgcagatgataccagaaaagtccacatgataacagagaatatcaatgcctcttggagaagcattcataaaagggtgagtgagcgagaggctgctttggaagaaactcatagattactgcaacagttccccctggacctggaaaagtttcttgcctggcttacagaagctgaaacaactgccaatgtcctacaggatgctacccgtaaggaaaggctcctagaagactccaagggagtaaaagagctgatgaaacaatggcaagacctccaaggtgaaattgaagctcacacagatgtttatcacaacctggatgaaaacagccaaaaaatcctgagatccctggaaggttccgatgatgcagtcctgttacaaagacgtttggataacatgaacttcaagtggagtgaacttcggaaaaagtctctcaacattaggtcccatttggaagccagttctgaccagtggaagcgtctgcacctttctctgcaggaacttctggtgtggctacagctgaaagatgatgaattaagccggcaggcacctattggaggcgactttccagcagttcagaagcagaacgatgtacatagggccttcaagagggaattgaaaactaaagaacctgtaatcatgagtactcttgagactgtacgaatatttctgacagagcagcctttggaaggactagagaaactctaccaggagcccagagagctgcctcctgaggagagagcccagaatgtcactcggcttctacgaaagcaggctgaggaggtcaatactgagtgggaaaaattgaacctgcactccgctgactggcagagaaaaatagatgagacccttgaaagactccgggaacttcaagaggccacggatgagctggacctcaagctgcgccaagctgaggtgatcaagggatcctggcagcccgtgggcgatctcctcattgactctctccaagatcacctcgagaaagtcaaggcacttcgaggagaaattgcgcctctgaaagagaacgtgagccacgtcaatgaccttgctcgccagcttaccactttgggcattcagctctcaccgtataacctcagcactctggaagacctgaacaccagatggaagcttctgcaggtggccgtcgaggaccgagtcaggcagctgcatgaagcccacagggactttggtccagcatctcagcactttctttccacgtctgtccagggtccctgggagagagccatctcgccaaacaaagtgccctactatatcaaccacgagactcaaacaacttgctgggaccatcccaaaatgacagagctctaccagtctttagctgacctgaataatgtcagattctcagcttataggactgccatgaaactccgaagactgcagaaggccctttgcttggatctcttgagcctgtcagctgcatgtgatgccttggaccagcacaacctcaagcaaaatgaccagcccatggatatcctgcagattattaattgtttgaccactatttatgaccgcctggagcaagagcacaacaatttggtcaacgtccctctctgcgtggatatgtgtctgaactggctgctgaatgtttatgatacgggacgaacagggaggatccgtgtcctgtcttttaaaactggcatcatttccctgtgtaaagcacatttggaagacaagtacagataccttttcaagcaagtggcaagttcaacaggattttgtgaccagcgcaggctgggcctccttctgcatgattctatccaaattccaagacagttgggtgaagttgcatcctttgggggcagtaacattgagccaagtgtccggagctgcttccaatttgctaataataagccagagatcgaagcggccctcttcctagactggatgagactggaaccccagtccatggtgtggctgcccgtcctgcacagagtggctgctgcagaaactgccaagcatcaggccaaatgtaacatctgcaaagagtgtccaatcattggattcaggtacaggagtctaaagcactttaattatgacatctgccaaagctgctttttttctggtcgagttgcaaaaggccataaaatgcactatcccatggtggaatattgcactccgactacatcaggagaagatgttcgagactttgccaaggtactaaaaaacaaatttcgaaccaaaaggtattttgcgaagcatccccgaatgggctacctgccagtgcagactgtcttagagggggacaacatggaaacgcctgcctcgtcccctcagctttcacacgatgatactcattcacgcattgaacattatgctagcaggctagcagaaatggaaaacagcaatggatcttatctaaatgatagcatctctcctaatgagagcatagatgatgaacatttgttaatccagcattactgccaaagtttgaaccaggactcccccctgagccagcctcgtagtcctgcccagatcttgatttccttagagagtgaggaaagaggggagctagagagaatcctagcagatcttgaggaagaaaacaggaatctgcaagcagaatatgaccgtctaaagcagcagcacgaacataaaggcctgtccccactgccgtcccctcctgaaatgatgcccacctctccccagagtccccgggatgctgagctcattgctgaggccaagctactgcgtcaacacaaaggccgcctggaagccaggatgcaaatcctggaagaccacaataaacagctggagtcacagttacacaggctaaggcagctgctggagcaaccccaggcagaggccaaagtgaatggcacaacggtgtcctctccttctacctctctacagaggtccgacagcagtcagcctatgctgctccgagtggttggcagtcaaacttcggactccatgggtgaggaagatcttctcagtcctccccaggacacaagcacagggttagaggaggtgatggagcaactcaacaactccttccctagttcaagaggacacaatgtaggaagtcttttccacatggcagatgatttgggcagagcgatggagtccttagtatcagtcatgacagatgaagaaggagcagaataaatgttttacaactcctgattcccgcatggtttttataatattcatacaacaaagaggattagacagtaagagtttacaagaaataaatctatatttttgtgaagggtagtggtattatactgtagatttcagtagtttctaagtctgttattgttttgttaacaatggcaggttttacacgtctatgcaattgtacaaaaaagttataagaaaactacatgtaaaatcttgatagctaaataacttgccatttctttatatggaacgcattttgggttgtttaaaaatttataacagttataaagaaagattgtaaactaaagtgtgctttataaaaaaaagttgtttataaaaacccctaaaaacaaaacaaacacacacacacacacatacacacacacacacaaaactttgaggcagcgcattgttttgcatccttttggcgtgatatccatatgaaattcatggctttttctttttttgcatattaaagataagacttcctctaccaccacaccaaatgactactacacactgctcatttgagaactgtcagctgagtggggcaggcttgagttttcatttcatatatctatatgtctataagtatataaatactatagttatatagataaagagatacgaatttctatagactgactttttccattttttaaatgttcatgtcacatcctaatagaaagaaattacttctagtcagtcatccaggcttacctgcttggtctagaatggatttttcccggagccggaagccaggaggaaactacaccacactaaaacattgtctacagctccagatgtttctcattttaaacaactttccactgacaacgaaagtaaagtaaagtattggatttttttaaagggaacatgtgaatgaatacacaggacttattatatcagagtgagtaatcggttggttggttgattgattgattgattgatacattcagcttcctgctgctagcaatgccacgatttagatttaatgatgcttcagtggaaatcaatcagaaggtattctgaccttgtgaacatcagaaggtattttttaactcccaagcagtagcaggacgatgatagggctggagggctatggattcccagcccatccctgtgaaggagtaggccactctttaagtgaaggattggatgattgttcataatacataaagttctctgtaattacaactaaattattatgccctcttctcacagtcaaaaggaactgggtggtttggtttttgttgcttttttagatttattgtcccatgtgggatgagtttttaaatgccacaagacataatttaaaataaataaactttgggaaaaggtgtaaaacagtagccccatcacatttgtgatactgacaggtatcaacccagaagcccatgaactgtgtttccatcctttgcatttctctgcgagtagttccacacaggtttgtaagtaagtaagaaagaaggcaaattgattcaaatgttacaaaaaaacccttcttggtggattagacaggttaaatatataaacaaacaaacaaaaattgctcaaaaaagaggagaaaagctcaagaggaaaagctaaggactggtaggaaaaagctttactctttcatgccattttatttctttttgatttttaaatcattcattcaatagataccaccgtgtgacctataattttgcaaatctgttacctctgacatcaagtgtaattagcttttggagagtgggctgacatcaagtgtaattagcttttggagagtgggttttgtccattattaataattaattaattaacatcaaacacggcttctcatgctatttctacctcactttggttttggggtgttcctgataattgtgcacacctgagttcacagcttcaccacttgtccattgcgttattttctttttcctttataattctttctttttccttcataattttcaaaagaaaacccaaagctctaaggtaacaaattaccaaattacatgaagatttggtttttgtcttgcatttttttcctttatgtgacgctggaccttttctttacccaaggatttttaaaactcagatttaaaacaaggggttactttacatcctactaagaagtttaagtaagtaagtttcattctaaaatcagaggtaaatagagtgcataaataattttgttttaatctttttgtttttcttttagacacattagctctggagtgagtctgtcataatatttgaacaaaaattgagagctttattgctgcattttaagcataattaatttggacattatttcgtgttgtgttctttataaccaccaagtattaaactgtaaatcataatgtaactgaagcataaacatcacatggcatgttttgtcattgttttcaggtactgagttcttacttgagtatcataatatattgtgttttaacaccaacactgtaacatttacgaattatttttttaaacttcagttttactgcattttcacaacatatcagacttcaccaaatatatgccttactattgtattatagtactgctttactgtgtatctcaataaagcacgcagttatgttac

SEQ ID NO: 296041 - protein, 1243 aa, Artificial Sequence
  derived and/or modified sequence
MPSSLMLEVPALADFNRAWTELTDWLSLLDQVIKSQRVMVGDLEDINEMIIKQKATMQDLEQRRPQLEELITAAQNLKNKTSNQEARTIITDRIERIQNQWDEVQEHLQNRRQQLNEMLKDSTQWLEAKEEAEQVLGQARAKLESWKEGPYTVDAIQKKITETKQLAKDLRQWQTNVDVANDLALKLLRDYSADDTRKVHMITENINASWRSIHKRVSEREAALEETHRLLQQFPLDLEKFLAWLTEAETTANVLQDATRKERLLEDSKGVKELMKQWQDLQGEIEAHTDVYHNLDENSQKILRSLEGSDDAVLLQRRLDNMNFKWSELRKKSLNIRSHLEASSDQWKRLHLSLQELLVWLQLKDDELSRQAPIGGDFPAVQKQNDVHRAFKRELKTKEPVIMSTLETVRIFLTEQPLEGLEKLYQEPRELPPEERAQNVTRLLRKQAEEVNTEWEKLNLHSADWQRKIDETLERLRELQEATDELDLKLRQAEVIKGSWQPVGDLLIDSLQDHLEKVKALRGEIAPLKENVSHVNDLARQLTTLGIQLSPYNLSTLEDLNTRWKLLQVAVEDRVRQLHEAHRDFGPASQHFLSTSVQGPWERAISPNKVPYYINHETQTTCWDHPKMTELYQSLADLNNVRFSAYRTAMKLRRLQKALCLDLLSLSAACDALDQHNLKQNDQPMDILQIINCLTTIYDRLEQEHNNLVNVPLCVDMCLNWLLNVYDTGRTGRIRVLSFKTGIISLCKAHLEDKYRYLFKQVASSTGFCDQRRLGLLLHDSIQIPRQLGEVASFGGSNIEPSVRSCFQFANNKPEIEAALFLDWMRLEPQSMVWLPVLHRVAAAETAKHQAKCNICKECPIIGFRYRSLKHFNYDICQSCFFSGRVAKGHKMHYPMVEYCTPTTSGEDVRDFAKVLKNKFRTKRYFAKHPRMGYLPVQTVLEGDNMETPVTLINFWPVDSAPASSPQLSHDDTHSRIEHYASRLAEMENSNGSYLNDSISPNESIDDEHLLIQHYCQSLNQDSPLSQPRSPAQILISLESEERGELERILADLEEENRNLQAEYDRLKQQHEHKGLSPLPSPPEMMPTSPQSPRDAELIAEAKLLRQHKGRLEARMQILEDHNKQLESQLHRLRQLLEQPQAEAKVNGTTVSSPSTSLQRSDSSQPMLLRVVGSQTSDSMGEEDLLSPPQDTSTGLEEVMEQLNNSFPSSRGHNVGSLFHMADDLGRAMESLVSVMTDEEGAE

SEQ ID NO: 296042 - DNA, 7378 bp, Artificial Sequence
  derived and/or modified sequence
acactagcaatggcaaagctttgtgcggaggcattgctggctgctctgaactaaaagcatccgtggggaccgaaagaggtttttgcacaccttattaaggaactccaggatggcattgggcagcggcaaactgttgtcagaacattgaatgcaactggggaagaaataattcagcaatcctcaaaaacagatgccagtattctacaggaaaaattgggaagcctgaatctgcggtggcaggaggtctgcaaacagctgtcagacagaaaaaagaggctagaagaacaaaagaatatcttgtcagaatttcaaagagatttaaatgaatttgttttatggttggaggaagcagataacattgctagtatcccacttgaacctggaaaagagcagcaactaaaagaaaagcttgagcaagtcaagttactggtggaagagttgcccctgcgccagggaattctcaaacaattaaatgaaactggaggacccgtgcttgtaagtgctcccataagcccagaagagcaagataaacttgaaaataagctcaagcagacaaatctccagtggataaaggtttccagagctttacctgagaaacaaggagaaattgaagctcaaataaaagaccttgggcagcttgaaaaaaagcttgaagaccttgaagagcagttaaatcatctgctgctgtggttatctcctattaggaatcagttggaaatttataaccaaccaaaccaagaaggaccatttgacgttcaggaaactgaaatagcagttcaagctaaacaaccggatgtggaagagattttgtctaaagggcagcatttgtacaaggaaaaaccagccactcagccagtgaagaggaagttagaagatctgagctctgagtggaaggcggtaaaccgtttacttcaagagctgagggcaaagcagcctgacctagctcctggactgaccactattggagcctctcctactcagactgttactctggtgacacaacctgtggttactaaggaaactgccatctccaaactagaaatgccatcttccttgatgttggaggtacctgctctggcagatttcaaccgggcttggacagaacttaccgactggctttctctgcttgatcaagttataaaatcacagagggtgatggtgggtgaccttgaggatatcaacgagatgatcatcaagcagaaggcaacaatgcaggatttggaacagaggcgtccccagttggaagaactcattaccgctgcccaaaatttgaaaaacaagaccagcaatcaagaggctagaacaatcattacggatcgaattgaaagaattcagaatcagtgggatgaagtacaagaacaccttcagaaccggaggcaacagttgaatgaaatgttaaaggattcaacacaatggctggaagctaaggaagaagctgagcaggtcttaggacaggccagagccaagcttgagtcatggaaggagggtccctatacagtagatgcaatccaaaagaaaatcacagaaaccaagcagttggccaaagacctccgccagtggcagacaaatgtagatgtggcaaatgacttggccctgaaacttctccgggattattctgcagatgataccagaaaagtccacatgataacagagaatatcaatgcctcttggagaagcattcataaaagggtgagtgagcgagaggctgctttggaagaaactcatagattactgcaacagttccccctggacctggaaaagtttcttgcctggcttacagaagctgaaacaactgccaatgtcctacaggatgctacccgtaaggaaaggctcctagaagactccaagggagtaaaagagctgatgaaacaatggcaagacctccaaggtgaaattgaagctcacacagatgtttatcacaacctggatgaaaacagccaaaaaatcctgagatccctggaaggttccgatgatgcagtcctgttacaaagacgtttggataacatgaacttcaagtggagtgaacttcggaaaaagtctctcaacattaggtcccatttggaagccagttctgaccagtggaagcgtctgcacctttctctgcaggaacttctggtgtggctacagctgaaagatgatgaattaagccggcaggcacctattggaggcgactttccagcagttcagaagcagaacgatgtacatagggccttcaagagggaattgaaaactaaagaacctgtaatcatgagtactcttgagactgtacgaatatttctgacagagcagcctttggaaggactagagaaactctaccaggagcccagagagctgcctcctgaggagagagcccagaatgtcactcggcttctacgaaagcaggctgaggaggtcaatactgagtgggaaaaattgaacctgcactccgctgactggcagagaaaaatagatgagacccttgaaagactccaggaacttcaagaggccacggatgagctggacctcaagctgcgccaagctgaggtgatcaagggatcctggcagcccgtgggcgatctcctcattgactctctccaagatcacctcgagaaagtcaaggcacttcgaggagaaattgcgcctctgaaagagaacgtgagccacgtcaatgaccttgctcgccagcttaccactttgggcattcagctctcaccgtataacctcagcactctggaagacctgaacaccagatggaagcttctgcaggtggccgtcgaggaccgagtcaggcagctgcatgaagcccacagggactttggtccagcatctcagcactttctttccacgtctgtccagggtccctgggagagagccatctcgccaaacaaagtgccctactatatcaaccacgagactcaaacaacttgctgggaccatcccaaaatgacagagctctaccagtctttagctgacctgaataatgtcagattctcagcttataggactgccatgaaactccgaagactgcagaaggccctttgcttggatctcttgagcctgtcagctgcatgtgatgccttggaccagcacaacctcaagcaaaatgaccagcccatggatatcctgcagattattaattgtttgaccactatttatgaccgcctggagcaagagcacaacaatttggtcaacgtccctctctgcgtggatatgtgtctgaactggctgctgaatgtttatgatacgggacgaacagggaggatccgtgtcctgtcttttaaaactggcatcatttccctgtgtaaagcacatttggaagacaagtacagataccttttcaagcaagtggcaagttcaacaggattttgtgaccagcgcaggctgggcctccttctgcatgattctatccaaattccaagacagttgggtgaagttgcatcctttgggggcagtaacattgagccaagtgtccggagctgcttccaatttgctaataataagccagagatcgaagcggccctcttcctagactggatgagactggaaccccagtccatggtgtggctgcccgtcctgcacagagtggctgctgcagaaactgccaagcatcaggccaaatgtaacatctgcaaagagtgtccaatcattggattcaggtacaggagtctaaagcactttaattatgacatctgccaaagctgctttttttctggtcgagttgcaaaaggccataaaatgcactatcccatggtggaatattgcactccgactacatcaggagaagatgttcgagactttgccaaggtactaaaaaacaaatttcgaaccaaaaggtattttgcgaagcatccccgaatgggctacctgccagtgcagactgtcttagagggggacaacatggaaactcccgttactctgatcaacttctggccagtagattctgcgcctgcctcgtcccctcagctttcacacgatgatactcattcacgcattgaacattatgctagcaggctagcagaaatggaaaacagcaatggatcttatctaaatgatagcatctctcctaatgagagcatagatgatgaacatttgttaatccagcattactgccaaagtttgaaccaggactcccccctgagccagcctcgtagtcctgcccagatcttgatttccttagagagtgaggaaagaggggagctagagagaatcctagcagatcttgaggaagaaaacaggaatctgcaagcagaatatgaccgtctaaagcagcagcacgaacataaaggcctgtccccactgccgtcccctcctgaaatgatgcccacctctccccagagtccccgggatgctgagctcattgctgaggccaagctactgcgtcaacacaaaggccgcctggaagccaggatgcaaatcctggaagaccacaataaacagctggagtcacagttacacaggctaaggcagctgctggagcaaccccaggcagaggccaaagtgaatggcacaacggtgtcctctccttctacctctctacagaggtccgacagcagtcagcctatgctgctccgagtggttggcagtcaaacttcggactccatgggtgaggaagatcttctcagtcctccccaggacacaagcacagggttagaggaggtgatggagcaactcaacaactccttccctagttcaagaggacacaatgtaggaagtcttttccacatggcagatgatttgggcagagcgatggagtccttagtatcagtcatgacagatgaagaaggagcagaataaatgttttacaactcctgattcccgcatggtttttataatattcatacaacaaagaggattagacagtaagagtttacaagaaataaatctatatttttgtgaagggtagtggtattatactgtagatttcagtagtttctaagtctgttattgttttgttaacaatggcaggttttacacgtctatgcaattgtacaaaaaagttataagaaaactacatgtaaaatcttgatagctaaataacttgccatttctttatatggaacgcattttgggttgtttaaaaatttataacagttataaagaaagattgtaaactaaagtgtgctttataaaaaaaagttgtttataaaaacccctaaaaacaaaacaaacacacacacacacacatacacacacacacacaaaactttgaggcagcgcattgttttgcatccttttggcgtgatatccatatgaaattcatggctttttctttttttgcatattaaagataagacttcctctaccaccacaccaaatgactactacacactgctcatttgagaactgtcagctgagtggggcaggcttgagttttcatttcatatatctatatgtctataagtatataaatactatagttatatagataaagagatacgaatttctatagactgactttttccattttttaaatgttcatgtcacatcctaatagaaagaaattacttctagtcagtcatccaggcttacctgcttggtctagaatggatttttcccggagccggaagccaggaggaaactacaccacactaaaacattgtctacagctccagatgtttctcattttaaacaactttccactgacaacgaaagtaaagtaaagtattggatttttttaaagggaacatgtgaatgaatacacaggacttattatatcagagtgagtaatcggttggttggttgattgattgattgattgatacattcagcttcctgctgctagcaatgccacgatttagatttaatgatgcttcagtggaaatcaatcagaaggtattctgaccttgtgaacatcagaaggtattttttaactcccaagcagtagcaggacgatgatagggctggagggctatggattcccagcccatccctgtgaaggagtaggccactctttaagtgaaggattggatgattgttcataatacataaagttctctgtaattacaactaaattattatgccctcttctcacagtcaaaaggaactgggtggtttggtttttgttgcttttttagatttattgtcccatgtgggatgagtttttaaatgccacaagacataatttaaaataaataaactttgggaaaaggtgtaaaacagtagccccatcacatttgtgatactgacaggtatcaacccagaagcccatgaactgtgtttccatcctttgcatttctctgcgagtagttccacacaggtttgtaagtaagtaagaaagaaggcaaattgattcaaatgttacaaaaaaacccttcttggtggattagacaggttaaatatataaacaaacaaacaaaaattgctcaaaaaagaggagaaaagctcaagaggaaaagctaaggactggtaggaaaaagctttactctttcatgccattttatttctttttgatttttaaatcattcattcaatagataccaccgtgtgacctataattttgcaaatctgttacctctgacatcaagtgtaattagcttttggagagtgggctgacatcaagtgtaattagcttttggagagtgggttttgtccattattaataattaattaattaacatcaaacacggcttctcatgctatttctacctcactttggttttggggtgttcctgataattgtgcacacctgagttcacagcttcaccacttgtccattgcgttattttctttttcctttataattctttctttttccttcataattttcaaaagaaaacccaaagctctaaggtaacaaattaccaaattacatgaagatttggtttttgtcttgcatttttttcctttatgtgacgctggaccttttctttacccaaggatttttaaaactcagatttaaaacaaggggttactttacatcctactaagaagtttaagtaagtaagtttcattctaaaatcagaggtaaatagagtgcataaataattttgttttaatctttttgtttttcttttagacacattagctctggagtgagtctgtcataatatttgaacaaaaattgagagctttattgctgcattttaagcataattaatttggacattatttcgtgttgtgttctttataaccaccaagtattaaactgtaaatcataatgtaactgaagcataaacatcacatggcatgttttgtcattgttttcaggtactgagttcttacttgagtatcataatatattgtgttttaacaccaacactgtaacatttacgaattatttttttaaacttcagttttactgcattttcacaacatatcagacttcaccaaatatatgccttactattgtattatagtactgctttactgtgtatctcaataaagcacgcagttatgttac

SEQ ID NO: 296043 - DNA, 3732 bp, Artificial Sequence
  derived and/or modified sequence
atgccttcaagcctgatgctagaggtccccgctcttgccgacttcaaccgggcatggactgagcttacagactggcttagcctgctggaccaggtgatcaagtctcagagggtgatggtaggagacttggaggacattaatgagatgatcatcaagcaaaaggcaaccatgcaggatttagagcagaggcgaccccagctggaagaactgatcaccgcagcacaaaacctcaaaaataagacttccaaccaagaggcaagaacgattatcaccgaccgtatcgagagaattcaaaatcagtgggacgaggttcaggagcatttgcagaatcggaggcagcagctgaacgagatgctgaaggacagtacacagtggcttgaagccaaggaagaggctgagcaggtgcttggtcaggcgcgtgctaagctggaaagttggaaggagggtccttataccgtcgacgcgatacaaaagaagattaccgagaccaagcagttggctaaggatctgcggcagtggcagacaaacgtggacgtggcaaacgacttggctttaaaactattgcgtgactatagtgccgatgacacccgcaaggtacacatgatcaccgagaatatcaatgcttcgtggaggagcatacacaaaagggtgtccgaacgcgaggctgctttggaagagacccatcgcctgcttcagcaatttcccctggatctagagaagttcctggcttggctcactgaagcggagactacagccaacgtgcttcaggatgctacccggaaggagcgactgctcgaggattccaaaggagtcaaggagttgatgaagcagtggcaggatttacaaggcgagatagaggcacacactgacgtttaccacaaccttgatgagaatagccagaagattctgaggtctctggagggctctgatgatgccgtactgctgcaaaggaggttagacaacatgaacttcaagtggtcagaactaaggaagaaaagtcttaacatacggtcacatctggaagcaagctctgaccaatggaaaagattgcacctgagcctgcaggagctgttagtgtggcttcaactgaaggatgatgaattgagccggcaagcccccattggcggagacttccccgcggtgcagaaacagaacgacgtgcatcgggcttttaagcgggagctcaagaccaaggagccagttatcatgtccaccctcgaaacagtgcgtatctttctgaccgagcagcccctcgaggggcttgagaagttatatcaagaaccccgggaactcccccccgaagaaagagcccagaatgtgacccggctattgagaaaacaggctgaagaggtaaatacagagtgggagaaactgaatctgcattcagctgactggcagaggaaaatcgacgagaccctggaacgcttaagggagttgcaggaggccaccgacgaactcgatctgaagctaaggcaagcggaagttatcaagggctcttggcagcccgtgggagatcttctgatcgactcacttcaagatcacctggagaaggtaaaggcgctccgtggcgaaatcgctccgctcaaggagaatgtgtcacatgtgaacgacctagctcgccagctgactacgctgggcatacaactgtccccatacaatttgtccaccttagaggatttgaataccaggtggaaactccttcaggtggccgtagaagatagagtacgacaactccacgaggcccacagagacttcggtcctgctagtcaacacttcctgtccactagcgtgcagggaccatgggagcgagcaattagccctaataaagtgccttattacattaaccacgagacccaaacgacttgttgggatcatcctaagatgaccgagctgtaccaaagtctagccgatctgaataatgttcggttcagcgcatacaggaccgccatgaaactgcgcaggcttcagaaagctctgtgtctggatttgctgtcattgagtgctgcatgcgatgccctggatcagcataatctgaagcaaaacgatcaaccaatggacatcctgcaaatcataaactgtctgactactatttatgaccgcctggagcaagagcacaacaacctcgttaacgtgccactctgcgtcgacatgtgcctcaactggttgctgaacgtgtacgacacaggcagaacgggtaggatccgcgtactgtcgtttaaaacgggcatcattagtctttgcaaagcccatctagaggataagtatcgctatctgtttaagcaggttgcatcaagcacaggtttctgtgaccagcggaggctcgggcttctcctccatgactctatccagatccccaggcagttaggggaggtagccagcttcgggggaagcaacatcgaaccttctgtgcgcagctgtttccagttcgctaataacaaacccgagatcgaagctgctctgtttttagattggatgagacttgaaccacagagcatggtttggctgcccgtccttcaccgagtagcagcagcagaaaccgccaaacatcaggctaaatgcaacatttgcaaggagtgccctattatcggctttaggtaccgctccctgaagcactttaattacgatatttgccagagctgtttcttttctggtcgagttgccaagggtcacaaaatgcactatccaatggttgagtactgtactcccaccacgtcaggggaggatgtgagagactttgcaaaagtccttaagaacaagttccggaccaagcgctactttgccaagcacccacggatgggatatctgcccgtgcagacagttcttgaaggggacaatatggagactccagttaccctcatcaatttctggcccgtggactctgcacctgcctctagcccacagctctcccacgacgacacgcattctcgaatcgagcactacgcatccagactcgcggagatggagaatagcaatggaagttatttaaatgatagtatttcccccaacgagtccatcgatgatgagcatctgctgatccaacattactgccagagcctcaaccaggatagcccattatcccagccccgctctccggcccagatactcatcagtctggagtccgaagaacgaggggagttggaacggattctggccgacttggaagaggagaatcgaaaccttcaggctgagtatgatcgattgaagcaacagcacgagcataaaggcctctcgccactgccttcacccccagagatgatgcctacaagtccccagtcgccgcgagacgccgaactgattgcggaggctaagctcttgcgacaacacaaaggacggttggaggccaggatgcaaatattggaggaccacaataagcagctcgagagccaacttcatcggctgcgacagctgctggagcagcctcaggctgaggctaaggtcaatgggactaccgtgagctctccaagcactagcctgcagaggtccgatagctcgcagccaatgctcctgcgcgtggtcggatctcagacctcggactctatgggcgaggaagatctgctttcaccaccccaggatacctccacgggacttgaagaggtaatggagcagctgaataattcttttccttcgtccagaggacacaatgtcgggtcactcttccacatggcagacgatctgggtcgggcaatggaaagtttagtgtctgtgatgacagatgaggaaggagccgaatag

SEQ ID NO: 296044 - DNA, 3732 bp, Artificial Sequence
  derived and/or modified sequence
atgcccagcagcctgatgctggaggtgcctgccctggccgacttcaacagagcctggacagagctgacagactggctgagcctgctggaccaggtgatcaagagccagagggtgatggtgggggacctggaggacatcaatgagatgatcatcaagcagaaggccaccatgcaggacctggagcagaggcggccccagctggaggagctgatcacagctgcccagaacctgaagaacaagaccagcaaccaggaggcccggaccatcatcacagaccgcatcgagcgcatccagaaccagtgggatgaggtgcaggagcacctgcagaacagacggcagcagctgaatgagatgctgaaggacagcacccagtggctggaggccaaggaggaggccgagcaggtgctgggccaggcccgggccaagctggagagctggaaggagggcccctacacagtggatgccatccagaagaagatcacagagaccaagcagctggccaaggacctgcggcagtggcagaccaacgtggatgtggccaatgacctggccctgaagctgctgcgggactacagcgcagatgacaccaggaaggtgcacatgatcacagagaacatcaatgcctcctggaggagcatccacaagagggtgtctgagcgggaggccgccctggaggagacccaccggctgctgcagcagttccccctggacctggagaagttcctggcctggctgacagaggccgagaccacagccaacgtgctgcaggatgccaccaggaaggagcggctgctggaggacagcaaaggagtgaaggagctgatgaagcagtggcaggacctgcagggcgagattgaggcccacacagatgtgtaccacaacctggatgagaacagccagaagatcctgcggagcctggagggcagtgatgatgctgtgctgctgcagaggcggctggacaacatgaacttcaagtggagcgagctgaggaagaagagcctgaacatccgcagccacctggaggccagcagtgaccagtggaagaggctgcacctgagcctgcaggagctgctggtgtggctgcagctgaaggatgatgagctgagccggcaggcccccatcggcggggacttccctgctgtgcagaagcagaatgatgtgcaccgggccttcaagcgggagctgaagaccaaggagcccgtcatcatgagcaccctggagaccgtgcgcatcttcctgacagagcagcccctggagggcctggagaagctgtaccaggagccccgggagctgcccccagaggagcgggcccagaatgtgacccggctgctgaggaagcaggccgaggaggtgaacacagagtgggagaagctgaacctgcacagcgctgactggcagaggaagattgatgagaccctggagcggctgcgggagctgcaggaggccacagatgagctggacctgaagctgcggcaggccgaggtgatcaagggctcctggcagcctgtgggggacctgctgattgacagcctgcaggaccacctggagaaggtgaaggccctgcggggggagatcgcccccctgaaggaaaatgtgagccacgtgaatgacctggcccggcagctgaccaccctgggcatccagctgagcccctacaacctgagcaccctggaggacctgaacacccgctggaagctgctgcaggtggccgtggaggacagagtgcggcagctgcacgaggcccaccgggactttggacctgccagccagcacttcctgagcacctctgtgcagggcccctgggagcgggccatcagccccaacaaggtgccctactacatcaaccacgagacccagaccacctgctgggaccaccccaagatgacagagctgtaccagagcctggccgacctgaacaacgtgcgcttcagcgcctacagaacagccatgaagctgcggcggctgcagaaggccctgtgcctggacctgctgagcctgtctgctgcctgtgatgccctggaccagcacaacctgaagcagaatgaccagcccatggacatcctgcagatcatcaactgcctgaccaccatctatgaccggctggagcaggagcacaacaacctggtgaatgtgcccctgtgtgtggacatgtgcctgaactggctgctgaatgtgtatgacaccggccgcacaggccgcatccgggtgctgtccttcaagacaggcatcatcagcctgtgcaaggcccacctggaggacaagtaccgctacctgttcaagcaggtggccagcagcacaggcttctgtgaccagaggcggctgggcctgctgctgcatgacagcatccagatcccccggcagctgggggaggtggccagctttggaggcagcaacatcgagcccagcgtgcgcagctgcttccagtttgccaacaacaagccagaaattgaggccgccctcttcctggactggatgaggctggagccccagagcatggtgtggctgcctgtgctgcaccgggtggccgctgctgagacagccaagcaccaggccaagtgcaacatctgcaaggagtgccccatcatcggcttccgctaccgcagcctgaagcacttcaactatgacatctgccagagctgcttcttcagcggccgggtggccaagggccacaagatgcactaccccatggtggagtactgcacccccaccaccagcggagaagatgtgcgggactttgccaaggtgctgaagaacaagttccgcaccaagcgctactttgccaagcaccccaggatgggctacctgcctgtgcagacagtgctggagggggacaacatggagacccctgtgaccctcatcaacttctggcctgtggacagcgccccagccagcagcccccagctgagccatgatgacacccacagcagaattgagcactacgccagccggctggccgagatggagaacagcaatggcagctacctgaatgacagcatcagccccaatgaaagcattgatgatgagcacctgctgatccagcactactgccagagcctgaaccaggacagccccctgagccagcccaggagccctgcccagatcctgatcagcctggagagcgaggagcggggggagctggagcgcatcctggccgacctggaggaggagaacagaaacctgcaggccgagtatgaccggctgaagcagcagcacgagcacaagggcctgagccccctgcccagccccccagagatgatgcccaccagcccccagagccccagagatgctgagctgattgctgaggccaagctgctgcggcagcacaagggccgcctggaggccaggatgcagatcctggaggaccacaacaagcagctggagagccagctgcaccggctgcggcagctgctggagcagccccaggccgaggccaaggtgaatggcaccaccgtgagcagccccagcaccagcctgcagaggagtgacagcagccagcccatgctgctgcgggtggtgggcagccagaccagtgacagcatgggagaggaggacctgctgagccccccccaggacaccagcacaggcctggaggaggtgatggagcagctgaacaacagcttccccagcagccggggccacaacgtgggcagcctcttccacatggctgatgacctgggccgggccatggagagcctggtgtctgtgatgacagatgaggagggcgctgagtag

SEQ ID NO: 296045 - DNA, 3732 bp, Artificial Sequence
  derived and/or modified sequence
atgcccagcagcctgatgctggaggtgcccgccctggccgacttcaacagagcctggactgagctcactgattggctgagtttgcttgaccaggtgatcaagtcacagcgggtcatggtcggagaccttgaagacattaacgagatgattatcaaacagaaagctaccatgcaggacctggagcagaggagaccccagctcgaggagctgattacggctgctcaaaatctgaaaaacaaaacaagcaaccaagaggcccgcactataattaccgataggattgagaggatccaaaatcagtgggacgaagtacaggaacacctgcaaaacagacgccaacagctgaacgagatgctcaaggacagtacccagtggctcgaagctaaggaagaggccgaacaagtcctgggacaggccagagctaagttggaatcttggaaggaagggccgtatacagtcgatgcaatccagaaaaagattaccgagacgaagcaactcgcgaaagatctgaggcagtggcaaacaaacgtggacgtggcaaatgacctcgctttgaagctgcttagggattacagtgccgatgacacccggaaagtgcatatgatcaccgaaaacatcaacgcctcttggaggtcaattcacaaacgtgtgtcggaaagagaggcagctctggaagagacacatagactcctgcagcaattccctctagacttggagaagttcctggcctggctcaccgaggcggaaaccacagccaatgtgttacaggacgccactagaaaagagcggctgttggaggactcaaaaggcgttaaggaactcatgaaacagtggcaagacctccagggcgaaatcgaggctcacactgacgtgtaccacaacctggacgagaatagccagaaaatcctcaggtctctagaaggctctgatgatgccgtactgctccagcggagacttgataacatgaactttaaatggagcgagcttcgcaagaagtccctcaacattcgatcccacctcgaggcatcatcagatcagtggaaacgcttgcacctctcgctccaggaactcctagtgtggcttcaacttaaagacgacgaactcagtcgacaggcgccaattggaggcgacttccccgccgtgcagaagcagaacgacgtgcaccgcgcatttaagcgcgaactgaaaacaaaggagcctgtgattatgagtacactggagacagtgagaatcttcttaacagagcagcctctcgagggactggagaagctctatcaggagcccagggagctgccccctgaagagagggcacagaatgtcacgcggctcctacgaaaacaggcagaggaagtgaatacagagtgggaaaagttgaacctgcacagtgctgactggcagagaaaaatagatgaaacccttgagagactgagggagttgcaagaggccaccgacgaactggacctgaagttgcgtcaagccgaggtgattaagggctcctggcagcccgtcggcgatttacttatagactcactccaggaccacctggagaaggtgaaagctctgcgtggcgaaatcgccccattgaaagagaacgtctcacacgtcaatgacttggcccgtcagctgacgacactggggattcagttgagcccatataacctgtccaccctcgaagacctcaataccaggtggaagctgctacaagttgcagttgaggatagagtccggcaactgcacgaggcccaccgagattttggccccgcgtcccaacatttcctgtcgacctccgtgcagggcccatgggagcgggcgattagcccgaataaggtaccgtactatatcaaccatgaaacccagactacgtgctgggatcaccctaagatgaccgaactttaccagtccctcgccgacctgaataacgtcaggttttctgcctacagaaccgcaatgaagctaaggcgcctccagaaagctttatgcctggacttgttatccctcagtgccgcgtgtgacgcactcgaccagcacaacctaaagcagaatgaccagcctatggacatcctccagattatcaactgtctgactaccatttatgaccggctcgagcaggagcacaataacctggtgaatgtgcccctgtgcgtcgatatgtgcctgaattggctgcttaacgtgtacgacacagggagaaccggtcgcatccgagtgctttctttcaagacaggcatcatttccctgtgcaaggcacacttggaggataagtaccgatacctgttcaaacaagtcgcatcatccacaggtttttgtgatcagagaagacttggtctcttactccacgattctattcagatacctcgacagttaggcgaggtggcaagcttcggaggaagcaacatcgagccctccgtgcggtcttgttttcaatttgcgaacaataagcccgagatcgaggctgctctcttcttggattggatgagacttgagccgcaaagcatggtctggctacctgtcttgcatagagtggctgctgccgagaccgcaaagcaccaggcaaagtgcaatatctgtaaggagtgccctatcatcgggttccggtaccgaagcctcaaacacttcaactatgacatctgtcagagttgctttttcagtggtcgcgtagctaaggggcacaagatgcattatcctatggtggagtattgcaccccaaccacctccggagaagacgtccgagacttcgccaaagttcttaagaataaattccgaaccaaaagatactttgccaagcatcctcgcatggggtacttgcccgtccagacggtcctagagggagataatatggaaacccccgtcacccttataaacttttggccggtggattcagcccccgcctcctctccacagctgtcacacgacgatactcattctagaatcgaacattatgcctctcgactcgcagagatggagaactctaatggcagttatctgaacgactccatctctcccaacgagagcatcgacgatgaacatctgctgatccaacactattgccagagtctgaaccaagacagccctttgtcccaacctcggtctcccgcccagatacttatctctctcgagtccgaggaaaggggcgaactcgaaagaatcctggcggacttggaggaagagaaccgaaatctgcaggcggagtacgaccggcttaaacagcagcatgaacataaagggctgagtcccctgccctctcctcctgaaatgatgcccacttcgcctcaatctccgagagacgccgagttgatcgccgaggctaagctgcttcgtcagcacaagggtcgcctggaagccaggatgcagatcctggaagaccataataagcaactggagtcgcaacttcatcggctcagacagttattagagcagccacaagctgaggccaaggtgaatggaacaacagtctctagcccctcaacatcgcttcagagatcagacagcagtcagccaatgttgcttcgcgtagtaggttctcaaacatcagattctatgggagaggaggatttgctctctccacctcaggacactagcactggattggaggaggtgatggaacagcttaacaacagcttcccgtcaagccggggtcataatgtcggatcactgtttcatatggccgacgacctcggacgcgccatggagagcctcgtgtctgtcatgaccgacgaagaaggagcggagtag

SEQ ID NO: 296046 - DNA, 3732 bp, Artificial Sequence
  derived and/or modified sequence
atgccatcaagcctgatgctcgaggtgccagccctggccgacttcaaccgcgcatggaccgaactgacagactggttaagcctgctggatcaagttatcaaaagccagcgggtcatggtaggcgacctcgaagacataaacgaaatgatcattaagcagaaggctactatgcaggatttggagcaaaggaggcctcagcttgaagaactcatcacagcagcccagaatcttaagaacaagacaagcaatcaggaagcgcgaacaatcatcaccgatagaatcgagcgcatccaaaatcaatgggacgaggtgcaggagcatttgcaaaacaggaggcagcagcttaatgaaatgcttaaggatagtacgcaatggcttgaggcgaaggaagaggcggaacaggtcctgggacaagcccgagctaagctggagagctggaaagaggggccatacacagtcgatgccatccagaagaagattactgagactaaacagttagcaaaggacttgcgtcagtggcaaaccaacgtcgacgtggccaacgatctggcactgaaactgctccgcgattattccgccgatgataccaggaaggtacatatgatcacggaaaatatcaacgcatcctggcgttctatccataaaagggtcagcgagcgcgaggccgctctggaggaaacacaccggttactgcaacaattcccgctggacttagagaaatttctggcctggctcacagaagcggagactaccgcaaatgttcttcaggatgccactcggaaagaacgactgctggaagactcaaaaggagtgaaagagttaatgaaacagtggcaggacctgcaaggcgaaattgaggcccacactgatgtgtatcacaaccttgacgaaaactcccaaaaaatcttgcgctccctggaaggaagcgatgacgcagtactgttgcagaggcgactggataatatgaactttaagtggtcagaattgaggaaaaagagcctgaacattcggtcccacttggaggcatcttctgaccagtggaaacgcctccacctctcattgcaggagcttttggtctggttacagcttaaagatgatgaactgagccgtcaggccccaataggaggagatttccctgccgtacaaaaacagaacgatgtgcatcgggctttcaagagagaattgaagaccaaagagcccgttatcatgtctactctggagacagtgagaatctttctgaccgagcagccactggagggcctggaaaagttataccaggaacccagggaactgcccccagaggagcgagcgcaaaacgtgacgaggctcctgcggaaacaggcagaagaagtaaacaccgagtgggagaagctgaacttacattcagccgactggcaaaggaagatcgacgagactttggaaaggctcagagaactgcaagaagcaacagacgagctggatcttaagctgcgccaggctgaagtcatcaaggggtcctggcagccagtaggagatctgctgatcgacagtttacaagaccacctggaaaaggttaaggctctgaggggcgaaattgcaccccttaaggagaatgtgagccacgtgaatgatttggcaagacagttaactaccctgggcattcagctgtccccctataatctgtccacgctcgaagacttgaatacaaggtggaagctgctgcaggtggccgtggaggaccgggtgaggcagctgcacgaagcccacagggatttcggaccagcctcccagcattttctgtctacatccgtacagggcccttgggaaagggccatctctcctaacaaggtcccgtattacatcaaccacgaaacacaaacaacttgttgggaccatcccaaaatgaccgaactgtaccagtctttggccgacctgaacaatgtcaggttctctgcctacagaaccgcgatgaagttacgacgattgcagaaggcgctgtgtctggacctgctcagcctatctgccgcatgtgacgccctcgatcagcacaacctgaagcagaatgatcaaccaatggatatactacagattattaattgtctgacaaccatctacgacagattggagcaggagcataataatttggttaatgttcctctctgtgtcgacatgtgcctgaactggttgctaaacgtgtatgacacaggcagaactggcagaattagggtgttgtccttcaaaaccggcatcatctccttatgtaaggcacatctcgaagacaagtacaggtatctttttaagcaagtggccagctcgactggcttctgtgaccagcgtaggcttggccttctgctccatgacagcattcagattcctcgtcagcttggcgaagtagcttcatttggtggcagcaatattgaaccttctgtccggtcatgtttccagtttgcgaataataaaccagagatcgaagccgctttgttcctggactggatgaggcttgaaccccaatctatggtttggctcccagtcctccaccgggtcgcagccgctgagactgctaagcatcaggcaaagtgtaacatttgcaaggagtgtccaatcataggattcaggtaccggtctctcaaacacttcaattacgacatctgccagtcatgctttttctctggcagggtcgccaaaggccataagatgcactatccgatggtcgagtactgtactcccaccactagtggagaagatgtgcgtgactttgccaaggtgctgaagaacaagttcagaacgaagcggtattttgctaagcatccgaggatggggtatctccctgtccaaactgtccttgagggcgataatatggagacccccgttacattgatcaacttttggcccgtggactctgcccctgcttctagcccccaactgtcacacgacgatactcactctcgtatagaacactacgcctcaaggcttgctgaaatggagaacagcaacgggagttacctgaacgacagcatcagtcctaatgagtccatcgatgatgagcacctattgattcagcattactgtcagagcctcaaccaggacagccctctcagtcagcctagatcaccagctcaaatcctcatctccctggagtcagaggagagaggagagctagagaggatcttggccgacctggaggaggagaacagaaatctgcaggctgaatacgataggctaaagcagcagcatgagcataaaggcctctcccctctgccctccccccctgagatgatgcctacaagcccccagagtcccagggacgccgaacttatcgccgaggccaagctgctccgacagcacaagggcaggcttgaagctcggatgcaaatcttggaggaccataacaagcagctggagtctcagcttcatagacttagacagctactggaacagccgcaggctgaggcgaaggtcaacggcactactgtgtctagtccgtccaccagcctccaacgtagcgactcatcgcagcccatgttactgcgggtggtcggctcacagacctcagattccatgggggaagaggatctgctcagccctccgcaagatacttccaccggtcttgaagaggttatggagcagctgaacaatagcttcccatcttctagaggccacaatgtaggatcactttttcacatggcagacgacttggggagggcaatggagtcattagtgtccgtgatgacagatgaggagggtgctgaatag

SEQ ID NO: 296047 - DNA, 3729 bp, Artificial Sequence
  derived and/or modified sequence
atgcccagcagcctgatgctggaggtgcccgccctggccgacttcaaccgcgcctggaccgagctgaccgactggctgagcctgctggaccaggtgatcaagagccagcgcgtgatggtgggcgacctggaggacatcaacgagatgatcatcaagcagaaggccaccatgcaggacctggagcagcgccgcccccagctggaggagctgatcaccgccgcccagaacctgaagaacaagaccagcaaccaggaggcccgcaccatcatcaccgaccgcatcgagcgcatccagaaccagtgggacgaggtgcaggagcacctgcagaaccgccgccagcagctgaacgagatgctgaaggacagcacccagtggctggaggccaaggaggaggccgagcaggtgctgggccaggcccgcgccaagctggagagctggaaggagggcccctacaccgtggacgccatccagaagaagatcaccgagaccaagcagctggccaaggacctgcgccagtggcagaccaacgtggacgtggccaacgacctggccctgaagctgctgcgcgactacagcgccgacgacacccgcaaggtgcacatgatcaccgagaacatcaacgccagctggcgcagcatccacaagcgcgtgagcgagcgcgaggccgccctggaggagacccaccgcctgctgcagcagttccccctggacctggagaagttcctggcctggctgaccgaggccgagaccaccgccaacgtgctgcaggacgccacccgcaaggagcgcctgctggaggacagcaagggcgtgaaggagctgatgaagcagtggcaggacctgcagggcgagatcgaggcccacaccgacgtgtaccacaacctggacgagaacagccagaagatcctgcgcagcctggagggcagcgacgacgccgtgctgctgcagcgccgcctggacaacatgaacttcaagtggagcgagctgcgcaagaagagcctgaacatccgcagccacctggaggccagcagcgaccagtggaagcgcctgcacctgagcctgcaggagctgctggtgtggctgcagctgaaggacgacgagctgagccgccaggcccccatcggcggcgacttccccgccgtgcagaagcagaacgacgtgcaccgcgccttcaagcgcgagctgaagaccaaggagcccgtgatcatgagcaccctggagaccgtgcgcatcttcctgaccgagcagcccctggagggcctggagaagctgtaccaggagccccgcgagctgccccccgaggagcgcgcccagaacgtgacccgcctgctgcgcaagcaggccgaggaggtgaacaccgagtgggagaagctgaacctgcacagcgccgactggcagcgcaagatcgacgagaccctggagcgcctgcgcgagctgcaggaggccaccgacgagctggacctgaagctgcgccaggccgaggtgatcaagggcagctggcagcccgtgggcgacctgctgatcgacagcctgcaggaccacctggagaaggtgaaggccctgcgcggcgagatcgcccccctgaaggagaacgtgagccacgtgaacgacctggcccgccagctgaccaccctgggcatccagctgagcccctacaacctgagcaccctggaggacctgaacacccgctggaagctgctgcaggtggccgtggaggaccgcgtgcgccagctgcacgaggcccaccgcgacttcggccccgccagccagcacttcctgagcaccagcgtgcagggcccctgggagcgcgccatcagccccaacaaggtgccctactacatcaaccacgagacccagaccacctgctgggaccaccccaagatgaccgagctgtaccagagcctggccgacctgaacaacgtgcgcttcagcgcctaccgcaccgccatgaagctgcgccgcctgcagaaggccctgtgcctggacctgctgagcctgagcgccgcctgcgacgccctggaccagcacaacctgaagcagaacgaccagcccatggacatcctgcagatcatcaactgcctgaccaccatctacgaccgcctggagcaggagcacaacaacctggtgaacgtgcccctgtgcgtggacatgtgcctgaactggctgctgaacgtgtacgacaccggccgcaccggccgcatccgcgtgctgagcttcaagaccggcatcatcagcctgtgcaaggcccacctggaggacaagtaccgctacctgttcaagcaggtggccagcagcaccggcttctgcgaccagcgccgcctgggcctgctgctgcacgacagcatccagatcccccgccagctgggcgaggtggccagcttcggcggcagcaacatcgagcccagcgtgcgcagctgcttccagttcgccaacaacaagcccgagatcgaggccgccctgttcctggactggatgcgcctggagccccagagcatggtgtggctgcccgtgctgcaccgcgtggccgccgccgagaccgccaagcaccaggccaagtgcaacatctgcaaggagtgccccatcatcggcttccgctaccgcagcctgaagcacttcaactacgacatctgccagagctgcttcttcagcggccgcgtggccaagggccacaagatgcactaccccatggtggagtactgcacccccaccaccagcggcgaggacgtgcgcgacttcgccaaggtgctgaagaacaagttccgcaccaagcgctacttcgccaagcacccccgcatgggctacctgcccgtgcagaccgtgctggagggcgacaacatggagacccccgtgaccctgatcaacttctggcccgtggacagcgcccccgccagcagcccccagctgagccacgacgacacccacagccgcatcgagcactacgccagccgcctggccgagatggagaacagcaacggcagctacctgaacgacagcatcagccccaacgagagcatcgacgacgagcacctgctgatccagcactactgccagagcctgaaccaggacagccccctgagccagccccgcagccccgcccagatcctgatcagcctggagagcgaggagcgcggcgagctggagcgcatcctggccgacctggaggaggagaaccgcaacctgcaggccgagtacgaccgcctgaagcagcagcacgagcacaagggcctgagccccctgcccagcccccccgagatgatgcccaccagcccccagagcccccgcgacgccgagctgatcgccgaggccaagctgctgcgccagcacaagggccgcctggaggcccgcatgcagatcctggaggaccacaacaagcagctggagagccagctgcaccgcctgcgccagctgctggagcagccccaggccgaggccaaggtgaacggcaccaccgtgagcagccccagcaccagcctgcagcgcagcgacagcagccagcccatgctgctgcgcgtggtgggcagccagaccagcgacagcatgggcgaggaggacctgctgagccccccccaggacaccagcaccggcctggaggaggtgatggagcagctgaacaacagcttccccagcagccgcggccacaacgtgggcagcctgttccacatggccgacgacctgggccgcgccatggagagcctggtgagcgtgatgaccgacgaggagggcgccgag

SEQ ID NO: 296048 - DNA, 3732 bp, Artificial Sequence
  derived and/or modified sequence
atgcccagcagcctgatgctggaggtgcccgccctggccgacttcaacagagcctggaccgagctgaccgactggctgagcctgctggaccaggtgatcaagagccagagagtgatggtgggcgacctggaggacatcaacgagatgatcatcaagcagaaggccaccatgcaggacctggagcagagaagaccccagctggaggagctgatcaccgccgcccagaacctgaagaacaagaccagcaaccaggaggccagaaccatcatcaccgacagaatcgagagaatccagaaccagtgggacgaggtgcaggagcacctgcagaacagaagacagcagctgaacgagatgctgaaggacagcacccagtggctggaggccaaggaggaggccgagcaggtgctgggccaggccagagccaagctggagagctggaaggagggcccctacaccgtggacgccatccagaagaagatcaccgagaccaagcagctggccaaggacctgagacagtggcagaccaacgtggacgtggccaacgacctggccctgaagctgctgagagactacagcgccgacgacaccagaaaggtgcacatgatcaccgagaacatcaacgccagctggagaagcatccacaagagagtgagcgagagagaggccgccctggaggagacccacagactgctgcagcagttccccctggacctggagaagttcctggcctggctgaccgaggccgagaccaccgccaacgtgctgcaggacgccaccagaaaggagagactgctggaggacagcaagggcgtgaaggagctgatgaagcagtggcaggacctgcagggcgagatcgaggcccacaccgacgtgtaccacaacctggacgagaacagccagaagatcctgagaagcctggagggcagcgacgacgccgtgctgctgcagagaagactggacaacatgaacttcaagtggagcgagctgagaaagaagagcctgaacatcagaagccacctggaggccagcagcgaccagtggaagagactgcacctgagcctgcaggagctgctggtgtggctgcagctgaaggacgacgagctgagcagacaggcccccatcggcggcgacttccccgccgtgcagaagcagaacgacgtgcacagagccttcaagagagagctgaagaccaaggagcccgtgatcatgagcaccctggagaccgtgagaatcttcctgaccgagcagcccctggagggcctggagaagctgtaccaggagcccagagagctgccccccgaggagagagcccagaacgtgaccagactgctgagaaagcaggccgaggaggtgaacaccgagtgggagaagctgaacctgcacagcgccgactggcagagaaagatcgacgagaccctggagagactgagagagctgcaggaggccaccgacgagctggacctgaagctgagacaggccgaggtgatcaagggcagctggcagcccgtgggcgacctgctgatcgacagcctgcaggaccacctggagaaggtgaaggccctgagaggcgagatcgcccccctgaaggagaacgtgagccacgtgaacgacctggccagacagctgaccaccctgggcatccagctgagcccctacaacctgagcaccctggaggacctgaacaccagatggaagctgctgcaggtggccgtggaggacagagtgagacagctgcacgaggcccacagagacttcggccccgccagccagcacttcctgagcaccagcgtgcagggcccctgggagagagccatcagccccaacaaggtgccctactacatcaaccacgagacccagaccacctgctgggaccaccccaagatgaccgagctgtaccagagcctggccgacctgaacaacgtgagattcagcgcctacagaaccgccatgaagctgagaagactgcagaaggccctgtgcctggacctgctgagcctgagcgccgcctgcgacgccctggaccagcacaacctgaagcagaacgaccagcccatggacatcctgcagatcatcaactgcctgaccaccatctacgacagactggagcaggagcacaacaacctggtgaacgtgcccctgtgcgtggacatgtgcctgaactggctgctgaacgtgtacgacaccggcagaaccggcagaatcagagtgctgagcttcaagaccggcatcatcagcctgtgcaaggcccacctggaggacaagtacagatacctgttcaagcaggtggccagcagcaccggcttctgcgaccagagaagactgggcctgctgctgcacgacagcatccagatccccagacagctgggcgaggtggccagcttcggcggcagcaacatcgagcccagcgtgagaagctgcttccagttcgccaacaacaagcccgagatcgaggccgccctgttcctggactggatgagactggagccccagagcatggtgtggctgcccgtgctgcacagagtggccgccgccgagaccgccaagcaccaggccaagtgcaacatctgcaaggagtgccccatcatcggcttcagatacagaagcctgaagcacttcaactacgacatctgccagagctgcttcttcagcggcagagtggccaagggccacaagatgcactaccccatggtggagtactgcacccccaccaccagcggcgaggacgtgagagacttcgccaaggtgctgaagaacaagttcagaaccaagagatacttcgccaagcaccccagaatgggctacctgcccgtgcagaccgtgctggagggcgacaacatggagacccccgtgaccctgatcaacttctggcccgtggacagcgcccccgccagcagcccccagctgagccacgacgacacccacagcagaatcgagcactacgccagcagactggccgagatggagaacagcaacggcagctacctgaacgacagcatcagccccaacgagagcatcgacgacgagcacctgctgatccagcactactgccagagcctgaaccaggacagccccctgagccagcccagaagccccgcccagatcctgatcagcctggagagcgaggagagaggcgagctggagagaatcctggccgacctggaggaggagaacagaaacctgcaggccgagtacgacagactgaagcagcagcacgagcacaagggcctgagccccctgcccagcccccccgagatgatgcccaccagcccccagagccccagagacgccgagctgatcgccgaggccaagctgctgagacagcacaagggcagactggaggccagaatgcagatcctggaggaccacaacaagcagctggagagccagctgcacagactgagacagctgctggagcagccccaggccgaggccaaggtgaacggcaccaccgtgagcagccccagcaccagcctgcagagaagcgacagcagccagcccatgctgctgagagtggtgggcagccagaccagcgacagcatgggcgaggaggacctgctgagccccccccaggacaccagcaccggcctggaggaggtgatggagcagctgaacaacagcttccccagcagcagaggccacaacgtgggcagcctgttccacatggccgacgacctgggcagagccatggagagcctggtgagcgtgatgaccgacgaggagggcgccgagtag

SEQ ID NO: 296049 - DNA, 5209 bp, Artificial Sequence
  derived and/or modified sequence
acactagcaatggcaaagctttgtgcggaggcattgctggctgctctgaactaaaagcatccgtggggaccgaaagaggtttttgcacaccttattaaggaactccaggatggcattgggcagcggcaaactgttgtcagaacattgaatgcaactggggaagaaataattcagcaatcctcaaaaacagatgccagtattctacaggaaaaattgggaagcctgaatctgcggtggcaggaggtctgcaaacagctgtcagacagaaaaaagaggctagaagaacaaaagaatatcttgtcagaatttcaaagagatttaaatgaatttgttttatggttggaggaagcagataacattgctagtatcccacttgaacctggaaaagagcagcaactaaaagaaaagcttgagcaagtcaagttactggtggaagagttgcccctgcgccagggaattctcaaacaattaaatgaaactggaggacccgtgcttgtaagtgctcccataagcccagaagagcaagataaacttgaaaataagctcaagcagacaaatctccagtggataaaggtttccagagctttacctgagaaacaaggagaaattgaagctcaaataaaagaccttgggcagcttgaaaaaaagcttgaagaccttgaagagcagttaaatcatctgctgctgtggttatctcctattaggaatcagttggaaatttataaccaaccaaaccaagaaggaccatttgacgttaaggaaactgaaatagcagttcaagctaaacaaccggatgtggaagagattttgtctaaagggcagcatttgtacaaggaaaaaccagccactcagccagtgaagaggaagttagaagatctgagctctgagtggaaggcggtaaaccgtttacttcaagagctgagggcaaagcagcctgacctagctcctggactgaccactattggagcctctcctactcagactgttactctggtgacacaacctgtggttactaaggaaactgccatctccaaactagaaatgccatcttccttgatgttggaggtacctgctctggcagatttcaaccgggcttggacagaacttaccgactggctttctctgcttgatcaagttataaaatcacagagggtgatggtgggtgaccttgaggatatcaacgagatgatcatcaagcagaaggcaacaatgcaggatttggaacagaggcgtccccagttggaagaactcattaccgctgcccaaaatttgaaaaacaagaccagcaatcaagaggctagaacaatcattacggatcgaattgaaagaattcagaatcagtgggatgaagtacaagaacaccttcagaaccggaggcaacagttgaatgaaatgttaaaggattcaacacaatggctggaagctaaggaagaagctgagcaggtcttaggacaggccagagccaagcttgagtcatggaaggagggtccctatacagtagatgcaatccaaaagaaaatcacagaaaccaagcagttggccaaagacctccgccagtggcagacaaatgtagatgtggcaaatgacttggccctgaaacttctccgggattattctgcagatgataccagaaaagtccacatgataacagagaatatcaatgcctcttggagaagcattcataaaagggtgagtgagcgagaggctgctttggaagaaactcatagattactgcaacagttccccctggacctggaaaagtttcttgcctggcttacagaagctgaaacaactgccaatgtcctacaggatgctacccgtaaggaaaggctcctagaagactccaagggagtaaaagagctgatgaaacaatggcaagacctccaaggtgaaattgaagctcacacagatgtttatcacaacctggatgaaaacagccaaaaaatcctgagatccctggaaggttccgatgatgcagtcctgttacaaagacgtttggataacatgaacttcaagtggagtgaacttcggaaaaagtctctcaacattaggtcccatttggaagccagttctgaccagtggaagcgtctgcacctttctctgcaggaacttctggtgtggctacagctgaaagatgatgaattaagccggcaggcacctattggaggcgactttccagcagttcagaagcagaacgatgtacatagggccttcaagagggaattgaaaactaaagaacctgtaatcatgagtactcttgagactgtacgaatatttctgacagagcagcctttggaaggactagagaaactctaccaggagcccagagagctgcctcctgaggagagagcccagaatgtcactcggcttctacgaaagcaggctgaggaggtcaatactgagtgggaaaaattgaacctgcactccgctgactggcagagaaaaatagatgagacccttgaaagactccgggaacttcaagaggccacggatgagctggacctcaagctgcgccaagctgaggtgatcaagggatcctggcagcccgtgggcgatctcctcattgactctctccaagatcacctcgagaaagtcaaggcacttcgaggagaaattgcgcctctgaaagagaacgtgagccacgtcaatgaccttgctcgccagcttaccactttgggcattcagctctcaccgtataacctcagcactctggaagacctgaacaccagatggaagcttctgcaggtggccgtcgaggaccgagtcaggcagctgcatgaagcccacagggactttggtccagcatctcagcactttctttccacgtctgtccagggtccctgggagagagccatctcgccaaacaaagtgccctactatatcaaccacgagactcaaacaacttgctgggaccatcccaaaatgacagagctctaccagtctttagctgacctgaataatgtcagattctcagcttataggactgccatgaaactccgaagactgcagaaggccctttgcttggatctcttgagcctgtcagctgcatgtgatgccttggaccagcacaacctcaagcaaaatgaccagcccatggatatcctgcagattattaattgtttgaccactatttatgaccgcctggagcaagagcacaacaatttggtcaacgtccctctctgcgtggatatgtgtctgaactggctgctgaatgtttatgatacgggacgaacagggaggatccgtgtcctgtcttttaaaactggcatcatttccctgtgtaaagcacatttggaagacaagtacagataccttttcaagcaagtggcaagttcaacaggattttgtgaccagcgcaggctgggcctccttctgcatgattctatccaaattccaagacagttgggtgaagttgcatcctttgggggcagtaacattgagccaagtgtccggagctgcttccaatttgctaataataagccagagatcgaagcggccctcttcctagactggatgagactggaaccccagtccatggtgtggctgcccgtcctgcacagagtggctgctgcagaaactgccaagcatcaggccaaatgtaacatctgcaaagagtgtccaatcattggattcaggtacaggagtctaaagcactttaattatgacatctgccaaagctgctttttttctggtcgagttgcaaaaggccataaaatgcactatcccatggtggaatattgcactccgactacatcaggagaagatgttcgagactttgccaaggtactaaaaaacaaatttcgaaccaaaaggtattttgcgaagcatccccgaatgggctacctgccagtgcagactgtcttagagggggacaacatggaaactcccgttactctgatcaacttctggccagtagattctgcgcctgcctcgtcccctcagctttcacacgatgatactcattcacgcattgaacattatgctagcaggctagcagaaatggaaaacagcaatggatcttatctaaatgatagcatctctcctaatgagagcatagatgatgaacatttgttaatccagcattactgccaaagtttgaaccaggactcccccctgagccagcctcgtagtcctgcccagatcttgatttccttagagagtgaggaaagaggggagctagagagaatcctagcagatcttgaggaagaaaacaggaatctgcaagcagaatatgaccgtctaaagcagcagcacgaacataaaggcctgtccccactgccgtcccctcctgaaatgatgcccacctctccccagagtccccgggatgctgagctcattgctgaggccaagctactgcgtcaacacaaaggccgcctggaagccaggatgcaaatcctggaagaccacaataaacagctggagtcacagttacacaggctaaggcagctgctggagcaaccccaggcagaggccaaagtgaatggcacaacggtgtcctctccttctacctctctacagaggtccgacagcagtcagcctatgctgctccgagtggttggcagtcaaacttcggactccatgggtgaggaagatcttctcagtcctccccaggacacaagcacagggttagaggaggtgatggagcaactcaacaactccttccctagttcaagaggacacaatgtaggaagtcttttccacatggcagatgatttgggcagagcgatggagtccttagtatcagtcatgacagatgaagaaggagcagaataaatgttttacaactcctgattcccgcatggtttttataatattcatacaacaaagaggattagacagtaagagtttacaagaaataaatctatatttttgtgaagggtagtggtattatactgtagatttcagtagtttctaagtctgttattgttttgttaacaatggcaggttttacacgtctatgcaattgtacaaaaaagttataagaaaactacatgtaaaatcttgatagctaaataacttgccatttctttatatggaacgcattttgggttgtttaaaaatttataacagttataaagaaagattgtaaactaaagtgtgctttataaaaaaaagttgtttataaaaacccctaaaaacaaaacaaacacacacacacacacatacacacacacacacaaaactttgaggcagcgcattgttttgcatc

SEQ ID NO: 296050 - protein, 1133 aa, Artificial Sequence
  derived and/or modified sequence
MPSSLMLEVPALADFNRAWTELTDWLSLLDQVIKSQRVMVGDLEDINEMIIKQKATMQDLEQRRPQLEELITAAQNLKNKTSNQEARTIITDRIERIQNQWDEVQEHLQNRRQQLNEMLKDSTQWLEAKEEAEQVLGQARAKLESWKEGPYTVDAIQKKITETKQLAKDLRQWQTNVDVANDLALKLLRDYSADDTRKVHMITENINASWRSIHKRVSEREAALEETHRLLQQFPLDLEKFLAWLTEAETTANVLQDATRKERLLEDSKGVKELMKQWQDLQGEIEAHTDVYHNLDENSQKILRSLEGSDDAVLLQRRLDNMNFKWSELRKKSLNIRSHLEASSDQWKRLHLSLQELLVWLQLKDDELSRQAPIGGDFPAVQKQNDVHRAFKRELKTKEPVIMSTLETVRIFLTEQPLEGLEKLYQEPRELPPEERAQNVTRLLRKQAEEVNTEWEKLNLHSADWQRKIDETLERLRELQEATDELDLKLRQAEVIKGSWQPVGDLLIDSLQDHLEKVKALRGEIAPLKENVSHVNDLARQLTTLGIQLSPYNLSTLEDLNTRWKLLQVAVEDRVRQLHEAHRDFGPASQHFLSTSVQGPWERAISPNKVPYYINHETQTTCWDHPKMTELYQSLADLNNVRFSAYRTAMKLRRLQKALCLDLLSLSAACDALDQHNLKQNDQPMDILQIINCLTTIYDRLEQEHNNLVNVPLCVDMCLNWLLNVYDTGRTGRIRVLSFKTGIISLCKAHLEDKYRYLFKQVASSTGFCDQRRLGLLLHDSIQIPRQLGEVASFGGSNIEPSVRSCFQFANNKPEIEAALFLDWMRLEPQSMVWLPVLHRVAAAETAKHQAKCNICKECPIIGFRYRSLKHFNYDICQSCFFSGRVAKGHKMHYPMVEYCTPTTSGEDVRDFAKVLKNKFRTKRYFAKHPRMGYLPVQTVLEGDNMETNLQAEYDRLKQQHEHKGLSPLPSPPEMMPTSPQSPRDAELIAEAKLLRQHKGRLEARMQILEDHNKQLESQLHRLRQLLEQPQAEAKVNGTTVSSPSTSLQRSDSSQPMLLRVVGSQTSDSMGEEDLLSPPQDTSTGLEEVMEQLNNSFPSSRGHNVGSLFHMADDLGRAMESLVSVMTDEEGAE

SEQ ID NO: 296051 - DNA, 7048 bp, Artificial Sequence
  derived and/or modified sequence
acactagcaatggcaaagctttgtgcggaggcattgctggctgctctgaactaaaagcatccgtggggaccgaaagaggtttttgcacaccttattaaggaactccaggatggcattgggcagcggcaaactgttgtcagaacattgaatgcaactggggaagaaataattcagcaatcctcaaaaacagatgccagtattctacaggaaaaattgggaagcctgaatctgcggtggcaggaggtctgcaaacagctgtcagacagaaaaaagaggctagaagaacaaaagaatatcttgtcagaatttcaaagagatttaaatgaatttgttttatggttggaggaagcagataacattgctagtatcccacttgaacctggaaaagagcagcaactaaaagaaaagcttgagcaagtcaagttactggtggaagagttgcccctgcgccagggaattctcaaacaattaaatgaaactggaggacccgtgcttgtaagtgctcccataagcccagaagagcaagataaacttgaaaataagctcaagcagacaaatctccagtggataaaggtttccagagctttacctgagaaacaaggagaaattgaagctcaaataaaagaccttgggcagcttgaaaaaaagcttgaagaccttgaagagcagttaaatcatctgctgctgtggttatctcctattaggaatcagttggaaatttataaccaaccaaaccaagaaggaccatttgacgttcaggaaactgaaatagcagttcaagctaaacaaccggatgtggaagagattttgtctaaagggcagcatttgtacaaggaaaaaccagccactcagccagtgaagaggaagttagaagatctgagctctgagtggaaggcggtaaaccgtttacttcaagagctgagggcaaagcagcctgacctagctcctggactgaccactattggagcctctcctactcagactgttactctggtgacacaacctgtggttactaaggaaactgccatctccaaactagaaatgccatcttccttgatgttggaggtacctgctctggcagatttcaaccgggcttggacagaacttaccgactggctttctctgcttgatcaagttataaaatcacagagggtgatggtgggtgaccttgaggatatcaacgagatgatcatcaagcagaaggcaacaatgcaggatttggaacagaggcgtccccagttggaagaactcattaccgctgcccaaaatttgaaaaacaagaccagcaatcaagaggctagaacaatcattacggatcgaattgaaagaattcagaatcagtgggatgaagtacaagaacaccttcagaaccggaggcaacagttgaatgaaatgttaaaggattcaacacaatggctggaagctaaggaagaagctgagcaggtcttaggacaggccagagccaagcttgagtcatggaaggagggtccctatacagtagatgcaatccaaaagaaaatcacagaaaccaagcagttggccaaagacctccgccagtggcagacaaatgtagatgtggcaaatgacttggccctgaaacttctccgggattattctgcagatgataccagaaaagtccacatgataacagagaatatcaatgcctcttggagaagcattcataaaagggtgagtgagcgagaggctgctttggaagaaactcatagattactgcaacagttccccctggacctggaaaagtttcttgcctggcttacagaagctgaaacaactgccaatgtcctacaggatgctacccgtaaggaaaggctcctagaagactccaagggagtaaaagagctgatgaaacaatggcaagacctccaaggtgaaattgaagctcacacagatgtttatcacaacctggatgaaaacagccaaaaaatcctgagatccctggaaggttccgatgatgcagtcctgttacaaagacgtttggataacatgaacttcaagtggagtgaacttcggaaaaagtctctcaacattaggtcccatttggaagccagttctgaccagtggaagcgtctgcacctttctctgcaggaacttctggtgtggctacagctgaaagatgatgaattaagccggcaggcacctattggaggcgactttccagcagttcagaagcagaacgatgtacatagggccttcaagagggaattgaaaactaaagaacctgtaatcatgagtactcttgagactgtacgaatatttctgacagagcagcctttggaaggactagagaaactctaccaggagcccagagagctgcctcctgaggagagagcccagaatgtcactcggcttctacgaaagcaggctgaggaggtcaatactgagtgggaaaaattgaacctgcactccgctgactggcagagaaaaatagatgagacccttgaaagactccaggaacttcaagaggccacggatgagctggacctcaagctgcgccaagctgaggtgatcaagggatcctggcagcccgtgggcgatctcctcattgactctctccaagatcacctcgagaaagtcaaggcacttcgaggagaaattgcgcctctgaaagagaacgtgagccacgtcaatgaccttgctcgccagcttaccactttgggcattcagctctcaccgtataacctcagcactctggaagacctgaacaccagatggaagcttctgcaggtggccgtcgaggaccgagtcaggcagctgcatgaagcccacagggactttggtccagcatctcagcactttctttccacgtctgtccagggtccctgggagagagccatctcgccaaacaaagtgccctactatatcaaccacgagactcaaacaacttgctgggaccatcccaaaatgacagagctctaccagtctttagctgacctgaataatgtcagattctcagcttataggactgccatgaaactccgaagactgcagaaggccctttgcttggatctcttgagcctgtcagctgcatgtgatgccttggaccagcacaacctcaagcaaaatgaccagcccatggatatcctgcagattattaattgtttgaccactatttatgaccgcctggagcaagagcacaacaatttggtcaacgtccctctctgcgtggatatgtgtctgaactggctgctgaatgtttatgatacgggacgaacagggaggatccgtgtcctgtcttttaaaactggcatcatttccctgtgtaaagcacatttggaagacaagtacagataccttttcaagcaagtggcaagttcaacaggattttgtgaccagcgcaggctgggcctccttctgcatgattctatccaaattccaagacagttgggtgaagttgcatcctttgggggcagtaacattgagccaagtgtccggagctgcttccaatttgctaataataagccagagatcgaagcggccctcttcctagactggatgagactggaaccccagtccatggtgtggctgcccgtcctgcacagagtggctgctgcagaaactgccaagcatcaggccaaatgtaacatctgcaaagagtgtccaatcattggattcaggtacaggagtctaaagcactttaattatgacatctgccaaagctgctttttttctggtcgagttgcaaaaggccataaaatgcactatcccatggtggaatattgcactccgactacatcaggagaagatgttcgagactttgccaaggtactaaaaaacaaatttcgaaccaaaaggtattttgcgaagcatccccgaatgggctacctgccagtgcagactgtcttagagggggacaacatggaaacgaatctgcaagcagaatatgaccgtctaaagcagcagcacgaacataaaggcctgtccccactgccgtcccctcctgaaatgatgcccacctctccccagagtccccgggatgctgagctcattgctgaggccaagctactgcgtcaacacaaaggccgcctggaagccaggatgcaaatcctggaagaccacaataaacagctggagtcacagttacacaggctaaggcagctgctggagcaaccccaggcagaggccaaagtgaatggcacaacggtgtcctctccttctacctctctacagaggtccgacagcagtcagcctatgctgctccgagtggttggcagtcaaacttcggactccatgggtgaggaagatcttctcagtcctccccaggacacaagcacagggttagaggaggtgatggagcaactcaacaactccttccctagttcaagaggacacaatgtaggaagtcttttccacatggcagatgatttgggcagagcgatggagtccttagtatcagtcatgacagatgaagaaggagcagaataaatgttttacaactcctgattcccgcatggtttttataatattcatacaacaaagaggattagacagtaagagtttacaagaaataaatctatatttttgtgaagggtagtggtattatactgtagatttcagtagtttctaagtctgttattgttttgttaacaatggcaggttttacacgtctatgcaattgtacaaaaaagttataagaaaactacatgtaaaatcttgatagctaaataacttgccatttctttatatggaacgcattttgggttgtttaaaaatttataacagttataaagaaagattgtaaactaaagtgtgctttataaaaaaaagttgtttataaaaacccctaaaaacaaaacaaacacacacacacacacatacacacacacacacaaaactttgaggcagcgcattgttttgcatccttttggcgtgatatccatatgaaattcatggctttttctttttttgcatattaaagataagacttcctctaccaccacaccaaatgactactacacactgctcatttgagaactgtcagctgagtggggcaggcttgagttttcatttcatatatctatatgtctataagtatataaatactatagttatatagataaagagatacgaatttctatagactgactttttccattttttaaatgttcatgtcacatcctaatagaaagaaattacttctagtcagtcatccaggcttacctgcttggtctagaatggatttttcccggagccggaagccaggaggaaactacaccacactaaaacattgtctacagctccagatgtttctcattttaaacaactttccactgacaacgaaagtaaagtaaagtattggatttttttaaagggaacatgtgaatgaatacacaggacttattatatcagagtgagtaatcggttggttggttgattgattgattgattgatacattcagcttcctgctgctagcaatgccacgatttagatttaatgatgcttcagtggaaatcaatcagaaggtattctgaccttgtgaacatcagaaggtattttttaactcccaagcagtagcaggacgatgatagggctggagggctatggattcccagcccatccctgtgaaggagtaggccactctttaagtgaaggattggatgattgttcataatacataaagttctctgtaattacaactaaattattatgccctcttctcacagtcaaaaggaactgggtggtttggtttttgttgcttttttagatttattgtcccatgtgggatgagtttttaaatgccacaagacataatttaaaataaataaactttgggaaaaggtgtaaaacagtagccccatcacatttgtgatactgacaggtatcaacccagaagcccatgaactgtgtttccatcctttgcatttctctgcgagtagttccacacaggtttgtaagtaagtaagaaagaaggcaaattgattcaaatgttacaaaaaaacccttcttggtggattagacaggttaaatatataaacaaacaaacaaaaattgctcaaaaaagaggagaaaagctcaagaggaaaagctaaggactggtaggaaaaagctttactctttcatgccattttatttctttttgatttttaaatcattcattcaatagataccaccgtgtgacctataattttgcaaatctgttacctctgacatcaagtgtaattagcttttggagagtgggctgacatcaagtgtaattagcttttggagagtgggttttgtccattattaataattaattaattaacatcaaacacggcttctcatgctatttctacctcactttggttttggggtgttcctgataattgtgcacacctgagttcacagcttcaccacttgtccattgcgttattttctttttcctttataattctttctttttccttcataattttcaaaagaaaacccaaagctctaaggtaacaaattaccaaattacatgaagatttggtttttgtcttgcatttttttcctttatgtgacgctggaccttttctttacccaaggatttttaaaactcagatttaaaacaaggggttactttacatcctactaagaagtttaagtaagtaagtttcattctaaaatcagaggtaaatagagtgcataaataattttgttttaatctttttgtttttcttttagacacattagctctggagtgagtctgtcataatatttgaacaaaaattgagagctttattgctgcattttaagcataattaatttggacattatttcgtgttgtgttctttataaccaccaagtattaaactgtaaatcataatgtaactgaagcataaacatcacatggcatgttttgtcattgttttcaggtactgagttcttacttgagtatcataatatattgtgttttaacaccaacactgtaacatttacgaattatttttttaaacttcagttttactgcattttcacaacatatcagacttcaccaaatatatgccttactattgtattatagtactgctttactgtgtatctcaataaagcacgcagttatgttac

SEQ ID NO: 296052 - DNA, 3402 bp, Artificial Sequence
  derived and/or modified sequence
atgccatcttctctgatgcttgaagtgcccgcactggctgatttcaaccgggcttggaccgaactcacagattggctgagtctcctcgaccaagtaataaagtcacagcgcgtgatggtaggagacctggaggatatcaatgagatgatcattaaacagaaagcaaccatgcaggaccttgaacagagaagacctcagttggaggaactgattactgctgcccaaaacctaaagaataagactagcaaccaggaggccaggaccattataactgatcggatagagaggatccagaaccagtgggacgaggtgcaagaacatctacagaatagacgtcaacagctgaatgaaatgttgaaagatagtactcagtggctggaggccaaggaggaggctgaacaggtcctggggcaagcacgggcaaaactggaatcttggaaagaaggtccctacaccgtggacgcgatccaaaaaaagatcaccgaaaccaaacaattagccaaggacctacggcagtggcagacgaatgtagatgtagccaacgacctcgccctgaaattgcttcgagattactccgctgacgacacaagaaaggtgcacatgatcacagaaaacataaatgcaagctggagaagtatccacaagagagtctctgaaagagaggcagcattggaagaaacacaccggctactacaacaattcccccttgacctcgagaagtttctcgcgtggctgaccgaagcggagacaacagctaatgttttacaagacgccactaggaaagagcgtctgctggaggacagtaagggcgttaaggaactcatgaagcagtggcaggatctccagggagaaattgaggcccacaccgacgtgtatcacaatctggatgagaattctcaaaagatcctgcggagcttagaggggtccgacgatgccgtgttgctgcaaaggaggctggacaatatgaatttcaagtggtctgagctccggaaaaagtccctcaacatcagatctcacctggaggcatctagtgatcagtggaagaggctgcacctatccttgcaggaactcctcgtgtggctccaactgaaagacgacgagctgtctcgtcaggcccccatagggggagacttccccgcggtgcaaaaacagaacgatgtgcatcgagccttcaagcgtgagttgaagacgaaggaaccggtgatcatgtccactttggagaccgttcggatttttctgactgagcagcccctggaaggcctggaaaaactgtaccaagagcccagggaactgccaccagaagagagagctcagaatgttactcgactgctgcggaaacaggcggaggaagtcaacaccgaatgggaaaagctcaatctgcactccgcggattggcagagaaagatcgatgaaactcttgagcgccttagggagctccaggaagcgacagatgaattagacttgaaactgaggcaagccgaagtcatcaaggggagttggcagccagtgggcgaccttcttattgattcattgcaggaccacctagagaaggtaaaagccctgcgcggagagattgccccacttaaggagaatgtgtcacacgtgaacgacctagcaaggcagctgacgaccttaggtatccaacttagcccgtataatttgtctacgctcgaggatctgaatacgcggtggaagctcctccaggtcgccgtggaagaccgcgtaagacagctgcacgaggcacaccgggacttcggaccagccagccagcacttcctttctacatccgtgcagggaccctgggaaagagcaataagcccaaacaaggtgccttattacatcaatcacgagactcagaccacttgctgggatcaccctaaaatgaccgagctttaccagagtctggccgatctgaacaatgttagattcagcgcttataggactgccatgaagctgaggcgcctccagaaggcactctgcttagacttgctgtcattatcagctgcctgcgatgcgctggatcagcataatctgaagcaaaacgatcagccgatggatatcctccagatcattaattgtttgaccactatttacgacaggttggagcaagaacacaataatttggttaacgtgcctctgtgcgtcgatatgtgcctgaactggctgctcaacgtgtacgacacgggaagaactggtcgcatccgagtgctttcatttaaaacaggcattattagtctatgtaaggcccacctggaagataagtataggtatctatttaagcaagtcgcctcttccacaggcttttgtgatcagcggagactgggtcttcttcttcatgattcaatacagattccacgccagctcggggaggtcgccagctttggaggctctaatatcgagcctagcgtacggagctgcttccagtttgcaaacaataagcccgagattgaagccgcgcttttcctagattggatgagactagagcctcaatctatggtgtggctgccagttctgcacagagtcgccgctgcagagactgccaaacatcaggccaaatgtaacatctgtaaagaatgtccaatcatagggtttcgctacaggtctctcaaacactttaattatgatatatgtcagagctgcttctttagcggcagagtggccaaaggtcataagatgcactatccaatggtcgagtactgcacccccaccacgagcggggaagatgtacgggacttcgccaaagtcctgaaaaacaagtttcggaccaagcgctacttcgctaaacatcccagaatgggctatcttcccgtgcagacagttctagagggagacaatatggagaccaatctgcaggccgagtatgaccggctgaaacaacagcatgagcacaagggtctgtcccccttaccttctccaccagaaatgatgccgacaagcccccagtctcctcgggatgccgaactgatcgctgaggcgaagttgctgcgacagcacaaagggaggctggaggcccgtatgcaaatcttagaggatcacaataagcagctagaaagccagctgcatcgtctaagacagcttctggagcaaccgcaagcagaggcgaaggtgaatggcactactgtaagttcgccctcaacatcccttcagcggtccgactcgtctcaaccgatgctccttcgagtggtcggcagtcagacttccgacagcatgggcgaggaagatcttttgagccccccccaagacactagtaccgggctggaggaagtaatggagcagttgaataattcctttccttctagcaggggacacaatgtgggttctctttttcacatggcagatgacttaggaagggctatggaatccctcgtgtccgtaatgacggatgaggaaggagccgagtag

SEQ ID NO: 296053 - DNA, 3402 bp, Artificial Sequence
  derived and/or modified sequence
atgcccagcagcctgatgctggaggtgcctgccctggccgacttcaacagagcctggacagagctgacagactggctgagcctgctggaccaggtgatcaagagccagagggtgatggtgggggacctggaggacatcaatgagatgatcatcaagcagaaggccaccatgcaggacctggagcagaggcggccccagctggaggagctgatcacagctgcccagaacctgaagaacaagaccagcaaccaggaggcccggaccatcatcacagaccgcatcgagcgcatccagaaccagtgggatgaggtgcaggagcacctgcagaacagacggcagcagctgaatgagatgctgaaggacagcacccagtggctggaggccaaggaggaggccgagcaggtgctgggccaggcccgggccaagctggagagctggaaggagggcccctacacagtggatgccatccagaagaagatcacagagaccaagcagctggccaaggacctgcggcagtggcagaccaacgtggatgtggccaatgacctggccctgaagctgctgcgggactacagcgcagatgacaccaggaaggtgcacatgatcacagagaacatcaatgcctcctggaggagcatccacaagagggtgtctgagcgggaggccgccctggaggagacccaccggctgctgcagcagttccccctggacctggagaagttcctggcctggctgacagaggccgagaccacagccaacgtgctgcaggatgccaccaggaaggagcggctgctggaggacagcaaaggagtgaaggagctgatgaagcagtggcaggacctgcagggcgagattgaggcccacacagatgtgtaccacaacctggatgagaacagccagaagatcctgcggagcctggagggcagtgatgatgctgtgctgctgcagaggcggctggacaacatgaacttcaagtggagcgagctgaggaagaagagcctgaacatccgcagccacctggaggccagcagtgaccagtggaagaggctgcacctgagcctgcaggagctgctggtgtggctgcagctgaaggatgatgagctgagccggcaggcccccatcggcggggacttccctgctgtgcagaagcagaatgatgtgcaccgggccttcaagcgggagctgaagaccaaggagcccgtcatcatgagcaccctggagaccgtgcgcatcttcctgacagagcagcccctggagggcctggagaagctgtaccaggagccccgggagctgcccccagaggagcgggcccagaatgtgacccggctgctgaggaagcaggccgaggaggtgaacacagagtgggagaagctgaacctgcacagcgctgactggcagaggaagattgatgagaccctggagcggctgcgggagctgcaggaggccacagatgagctggacctgaagctgcggcaggccgaggtgatcaagggctcctggcagcctgtgggggacctgctgattgacagcctgcaggaccacctggagaaggtgaaggccctgcggggggagatcgcccccctgaaggaaaatgtgagccacgtgaatgacctggcccggcagctgaccaccctgggcatccagctgagcccctacaacctgagcaccctggaggacctgaacacccgctggaagctgctgcaggtggccgtggaggacagagtgcggcagctgcacgaggcccaccgggactttggacctgccagccagcacttcctgagcacctctgtgcagggcccctgggagcgggccatcagccccaacaaggtgccctactacatcaaccacgagacccagaccacctgctgggaccaccccaagatgacagagctgtaccagagcctggccgacctgaacaacgtgcgcttcagcgcctacagaacagccatgaagctgcggcggctgcagaaggccctgtgcctggacctgctgagcctgtctgctgcctgtgatgccctggaccagcacaacctgaagcagaatgaccagcccatggacatcctgcagatcatcaactgcctgaccaccatctatgaccggctggagcaggagcacaacaacctggtgaatgtgcccctgtgtgtggacatgtgcctgaactggctgctgaatgtgtatgacaccggccgcacaggccgcatccgggtgctgtccttcaagacaggcatcatcagcctgtgcaaggcccacctggaggacaagtaccgctacctgttcaagcaggtggccagcagcacaggcttctgtgaccagaggcggctgggcctgctgctgcatgacagcatccagatcccccggcagctgggggaggtggccagctttggaggcagcaacatcgagcccagcgtgcgcagctgcttccagtttgccaacaacaagccagaaattgaggccgccctcttcctggactggatgaggctggagccccagagcatggtgtggctgcctgtgctgcaccgggtggccgctgctgagacagccaagcaccaggccaagtgcaacatctgcaaggagtgccccatcatcggcttccgctaccgcagcctgaagcacttcaactatgacatctgccagagctgcttcttcagcggccgggtggccaagggccacaagatgcactaccccatggtggagtactgcacccccaccaccagcggagaagatgtgcgggactttgccaaggtgctgaagaacaagttccgcaccaagcgctactttgccaagcaccccaggatgggctacctgcctgtgcagacagtgctggagggggacaacatggagaccaacctgcaggccgagtatgaccggctgaagcagcagcacgagcacaagggcctgagccccctgcccagccccccagagatgatgcccaccagcccccagagccccagagatgctgagctgattgctgaggccaagctgctgcggcagcacaagggccgcctggaggccaggatgcagatcctggaggaccacaacaagcagctggagagccagctgcaccggctgcggcagctgctggagcagccccaggccgaggccaaggtgaatggcaccaccgtgagcagccccagcaccagcctgcagaggagtgacagcagccagcccatgctgctgcgggtggtgggcagccagaccagtgacagcatgggagaggaggacctgctgagccccccccaggacaccagcacaggcctggaggaggtgatggagcagctgaacaacagcttccccagcagccggggccacaacgtgggcagcctcttccacatggctgatgacctgggccgggccatggagagcctggtgtctgtgatgacagatgaggagggcgctgagtag

SEQ ID NO: 296054 - DNA, 3402 bp, Artificial Sequence
  derived and/or modified sequence
atgcccagcagcctgatgctggaggtgcccgccctggccgacttcaacagggcatggactgaattaacggactggctgagcctcctcgatcaggtcatcaagtcccaacgagtaatggtgggagacttggaagatatcaatgagatgattataaagcagaaggctactatgcaggacctcgaacagcgccggcctcaactcgaagaactgataaccgcggcgcaaaatctcaagaacaagactagtaatcaggaagcaagaactattattaccgaccgtatagaacgaatccagaatcagtgggacgaggtgcaagagcacctgcaaaaccgcaggcaacagctcaacgagatgttgaaggactcgactcaatggctggaagcaaaggaggaggcggaacaagtactcggccaggcacgggcgaaactggagtcctggaaggagggtccctacacggtggacgcaatccagaaaaagatcaccgaaacaaagcaacttgctaaggatcttcgccagtggcagactaatgtagacgtggcgaatgacctcgctctaaagctgctgcgagattattcagccgacgatactcgcaaagtccatatgattaccgaaaacattaatgcctcttggaggtcaatacataaacgcgttagcgagagggaggctgccctcgaggaaactcatcgattgctgcagcagtttcctttggacctggagaagttcctggcttggctgaccgaagctgaaaccaccgcaaacgtgctccaggatgccaccagaaaggaacgtctgcttgaagacagcaagggtgtgaaggagctcatgaagcaatggcaggatctccagggagagattgaagctcacactgacgtataccataatttggatgagaactcccagaagatactccgctcccttgaaggctcagacgatgccgttcttctgcaaaggcgcctggacaatatgaactttaagtggtcagaactcagaaaaaagtctttgaacatccggagccacctggaagccagttcagaccagtggaaacggctgcatctctcattgcaagagctgttggtttggcttcagctgaaggatgatgaactgtcacggcaggcccctatcggcggagattttccggccgtgcagaagcagaacgacgtgcacagagccttcaaacgagagctaaagacaaaggagccagtgattatgtccacgctggagacggttagaatctttctgacagagcagcctttggagggcctcgagaagctgtatcaggagcctagagaacttcctcccgaagagagagcgcaaaatgtaactcggcttctgcggaaacaggcggaggaggtaaataccgagtgggaaaagctgaatctgcatagcgcggattggcagcgaaaaatcgacgaaaccttggagcgattaagagaactacaggaggccaccgacgaactggatttgaaactcaggcaggccgaagtcatcaagggatcctggcagcccgtaggagatctgctcatagattcgctacaagatcacctggagaaggttaaagctctgcgaggagagattgcgccacttaaagagaacgtgtctcatgttaacgacttggcacgacagctgacgaccttgggaatccaactatccccctacaatctgtctacactggaagatctcaacaccaggtggaaactgctccaggttgctgtggaagaccgggtgcggcagctgcatgaggcccatagagactttgggcctgcaagtcagcacttcctgtcaacttcggtccagggcccgtgggagagggctattagccccaataaagttccttactatatcaatcatgagacccagacaacttgctgggaccatcctaagatgaccgagctataccagagcctggccgaccttaacaatgtgagattttcagcttaccggacagcgatgaagctgagaagactccagaaagcgctttgtcttgatcttctcagcttgagcgccgcatgcgacgcacttgaccagcacaatttgaagcagaacgatcaaccaatggacatactgcagattattaactgcttaactaccatttacgatcgcttggaacaggaacataataacctggtcaatgtgccactctgtgtcgacatgtgccttaactggctgctgaatgtgtacgacacggggcgcaccggccggatccgcgtgctgagcttcaaaacaggaatcatttcactgtgtaaggctcacctggaggacaaatacaggtacttgtttaaacaggtagcgtcatctaccggattctgcgaccagcgacggctgggtttgctactccatgacagcattcaaatcccccggcagctgggcgaagtggctagttttggaggaagcaacattgagccctccgtgcggtcgtgtttccagttcgcgaataacaaacccgaaatcgaggccgccttgtttctcgactggatgaggttggagccacagagtatggtgtggctacccgtgctgcaccgcgtcgctgcggcagagacagccaaacatcaagctaagtgcaacatctgtaaagagtgccctattatcggatttcggtatcgaagtctcaagcattttaactatgatatttgccagtcctgtttcttcagtgggagagtggctaagggacacaagatgcactatccgatggtggaatactgcacgcctacgaccagcggggaggacgtgcgcgactttgcgaaggtgcttaaaaacaagttcagaaccaagcggtattttgccaaacacccgagaatgggatacttacccgtccagacggttctggagggggacaatatggagaccaacctccaggcggagtacgacagattaaaacaacagcatgaacataagggtctgtctcccttaccttcaccaccggaaatgatgccgaccagtcctcagagtccccgggacgctgaactcatagccgaagcaaaattgctcaggcagcacaaaggccggctggaggcgcggatgcaaattttagaagaccataacaagcaactggaaagtcagttgcatagactcagacaactcctcgaacagccgcaagcagaagcaaaagtgaatggtaccactgtatcgagtccatcaacaagcctgcaacgaagcgacagcagccaaccgatgctgctgcgcgtggtcggcagccaaacttcagactctatgggagaggaggatctcctgagcccccctcaagatactagtacgggacttgaggaagttatggagcagctgaacaattcattcccaagctcccgcggccacaacgtgggcagcctgtttcatatggctgatgatctcggcagggctatggagtcacttgtctcggttatgactgacgaggaaggagccgaatag

SEQ ID NO: 296055 - DNA, 3402 bp, Artificial Sequence
  derived and/or modified sequence
atgccctcgtccctgatgctcgaggtgcccgctctcgctgatttcaatagagcgtggaccgagttaactgattggttatctttactggatcaagttataaagtcccaacgtgtgatggtcggcgacctggaagatatcaatgagatgattatcaaacaaaaagcaactatgcaggacctcgagcagcgaaggcctcaactggaggagcttatcacagccgctcaaaatctgaagaataaaacaagcaaccaggaagctaggaccatcattaccgacagaatcgagaggattcagaaccagtgggacgaggtgcaagagcacctgcaaaaccggcgtcagcaactcaatgaaatgcttaaggatagcacccagtggctcgaagcgaaagaggaagccgaacaagtcttggggcaagcccgtgccaaattagaatcttggaaggaaggaccatacactgtcgacgccatccagaaaaagatcactgagaccaaacaactggccaaggatttgaggcagtggcagacaaatgtcgatgttgctaacgacttggcactcaagttattgcgtgattactctgccgatgacaccagaaaagtacatatgattacggaaaatattaacgcctcctggcgcagcatccacaagcgcgtttcagagcgtgaagctgcactggaagagacccacaggttactacagcaatttccactggacctggagaagttcctggcttggctcacggaagccgaaaccacagccaacgtgttacaagatgctacgaggaaagaaagattattagaggactccaagggagtgaaggagctgatgaaacagtggcaggatctgcagggtgaaatagaggcacatactgatgtgtaccataacctggacgagaactctcaaaaaatactacgatcactggagggcagcgacgacgccgtattactacagaggcgtctcgacaacatgaattttaaatggagtgagctaagaaaaaagtcccttaatattaggtcgcatctcgaagcgtcaagcgaccagtggaaaagactgcacttgtccttgcaggaactgctcgtttggttacagcttaaagatgatgagctgtcacgccaggctccaattgggggagattttcctgccgtgcaaaagcagaatgatgttcaccgcgctttcaagagagaacttaagacaaaggaacctgttatcatgagcacgcttgagaccgtacgcatttttctgaccgagcagccgttagagggtcttgaaaaactgtaccaggagccacgcgaactgccaccagaagaaagagcacagaatgtgacccggctcctacgcaagcaggcggaagaggtgaataccgagtgggagaagcttaacctccatagcgcagactggcagcgcaagatcgacgaaactctggagagactgagagaactccaggaggccaccgatgagttagacttaaaactccgccaagccgaggtgatcaagggcagctggcagccggttggcgacctgttaatagacagtctgcaagatcacttggaaaaagtcaaggctttgcggggtgagatagctccgctgaaggaaaatgtgagccacgtgaatgatctcgctaggcagctgactacgctcggaattcaactatccccatataacctaagcacactcgaagatctaaatacccggtggaagttgctacaggtggctgtggaagaccgcgtaaggcagttgcacgaggcccaccgggatttcggaccagcttctcaacatttcctgagcacctccgtccagggaccgtgggagcgcgctatcagcccaaataaggtgccatactatattaaccatgaaacgcagaccacgtgttgggaccatccgaagatgacagagctttaccagtccctggccgacctcaataacgtcagattttctgcttatcgaacagccatgaagctaagaaggctgcagaaagccttatgcctggatctcctttcgctctcggcggcttgcgacgccctggatcagcacaacttaaagcagaacgatcaaccgatggatatcctccagataataaattgtctgacaacaatttatgatcgcttggagcaggagcacaacaaccttgtgaacgtgccgttatgtgtggacatgtgtcttaattggcttctgaacgtgtacgatacgggaaggacaggaagaatacgtgtcctgtctttcaagaccggcataattagcctctgtaaggcccatctcgaggacaaatatcggtacctcttcaagcaagtagcttcatccaccggtttttgcgaccaaagacgtctagggctgttgctccatgactccattcagattccgcgacagctcggggaggtggcatcattcggagggtccaatattgaaccttccgtcaggagctgtttccagtttgcaaacaacaaacctgaaatcgaggcagccctttttctggactggatgcgccttgagcctcagtctatggtgtggctcccagtgctccatagagtggctgcagctgagactgccaaacaccaggccaagtgcaatatatgtaaggagtgccccattattggcttcagatatcggagcctgaagcattttaactacgacatttgtcagagctgctttttttccggccgagtagctaaaggccataaaatgcattaccccatggttgagtactgtaccccaacaacatccggcgaggacgtccgggattttgcgaaggtccttaaaaacaaatttcggaccaagagatatttcgccaaacacccaagaatgggctacctccctgtacagacggtgctcgaaggagacaatatggaaactaacctgcaggcggaatacgaccggctgaaacagcagcacgagcataaagggctgagccctctaccaagccctcctgagatgatgccgacgtccccacagtcacctagggatgccgagctgatcgccgaagccaagctgctgaggcagcacaaaggcaggctcgaggcaagaatgcagatcctcgaagaccacaataaacagctcgaaagccagttacatcggctcaggcagttgttggagcagccccaagccgaagccaaggtgaatggcaccaccgtttcatcaccaagcacatccctgcaacgcagtgacagctcgcagcctatgctgctgagagtggtgggctcccagacttccgactccatgggggaggaggatttactttctccgccacaggatacgagtacagggctcgaggaggtaatggaacagcttaataacagttttccgtcaagtaggggccacaatgtcggctccttattccacatggcagatgatttaggtcgagccatggagagcctggtgtctgtaatgacggatgaagaaggcgctgaatag

SEQ ID NO: 296056 - DNA, 3399 bp, Artificial Sequence
  derived and/or modified sequence
atgcccagcagcctgatgctggaggtgcccgccctggccgacttcaaccgcgcctggaccgagctgaccgactggctgagcctgctggaccaggtgatcaagagccagcgcgtgatggtgggcgacctggaggacatcaacgagatgatcatcaagcagaaggccaccatgcaggacctggagcagcgccgcccccagctggaggagctgatcaccgccgcccagaacctgaagaacaagaccagcaaccaggaggcccgcaccatcatcaccgaccgcatcgagcgcatccagaaccagtgggacgaggtgcaggagcacctgcagaaccgccgccagcagctgaacgagatgctgaaggacagcacccagtggctggaggccaaggaggaggccgagcaggtgctgggccaggcccgcgccaagctggagagctggaaggagggcccctacaccgtggacgccatccagaagaagatcaccgagaccaagcagctggccaaggacctgcgccagtggcagaccaacgtggacgtggccaacgacctggccctgaagctgctgcgcgactacagcgccgacgacacccgcaaggtgcacatgatcaccgagaacatcaacgccagctggcgcagcatccacaagcgcgtgagcgagcgcgaggccgccctggaggagacccaccgcctgctgcagcagttccccctggacctggagaagttcctggcctggctgaccgaggccgagaccaccgccaacgtgctgcaggacgccacccgcaaggagcgcctgctggaggacagcaagggcgtgaaggagctgatgaagcagtggcaggacctgcagggcgagatcgaggcccacaccgacgtgtaccacaacctggacgagaacagccagaagatcctgcgcagcctggagggcagcgacgacgccgtgctgctgcagcgccgcctggacaacatgaacttcaagtggagcgagctgcgcaagaagagcctgaacatccgcagccacctggaggccagcagcgaccagtggaagcgcctgcacctgagcctgcaggagctgctggtgtggctgcagctgaaggacgacgagctgagccgccaggcccccatcggcggcgacttccccgccgtgcagaagcagaacgacgtgcaccgcgccttcaagcgcgagctgaagaccaaggagcccgtgatcatgagcaccctggagaccgtgcgcatcttcctgaccgagcagcccctggagggcctggagaagctgtaccaggagccccgcgagctgccccccgaggagcgcgcccagaacgtgacccgcctgctgcgcaagcaggccgaggaggtgaacaccgagtgggagaagctgaacctgcacagcgccgactggcagcgcaagatcgacgagaccctggagcgcctgcgcgagctgcaggaggccaccgacgagctggacctgaagctgcgccaggccgaggtgatcaagggcagctggcagcccgtgggcgacctgctgatcgacagcctgcaggaccacctggagaaggtgaaggccctgcgcggcgagatcgcccccctgaaggagaacgtgagccacgtgaacgacctggcccgccagctgaccaccctgggcatccagctgagcccctacaacctgagcaccctggaggacctgaacacccgctggaagctgctgcaggtggccgtggaggaccgcgtgcgccagctgcacgaggcccaccgcgacttcggccccgccagccagcacttcctgagcaccagcgtgcagggcccctgggagcgcgccatcagccccaacaaggtgccctactacatcaaccacgagacccagaccacctgctgggaccaccccaagatgaccgagctgtaccagagcctggccgacctgaacaacgtgcgcttcagcgcctaccgcaccgccatgaagctgcgccgcctgcagaaggccctgtgcctggacctgctgagcctgagcgccgcctgcgacgccctggaccagcacaacctgaagcagaacgaccagcccatggacatcctgcagatcatcaactgcctgaccaccatctacgaccgcctggagcaggagcacaacaacctggtgaacgtgcccctgtgcgtggacatgtgcctgaactggctgctgaacgtgtacgacaccggccgcaccggccgcatccgcgtgctgagcttcaagaccggcatcatcagcctgtgcaaggcccacctggaggacaagtaccgctacctgttcaagcaggtggccagcagcaccggcttctgcgaccagcgccgcctgggcctgctgctgcacgacagcatccagatcccccgccagctgggcgaggtggccagcttcggcggcagcaacatcgagcccagcgtgcgcagctgcttccagttcgccaacaacaagcccgagatcgaggccgccctgttcctggactggatgcgcctggagccccagagcatggtgtggctgcccgtgctgcaccgcgtggccgccgccgagaccgccaagcaccaggccaagtgcaacatctgcaaggagtgccccatcatcggcttccgctaccgcagcctgaagcacttcaactacgacatctgccagagctgcttcttcagcggccgcgtggccaagggccacaagatgcactaccccatggtggagtactgcacccccaccaccagcggcgaggacgtgcgcgacttcgccaaggtgctgaagaacaagttccgcaccaagcgctacttcgccaagcacccccgcatgggctacctgcccgtgcagaccgtgctggagggcgacaacatggagaccaacctgcaggccgagtacgaccgcctgaagcagcagcacgagcacaagggcctgagccccctgcccagcccccccgagatgatgcccaccagcccccagagcccccgcgacgccgagctgatcgccgaggccaagctgctgcgccagcacaagggccgcctggaggcccgcatgcagatcctggaggaccacaacaagcagctggagagccagctgcaccgcctgcgccagctgctggagcagccccaggccgaggccaaggtgaacggcaccaccgtgagcagccccagcaccagcctgcagcgcagcgacagcagccagcccatgctgctgcgcgtggtgggcagccagaccagcgacagcatgggcgaggaggacctgctgagccccccccaggacaccagcaccggcctggaggaggtgatggagcagctgaacaacagcttccccagcagccgcggccacaacgtgggcagcctgttccacatggccgacgacctgggccgcgccatggagagcctggtgagcgtgatgaccgacgaggagggcgccgag

SEQ ID NO: 296057 - DNA, 3402 bp, Artificial Sequence
  derived and/or modified sequence
atgcccagcagcctgatgctggaggtgcccgccctggccgacttcaacagagcctggaccgagctgaccgactggctgagcctgctggaccaggtgatcaagagccagagagtgatggtgggcgacctggaggacatcaacgagatgatcatcaagcagaaggccaccatgcaggacctggagcagagaagaccccagctggaggagctgatcaccgccgcccagaacctgaagaacaagaccagcaaccaggaggccagaaccatcatcaccgacagaatcgagagaatccagaaccagtgggacgaggtgcaggagcacctgcagaacagaagacagcagctgaacgagatgctgaaggacagcacccagtggctggaggccaaggaggaggccgagcaggtgctgggccaggccagagccaagctggagagctggaaggagggcccctacaccgtggacgccatccagaagaagatcaccgagaccaagcagctggccaaggacctgagacagtggcagaccaacgtggacgtggccaacgacctggccctgaagctgctgagagactacagcgccgacgacaccagaaaggtgcacatgatcaccgagaacatcaacgccagctggagaagcatccacaagagagtgagcgagagagaggccgccctggaggagacccacagactgctgcagcagttccccctggacctggagaagttcctggcctggctgaccgaggccgagaccaccgccaacgtgctgcaggacgccaccagaaaggagagactgctggaggacagcaagggcgtgaaggagctgatgaagcagtggcaggacctgcagggcgagatcgaggcccacaccgacgtgtaccacaacctggacgagaacagccagaagatcctgagaagcctggagggcagcgacgacgccgtgctgctgcagagaagactggacaacatgaacttcaagtggagcgagctgagaaagaagagcctgaacatcagaagccacctggaggccagcagcgaccagtggaagagactgcacctgagcctgcaggagctgctggtgtggctgcagctgaaggacgacgagctgagcagacaggcccccatcggcggcgacttccccgccgtgcagaagcagaacgacgtgcacagagccttcaagagagagctgaagaccaaggagcccgtgatcatgagcaccctggagaccgtgagaatcttcctgaccgagcagcccctggagggcctggagaagctgtaccaggagcccagagagctgccccccgaggagagagcccagaacgtgaccagactgctgagaaagcaggccgaggaggtgaacaccgagtgggagaagctgaacctgcacagcgccgactggcagagaaagatcgacgagaccctggagagactgagagagctgcaggaggccaccgacgagctggacctgaagctgagacaggccgaggtgatcaagggcagctggcagcccgtgggcgacctgctgatcgacagcctgcaggaccacctggagaaggtgaaggccctgagaggcgagatcgcccccctgaaggagaacgtgagccacgtgaacgacctggccagacagctgaccaccctgggcatccagctgagcccctacaacctgagcaccctggaggacctgaacaccagatggaagctgctgcaggtggccgtggaggacagagtgagacagctgcacgaggcccacagagacttcggccccgccagccagcacttcctgagcaccagcgtgcagggcccctgggagagagccatcagccccaacaaggtgccctactacatcaaccacgagacccagaccacctgctgggaccaccccaagatgaccgagctgtaccagagcctggccgacctgaacaacgtgagattcagcgcctacagaaccgccatgaagctgagaagactgcagaaggccctgtgcctggacctgctgagcctgagcgccgcctgcgacgccctggaccagcacaacctgaagcagaacgaccagcccatggacatcctgcagatcatcaactgcctgaccaccatctacgacagactggagcaggagcacaacaacctggtgaacgtgcccctgtgcgtggacatgtgcctgaactggctgctgaacgtgtacgacaccggcagaaccggcagaatcagagtgctgagcttcaagaccggcatcatcagcctgtgcaaggcccacctggaggacaagtacagatacctgttcaagcaggtggccagcagcaccggcttctgcgaccagagaagactgggcctgctgctgcacgacagcatccagatccccagacagctgggcgaggtggccagcttcggcggcagcaacatcgagcccagcgtgagaagctgcttccagttcgccaacaacaagcccgagatcgaggccgccctgttcctggactggatgagactggagccccagagcatggtgtggctgcccgtgctgcacagagtggccgccgccgagaccgccaagcaccaggccaagtgcaacatctgcaaggagtgccccatcatcggcttcagatacagaagcctgaagcacttcaactacgacatctgccagagctgcttcttcagcggcagagtggccaagggccacaagatgcactaccccatggtggagtactgcacccccaccaccagcggcgaggacgtgagagacttcgccaaggtgctgaagaacaagttcagaaccaagagatacttcgccaagcaccccagaatgggctacctgcccgtgcagaccgtgctggagggcgacaacatggagaccaacctgcaggccgagtacgacagactgaagcagcagcacgagcacaagggcctgagccccctgcccagcccccccgagatgatgcccaccagcccccagagccccagagacgccgagctgatcgccgaggccaagctgctgagacagcacaagggcagactggaggccagaatgcagatcctggaggaccacaacaagcagctggagagccagctgcacagactgagacagctgctggagcagccccaggccgaggccaaggtgaacggcaccaccgtgagcagccccagcaccagcctgcagagaagcgacagcagccagcccatgctgctgagagtggtgggcagccagaccagcgacagcatgggcgaggaggacctgctgagccccccccaggacaccagcaccggcctggaggaggtgatggagcagctgaacaacagcttccccagcagcagaggccacaacgtgggcagcctgttccacatggccgacgacctgggcagagccatggagagcctggtgagcgtgatgaccgacgaggagggcgccgagtag

SEQ ID NO: 296058 - DNA, 7048 bp, Artificial Sequence
  derived and/or modified sequence
acactagcaatggcaaagctttgtgcggaggcattgctggctgctctgaactaaaagcatccgtggggaccgaaagaggtttttgcacaccttattaaggaactccaggatggcattgggcagcggcaaactgttgtcagaacattgaatgcaactggggaagaaataattcagcaatcctcaaaaacagatgccagtattctacaggaaaaattgggaagcctgaatctgcggtggcaggaggtctgcaaacagctgtcagacagaaaaaagaggctagaagaacaaaagaatatcttgtcagaatttcaaagagatttaaatgaatttgttttatggttggaggaagcagataacattgctagtatcccacttgaacctggaaaagagcagcaactaaaagaaaagcttgagcaagtcaagttactggtggaagagttgcccctgcgccagggaattctcaaacaattaaatgaaactggaggacccgtgcttgtaagtgctcccataagcccagaagagcaagataaacttgaaaataagctcaagcagacaaatctccagtggataaaggtttccagagctttacctgagaaacaaggagaaattgaagctcaaataaaagaccttgggcagcttgaaaaaaagcttgaagaccttgaagagcagttaaatcatctgctgctgtggttatctcctattaggaatcagttggaaatttataaccaaccaaaccaagaaggaccatttgacgttaaggaaactgaaatagcagttcaagctaaacaaccggatgtggaagagattttgtctaaagggcagcatttgtacaaggaaaaaccagccactcagccagtgaagaggaagttagaagatctgagctctgagtggaaggcggtaaaccgtttacttcaagagctgagggcaaagcagcctgacctagctcctggactgaccactattggagcctctcctactcagactgttactctggtgacacaacctgtggttactaaggaaactgccatctccaaactagaaatgccatcttccttgatgttggaggtacctgctctggcagatttcaaccgggcttggacagaacttaccgactggctttctctgcttgatcaagttataaaatcacagagggtgatggtgggtgaccttgaggatatcaacgagatgatcatcaagcagaaggcaacaatgcaggatttggaacagaggcgtccccagttggaagaactcattaccgctgcccaaaatttgaaaaacaagaccagcaatcaagaggctagaacaatcattacggatcgaattgaaagaattcagaatcagtgggatgaagtacaagaacaccttcagaaccggaggcaacagttgaatgaaatgttaaaggattcaacacaatggctggaagctaaggaagaagctgagcaggtcttaggacaggccagagccaagcttgagtcatggaaggagggtccctatacagtagatgcaatccaaaagaaaatcacagaaaccaagcagttggccaaagacctccgccagtggcagacaaatgtagatgtggcaaatgacttggccctgaaacttctccgggattattctgcagatgataccagaaaagtccacatgataacagagaatatcaatgcctcttggagaagcattcataaaagggtgagtgagcgagaggctgctttggaagaaactcatagattactgcaacagttccccctggacctggaaaagtttcttgcctggcttacagaagctgaaacaactgccaatgtcctacaggatgctacccgtaaggaaaggctcctagaagactccaagggagtaaaagagctgatgaaacaatggcaagacctccaaggtgaaattgaagctcacacagatgtttatcacaacctggatgaaaacagccaaaaaatcctgagatccctggaaggttccgatgatgcagtcctgttacaaagacgtttggataacatgaacttcaagtggagtgaacttcggaaaaagtctctcaacattaggtcccatttggaagccagttctgaccagtggaagcgtctgcacctttctctgcaggaacttctggtgtggctacagctgaaagatgatgaattaagccggcaggcacctattggaggcgactttccagcagttcagaagcagaacgatgtacatagggccttcaagagggaattgaaaactaaagaacctgtaatcatgagtactcttgagactgtacgaatatttctgacagagcagcctttggaaggactagagaaactctaccaggagcccagagagctgcctcctgaggagagagcccagaatgtcactcggcttctacgaaagcaggctgaggaggtcaatactgagtgggaaaaattgaacctgcactccgctgactggcagagaaaaatagatgagacccttgaaagactccgggaacttcaagaggccacggatgagctggacctcaagctgcgccaagctgaggtgatcaagggatcctggcagcccgtgggcgatctcctcattgactctctccaagatcacctcgagaaagtcaaggcacttcgaggagaaattgcgcctctgaaagagaacgtgagccacgtcaatgaccttgctcgccagcttaccactttgggcattcagctctcaccgtataacctcagcactctggaagacctgaacaccagatggaagcttctgcaggtggccgtcgaggaccgagtcaggcagctgcatgaagcccacagggactttggtccagcatctcagcactttctttccacgtctgtccagggtccctgggagagagccatctcgccaaacaaagtgccctactatatcaaccacgagactcaaacaacttgctgggaccatcccaaaatgacagagctctaccagtctttagctgacctgaataatgtcagattctcagcttataggactgccatgaaactccgaagactgcagaaggccctttgcttggatctcttgagcctgtcagctgcatgtgatgccttggaccagcacaacctcaagcaaaatgaccagcccatggatatcctgcagattattaattgtttgaccactatttatgaccgcctggagcaagagcacaacaatttggtcaacgtccctctctgcgtggatatgtgtctgaactggctgctgaatgtttatgatacgggacgaacagggaggatccgtgtcctgtcttttaaaactggcatcatttccctgtgtaaagcacatttggaagacaagtacagataccttttcaagcaagtggcaagttcaacaggattttgtgaccagcgcaggctgggcctccttctgcatgattctatccaaattccaagacagttgggtgaagttgcatcctttgggggcagtaacattgagccaagtgtccggagctgcttccaatttgctaataataagccagagatcgaagcggccctcttcctagactggatgagactggaaccccagtccatggtgtggctgcccgtcctgcacagagtggctgctgcagaaactgccaagcatcaggccaaatgtaacatctgcaaagagtgtccaatcattggattcaggtacaggagtctaaagcactttaattatgacatctgccaaagctgctttttttctggtcgagttgcaaaaggccataaaatgcactatcccatggtggaatattgcactccgactacatcaggagaagatgttcgagactttgccaaggtactaaaaaacaaatttcgaaccaaaaggtattttgcgaagcatccccgaatgggctacctgccagtgcagactgtcttagagggggacaacatggaaacgaatctgcaagcagaatatgaccgtctaaagcagcagcacgaacataaaggcctgtccccactgccgtcccctcctgaaatgatgcccacctctccccagagtccccgggatgctgagctcattgctgaggccaagctactgcgtcaacacaaaggccgcctggaagccaggatgcaaatcctggaagaccacaataaacagctggagtcacagttacacaggctaaggcagctgctggagcaaccccaggcagaggccaaagtgaatggcacaacggtgtcctctccttctacctctctacagaggtccgacagcagtcagcctatgctgctccgagtggttggcagtcaaacttcggactccatgggtgaggaagatcttctcagtcctccccaggacacaagcacagggttagaggaggtgatggagcaactcaacaactccttccctagttcaagaggacacaatgtaggaagtcttttccacatggcagatgatttgggcagagcgatggagtccttagtatcagtcatgacagatgaagaaggagcagaataaatgttttacaactcctgattcccgcatggtttttataatattcatacaacaaagaggattagacagtaagagtttacaagaaataaatctatatttttgtgaagggtagtggtattatactgtagatttcagtagtttctaagtctgttattgttttgttaacaatggcaggttttacacgtctatgcaattgtacaaaaaagttataagaaaactacatgtaaaatcttgatagctaaataacttgccatttctttatatggaacgcattttgggttgtttaaaaatttataacagttataaagaaagattgtaaactaaagtgtgctttataaaaaaaagttgtttataaaaacccctaaaaacaaaacaaacacacacacacacacatacacacacacacacaaaactttgaggcagcgcattgttttgcatccttttggcgtgatatccatatgaaattcatggctttttctttttttgcatattaaagataagacttcctctaccaccacaccaaatgactactacacactgctcatttgagaactgtcagctgagtggggcaggcttgagttttcatttcatatatctatatgtctataagtatataaatactatagttatatagataaagagatacgaatttctatagactgactttttccattttttaaatgttcatgtcacatcctaatagaaagaaattacttctagtcagtcatccaggcttacctgcttggtctagaatggatttttcccggagccggaagccaggaggaaactacaccacactaaaacattgtctacagctccagatgtttctcattttaaacaactttccactgacaacgaaagtaaagtaaagtattggatttttttaaagggaacatgtgaatgaatacacaggacttattatatcagagtgagtaatcggttggttggttgattgattgattgattgatacattcagcttcctgctgctagcaatgccacgatttagatttaatgatgcttcagtggaaatcaatcagaaggtattctgaccttgtgaacatcagaaggtattttttaactcccaagcagtagcaggacgatgatagggctggagggctatggattcccagcccatccctgtgaaggagtaggccactctttaagtgaaggattggatgattgttcataatacataaagttctctgtaattacaactaaattattatgccctcttctcacagtcaaaaggaactgggtggtttggtttttgttgcttttttagatttattgtcccatgtgggatgagtttttaaatgccacaagacataatttaaaataaataaactttgggaaaaggtgtaaaacagtagccccatcacatttgtgatactgacaggtatcaacccagaagcccatgaactgtgtttccatcctttgcatttctctgcgagtagttccacacaggtttgtaagtaagtaagaaagaaggcaaattgattcaaatgttacaaaaaaacccttcttggtggattagacaggttaaatatataaacaaacaaacaaaaattgctcaaaaaagaggagaaaagctcaagaggaaaagctaaggactggtaggaaaaagctttactctttcatgccattttatttctttttgatttttaaatcattcattcaatagataccaccgtgtgacctataattttgcaaatctgttacctctgacatcaagtgtaattagcttttggagagtgggctgacatcaagtgtaattagcttttggagagtgggttttgtccattattaataattaattaattaacatcaaacacggcttctcatgctatttctacctcactttggttttggggtgttcctgataattgtgcacacctgagttcacagcttcaccacttgtccattgcgttattttctttttcctttataattctttctttttccttcataattttcaaaagaaaacccaaagctctaaggtaacaaattaccaaattacatgaagatttggtttttgtcttgcatttttttcctttatgtgacgctggaccttttctttacccaaggatttttaaaactcagatttaaaacaaggggttactttacatcctactaagaagtttaagtaagtaagtttcattctaaaatcagaggtaaatagagtgcataaataattttgttttaatctttttgtttttcttttagacacattagctctggagtgagtctgtcataatatttgaacaaaaattgagagctttattgctgcattttaagcataattaatttggacattatttcgtgttgtgttctttataaccaccaagtattaaactgtaaatcataatgtaactgaagcataaacatcacatggcatgttttgtcattgttttcaggtactgagttcttacttgagtatcataatatattgtgttttaacaccaacactgtaacatttacgaattatttttttaaacttcagttttactgcattttcacaacatatcagacttcaccaaatatatgccttactattgtattatagtactgctttactgtgtatctcaataaagcacgcagttatgttac

SEQ ID NO: 296059 - protein, 1115 aa, Artificial Sequence
  derived and/or modified sequence
MPSSLMLEVPALADFNRAWTELTDWLSLLDQVIKSQRVMVGDLEDINEMIIKQKATMQDLEQRRPQLEELITAAQNLKNKTSNQEARTIITDRIERIQNQWDEVQEHLQNRRQQLNEMLKDSTQWLEAKEEAEQVLGQARAKLESWKEGPYTVDAIQKKITETKQLAKDLRQWQTNVDVANDLALKLLRDYSADDTRKVHMITENINASWRSIHKRVSEREAALEETHRLLQQFPLDLEKFLAWLTEAETTANVLQDATRKERLLEDSKGVKELMKQWQDLQGEIEAHTDVYHNLDENSQKILRSLEGSDDAVLLQRRLDNMNFKWSELRKKSLNIRSHLEASSDQWKRLHLSLQELLVWLQLKDDELSRQAPIGGDFPAVQKQNDVHRAFKRELKTKEPVIMSTLETVRIFLTEQPLEGLEKLYQEPRELPPEERAQNVTRLLRKQAEEVNTEWEKLNLHSADWQRKIDETLERLRELQEATDELDLKLRQAEVIKGSWQPVGDLLIDSLQDHLEKVKALRGEIAPLKENVSHVNDLARQLTTLGIQLSPYNLSTLEDLNTRWKLLQVAVEDRVRQLHEAHRDFGPASQHFLSTSVQGPWERAISPNKVPYYINHETQTTCWDHPKMTELYQSLADLNNVRFSAYRTAMKLRRLQKALCLDLLSLSAACDALDQHNLKQNDQPMDILQIINCLTTIYDRLEQEHNNLVNVPLCVDMCLNWLLNVYDTGRTGRIRVLSFKTGIISLCKAHLEDKYRYLFKQVASSTGFCDQRRLGLLLHDSIQIPRQLGEVASFGGSNIEPSVRSCFQFANNKPEIEAALFLDWMRLEPQSMVWLPVLHRVAAAETAKHQAKCNICKECPIIGFRYRSLKHFNYDICQSCFFSGRVAKGHKMHYPMVEYCTPTTSGEDVRDFAKVLKNKFRTKRYFAKHPRMGYLPVQTVLEGDNMETNLQAEYDRLKQQHEHKGLSPLPSPPEMMPTSPQSPRDAELIAEAKLLRQHKGRLEARMQILEDHNKQLESQLHRLRQLLEQPQAEAKVNGTTVSSPSTSLQRSDSSQPMLLRVVGSQTSDSMGEEDLLSPPQDTSTGLEEVMEQLNNSFPSSRGRNTPGKPMREDTM

SEQ ID NO: 296060 - DNA, 7080 bp, Artificial Sequence
  derived and/or modified sequence
acactagcaatggcaaagctttgtgcggaggcattgctggctgctctgaactaaaagcatccgtggggaccgaaagaggtttttgcacaccttattaaggaactccaggatggcattgggcagcggcaaactgttgtcagaacattgaatgcaactggggaagaaataattcagcaatcctcaaaaacagatgccagtattctacaggaaaaattgggaagcctgaatctgcggtggcaggaggtctgcaaacagctgtcagacagaaaaaagaggctagaagaacaaaagaatatcttgtcagaatttcaaagagatttaaatgaatttgttttatggttggaggaagcagataacattgctagtatcccacttgaacctggaaaagagcagcaactaaaagaaaagcttgagcaagtcaagttactggtggaagagttgcccctgcgccagggaattctcaaacaattaaatgaaactggaggacccgtgcttgtaagtgctcccataagcccagaagagcaagataaacttgaaaataagctcaagcagacaaatctccagtggataaaggtttccagagctttacctgagaaacaaggagaaattgaagctcaaataaaagaccttgggcagcttgaaaaaaagcttgaagaccttgaagagcagttaaatcatctgctgctgtggttatctcctattaggaatcagttggaaatttataaccaaccaaaccaagaaggaccatttgacgttcaggaaactgaaatagcagttcaagctaaacaaccggatgtggaagagattttgtctaaagggcagcatttgtacaaggaaaaaccagccactcagccagtgaagaggaagttagaagatctgagctctgagtggaaggcggtaaaccgtttacttcaagagctgagggcaaagcagcctgacctagctcctggactgaccactattggagcctctcctactcagactgttactctggtgacacaacctgtggttactaaggaaactgccatctccaaactagaaatgccatcttccttgatgttggaggtacctgctctggcagatttcaaccgggcttggacagaacttaccgactggctttctctgcttgatcaagttataaaatcacagagggtgatggtgggtgaccttgaggatatcaacgagatgatcatcaagcagaaggcaacaatgcaggatttggaacagaggcgtccccagttggaagaactcattaccgctgcccaaaatttgaaaaacaagaccagcaatcaagaggctagaacaatcattacggatcgaattgaaagaattcagaatcagtgggatgaagtacaagaacaccttcagaaccggaggcaacagttgaatgaaatgttaaaggattcaacacaatggctggaagctaaggaagaagctgagcaggtcttaggacaggccagagccaagcttgagtcatggaaggagggtccctatacagtagatgcaatccaaaagaaaatcacagaaaccaagcagttggccaaagacctccgccagtggcagacaaatgtagatgtggcaaatgacttggccctgaaacttctccgggattattctgcagatgataccagaaaagtccacatgataacagagaatatcaatgcctcttggagaagcattcataaaagggtgagtgagcgagaggctgctttggaagaaactcatagattactgcaacagttccccctggacctggaaaagtttcttgcctggcttacagaagctgaaacaactgccaatgtcctacaggatgctacccgtaaggaaaggctcctagaagactccaagggagtaaaagagctgatgaaacaatggcaagacctccaaggtgaaattgaagctcacacagatgtttatcacaacctggatgaaaacagccaaaaaatcctgagatccctggaaggttccgatgatgcagtcctgttacaaagacgtttggataacatgaacttcaagtggagtgaacttcggaaaaagtctctcaacattaggtcccatttggaagccagttctgaccagtggaagcgtctgcacctttctctgcaggaacttctggtgtggctacagctgaaagatgatgaattaagccggcaggcacctattggaggcgactttccagcagttcagaagcagaacgatgtacatagggccttcaagagggaattgaaaactaaagaacctgtaatcatgagtactcttgagactgtacgaatatttctgacagagcagcctttggaaggactagagaaactctaccaggagcccagagagctgcctcctgaggagagagcccagaatgtcactcggcttctacgaaagcaggctgaggaggtcaatactgagtgggaaaaattgaacctgcactccgctgactggcagagaaaaatagatgagacccttgaaagactccaggaacttcaagaggccacggatgagctggacctcaagctgcgccaagctgaggtgatcaagggatcctggcagcccgtgggcgatctcctcattgactctctccaagatcacctcgagaaagtcaaggcacttcgaggagaaattgcgcctctgaaagagaacgtgagccacgtcaatgaccttgctcgccagcttaccactttgggcattcagctctcaccgtataacctcagcactctggaagacctgaacaccagatggaagcttctgcaggtggccgtcgaggaccgagtcaggcagctgcatgaagcccacagggactttggtccagcatctcagcactttctttccacgtctgtccagggtccctgggagagagccatctcgccaaacaaagtgccctactatatcaaccacgagactcaaacaacttgctgggaccatcccaaaatgacagagctctaccagtctttagctgacctgaataatgtcagattctcagcttataggactgccatgaaactccgaagactgcagaaggccctttgcttggatctcttgagcctgtcagctgcatgtgatgccttggaccagcacaacctcaagcaaaatgaccagcccatggatatcctgcagattattaattgtttgaccactatttatgaccgcctggagcaagagcacaacaatttggtcaacgtccctctctgcgtggatatgtgtctgaactggctgctgaatgtttatgatacgggacgaacagggaggatccgtgtcctgtcttttaaaactggcatcatttccctgtgtaaagcacatttggaagacaagtacagataccttttcaagcaagtggcaagttcaacaggattttgtgaccagcgcaggctgggcctccttctgcatgattctatccaaattccaagacagttgggtgaagttgcatcctttgggggcagtaacattgagccaagtgtccggagctgcttccaatttgctaataataagccagagatcgaagcggccctcttcctagactggatgagactggaaccccagtccatggtgtggctgcccgtcctgcacagagtggctgctgcagaaactgccaagcatcaggccaaatgtaacatctgcaaagagtgtccaatcattggattcaggtacaggagtctaaagcactttaattatgacatctgccaaagctgctttttttctggtcgagttgcaaaaggccataaaatgcactatcccatggtggaatattgcactccgactacatcaggagaagatgttcgagactttgccaaggtactaaaaaacaaatttcgaaccaaaaggtattttgcgaagcatccccgaatgggctacctgccagtgcagactgtcttagagggggacaacatggaaacgaatctgcaagcagaatatgaccgtctaaagcagcagcacgaacataaaggcctgtccccactgccgtcccctcctgaaatgatgcccacctctccccagagtccccgggatgctgagctcattgctgaggccaagctactgcgtcaacacaaaggccgcctggaagccaggatgcaaatcctggaagaccacaataaacagctggagtcacagttacacaggctaaggcagctgctggagcaaccccaggcagaggccaaagtgaatggcacaacggtgtcctctccttctacctctctacagaggtccgacagcagtcagcctatgctgctccgagtggttggcagtcaaacttcggactccatgggtgaggaagatcttctcagtcctccccaggacacaagcacagggttagaggaggtgatggagcaactcaacaactccttccctagttcaagaggaagaaatacccctggaaagccaatgagagaggacacaatgtaggaagtcttttccacatggcagatgatttgggcagagcgatggagtccttagtatcagtcatgacagatgaagaaggagcagaataaatgttttacaactcctgattcccgcatggtttttataatattcatacaacaaagaggattagacagtaagagtttacaagaaataaatctatatttttgtgaagggtagtggtattatactgtagatttcagtagtttctaagtctgttattgttttgttaacaatggcaggttttacacgtctatgcaattgtacaaaaaagttataagaaaactacatgtaaaatcttgatagctaaataacttgccatttctttatatggaacgcattttgggttgtttaaaaatttataacagttataaagaaagattgtaaactaaagtgtgctttataaaaaaaagttgtttataaaaacccctaaaaacaaaacaaacacacacacacacacatacacacacacacacaaaactttgaggcagcgcattgttttgcatccttttggcgtgatatccatatgaaattcatggctttttctttttttgcatattaaagataagacttcctctaccaccacaccaaatgactactacacactgctcatttgagaactgtcagctgagtggggcaggcttgagttttcatttcatatatctatatgtctataagtatataaatactatagttatatagataaagagatacgaatttctatagactgactttttccattttttaaatgttcatgtcacatcctaatagaaagaaattacttctagtcagtcatccaggcttacctgcttggtctagaatggatttttcccggagccggaagccaggaggaaactacaccacactaaaacattgtctacagctccagatgtttctcattttaaacaactttccactgacaacgaaagtaaagtaaagtattggatttttttaaagggaacatgtgaatgaatacacaggacttattatatcagagtgagtaatcggttggttggttgattgattgattgattgatacattcagcttcctgctgctagcaatgccacgatttagatttaatgatgcttcagtggaaatcaatcagaaggtattctgaccttgtgaacatcagaaggtattttttaactcccaagcagtagcaggacgatgatagggctggagggctatggattcccagcccatccctgtgaaggagtaggccactctttaagtgaaggattggatgattgttcataatacataaagttctctgtaattacaactaaattattatgccctcttctcacagtcaaaaggaactgggtggtttggtttttgttgcttttttagatttattgtcccatgtgggatgagtttttaaatgccacaagacataatttaaaataaataaactttgggaaaaggtgtaaaacagtagccccatcacatttgtgatactgacaggtatcaacccagaagcccatgaactgtgtttccatcctttgcatttctctgcgagtagttccacacaggtttgtaagtaagtaagaaagaaggcaaattgattcaaatgttacaaaaaaacccttcttggtggattagacaggttaaatatataaacaaacaaacaaaaattgctcaaaaaagaggagaaaagctcaagaggaaaagctaaggactggtaggaaaaagctttactctttcatgccattttatttctttttgatttttaaatcattcattcaatagataccaccgtgtgacctataattttgcaaatctgttacctctgacatcaagtgtaattagcttttggagagtgggctgacatcaagtgtaattagcttttggagagtgggttttgtccattattaataattaattaattaacatcaaacacggcttctcatgctatttctacctcactttggttttggggtgttcctgataattgtgcacacctgagttcacagcttcaccacttgtccattgcgttattttctttttcctttataattctttctttttccttcataattttcaaaagaaaacccaaagctctaaggtaacaaattaccaaattacatgaagatttggtttttgtcttgcatttttttcctttatgtgacgctggaccttttctttacccaaggatttttaaaactcagatttaaaacaaggggttactttacatcctactaagaagtttaagtaagtaagtttcattctaaaatcagaggtaaatagagtgcataaataattttgttttaatctttttgtttttcttttagacacattagctctggagtgagtctgtcataatatttgaacaaaaattgagagctttattgctgcattttaagcataattaatttggacattatttcgtgttgtgttctttataaccaccaagtattaaactgtaaatcataatgtaactgaagcataaacatcacatggcatgttttgtcattgttttcaggtactgagttcttacttgagtatcataatatattgtgttttaacaccaacactgtaacatttacgaattatttttttaaacttcagttttactgcattttcacaacatatcagacttcaccaaatatatgccttactattgtattatagtactgctttactgtgtatctcaataaagcacgcagttatgttac

SEQ ID NO: 296061 - DNA, 3348 bp, Artificial Sequence
  derived and/or modified sequence
atgcctagctccctgatgctggaggtgcccgccctcgcagacttcaatagggcctggacagagctcactgactggctgtcactgttggaccaagtcatcaaaagtcaaagagttatggtcggtgatttagaggatattaacgagatgattataaagcagaaggccactatgcaggatctggaacagcgccgcccccaactggaggagctgattacagcggcgcagaatctgaaaaataagaccagcaaccaggaagcccggaccattattacagatcgtatagaacgcatacagaaccagtgggacgaagtacaggaacatctccaaaaccggagacagcagctgaacgagatgctcaaggacagcactcaatggctcgaggccaaggaggaggctgagcaagtgctgggtcaggccagggcaaaactggaatcatggaaagaaggcccttacactgtagatgccatacagaagaaaatcaccgagaccaaacagctggcaaaagatcttcgacaatggcagacgaatgtcgacgtggctaacgatctcgctctcaagctgcttagagactactccgccgatgacacacgaaaagtccacatgataactgaaaacatcaatgctagctggagatcaattcacaagcgggtatcagaacgggaagccgcactggaggagacgcacaggttactgcagcagttccctttagatttggagaaatttctggcctggctgacagaggccgaaaccaccgctaatgttcttcaggacgccacaagaaaagagcgacttctcgaagatagtaaaggagtaaaagagctgatgaagcagtggcaggatttgcaaggagagatcgaagcccacactgatgtctaccacaatctggatgagaactcccagaagattctccgatccttagagggtagcgatgacgcagtgctgctccagcggaggctggacaacatgaacttcaaatggtccgaattaaggaaaaagtctctcaatattagaagccatctggaggccagcagtgatcagtggaaacgtttacacctctcgctgcaagagctactagtttggcttcagcttaaagacgatgaactttctcgccaggcaccgattgggggcgattttccagccgttcaaaaacaaaacgatgtgcatagggcctttaaacgtgaacttaagaccaaggaacccgtgatcatgagtacactggagactgtgaggatattcttgacagagcagcctctcgaagggcttgaaaagttatatcaggagcccagagaactaccccccgaagagcgtgcacaaaacgtgactagacttctaaggaagcaggccgaagaagtgaacacagaatgggaaaagctgaacctgcattccgccgattggcagcgcaagatcgatgagactctcgagaggttgcgggagctgcaggaggctaccgacgaactggacctcaagctgagacaggccgaagtgatcaaaggaagttggcagccagttggtgatctgctgattgacagccttcaagaccacttagagaaagttaaagctctgcgcggggagatagcacccctgaaagaaaatgtgtctcacgtgaacgacctagccagacagctcacaacacttgggatccagctgagcccttacaatctgagtactctggaagacctgaacactcggtggaagctgttgcaagtggcagtagaggacagagtccggcaactgcacgaagcacaccgcgattttggtccagcttcacagcactttctgagtaccagtgttcagggcccatgggaacgtgcaatctcaccaaataaagtgccatattacattaatcacgaaacccaaacgacctgttgggatcaccccaagatgacagaactatatcagagcctggctgacttaaataatgttcgattctctgcatatagaacagctatgaaactgcgccggctccaaaaggccctgtgtttagacctcttgtctctgagcgcagcttgtgacgccctagaccagcacaacttaaagcagaatgaccagcccatggacatcttgcaaatcatcaattgtctcactacgatttacgaccgtttggagcaagagcacaataatctggtgaatgttccactctgtgtggatatgtgtctgaactggcttttgaatgtgtacgataccggccgcaccggacggattcgcgttctctccttcaagacagggatcatatctttgtgtaaagcgcacctggaggataagtatcgttatctctttaaacaggttgcctcgtctacgggattttgtgaccagcgtagactcggattgctactccatgatagcatccagatcccacggcagctcggggaggtggcttcttttggcggaagcaacatcgagccctcggttaggagttgtttccaatttgctaacaacaagcccgagatcgaagcagcgcttttcctggattggatgcgccttgagcctcagagtatggtttggcttcccgtccttcatagggtagctgcagccgagaccgcaaaacatcaggccaagtgcaacatctgcaaagagtgtcctattattgggttccggtacaggtcactcaaacattttaactacgacatttgccagtcctgcttcttcagtggacgggttgcgaaggggcacaagatgcattacccaatggtagagtattgcacacctaccacgtcaggtgaggacgtaagggatttcgccaaggttcttaagaacaaatttcgcactaaacggtactttgcaaagcaccctcggatgggttatctgcctgtgcagaccgtgctggagggagacaacatggaaaccaatctacaggccgagtatgaccgcctgaaacagcaacacgaacacaaggggctgtcccctctcccttctccccccgagatgatgcccaccagcccacaatcgccccgcgacgcggaacttatcgctgaggcgaaattactgcgccagcacaagggtagactggaggcccggatgcaaatccttgaggaccacaataagcagttagagagccaactgcaccgtctgagacagctgctcgaacagccacaggccgaggcaaaggtgaatggaacgaccgtgtcgagtccgtccactagcctgcagaggtcagacagctcacagccaatgttgctcagagttgttgggtctcagaccagcgatagcatgggcgaggaggacctcttaagccccccccaggatacaagtacgggcctggaggaagtgatggaacagctgaacaattcttttccatcttcacgcggccgcaatacaccaggcaagccaatgcgagaggatacaatgtag

SEQ ID NO: 296062 - DNA, 3348 bp, Artificial Sequence
  derived and/or modified sequence
atgcccagcagcctgatgctggaggtgcctgccctggccgacttcaacagagcctggacagagctgacagactggctgagcctgctggaccaggtgatcaagagccagagggtgatggtgggggacctggaggacatcaatgagatgatcatcaagcagaaggccaccatgcaggacctggagcagaggcggccccagctggaggagctgatcacagctgcccagaacctgaagaacaagaccagcaaccaggaggcccggaccatcatcacagaccgcatcgagcgcatccagaaccagtgggatgaggtgcaggagcacctgcagaacagacggcagcagctgaatgagatgctgaaggacagcacccagtggctggaggccaaggaggaggccgagcaggtgctgggccaggcccgggccaagctggagagctggaaggagggcccctacacagtggatgccatccagaagaagatcacagagaccaagcagctggccaaggacctgcggcagtggcagaccaacgtggatgtggccaatgacctggccctgaagctgctgcgggactacagcgcagatgacaccaggaaggtgcacatgatcacagagaacatcaatgcctcctggaggagcatccacaagagggtgtctgagcgggaggccgccctggaggagacccaccggctgctgcagcagttccccctggacctggagaagttcctggcctggctgacagaggccgagaccacagccaacgtgctgcaggatgccaccaggaaggagcggctgctggaggacagcaaaggagtgaaggagctgatgaagcagtggcaggacctgcagggcgagattgaggcccacacagatgtgtaccacaacctggatgagaacagccagaagatcctgcggagcctggagggcagtgatgatgctgtgctgctgcagaggcggctggacaacatgaacttcaagtggagcgagctgaggaagaagagcctgaacatccgcagccacctggaggccagcagtgaccagtggaagaggctgcacctgagcctgcaggagctgctggtgtggctgcagctgaaggatgatgagctgagccggcaggcccccatcggcggggacttccctgctgtgcagaagcagaatgatgtgcaccgggccttcaagcgggagctgaagaccaaggagcccgtcatcatgagcaccctggagaccgtgcgcatcttcctgacagagcagcccctggagggcctggagaagctgtaccaggagccccgggagctgcccccagaggagcgggcccagaatgtgacccggctgctgaggaagcaggccgaggaggtgaacacagagtgggagaagctgaacctgcacagcgctgactggcagaggaagattgatgagaccctggagcggctgcgggagctgcaggaggccacagatgagctggacctgaagctgcggcaggccgaggtgatcaagggctcctggcagcctgtgggggacctgctgattgacagcctgcaggaccacctggagaaggtgaaggccctgcggggggagatcgcccccctgaaggaaaatgtgagccacgtgaatgacctggcccggcagctgaccaccctgggcatccagctgagcccctacaacctgagcaccctggaggacctgaacacccgctggaagctgctgcaggtggccgtggaggacagagtgcggcagctgcacgaggcccaccgggactttggacctgccagccagcacttcctgagcacctctgtgcagggcccctgggagcgggccatcagccccaacaaggtgccctactacatcaaccacgagacccagaccacctgctgggaccaccccaagatgacagagctgtaccagagcctggccgacctgaacaacgtgcgcttcagcgcctacagaacagccatgaagctgcggcggctgcagaaggccctgtgcctggacctgctgagcctgtctgctgcctgtgatgccctggaccagcacaacctgaagcagaatgaccagcccatggacatcctgcagatcatcaactgcctgaccaccatctatgaccggctggagcaggagcacaacaacctggtgaatgtgcccctgtgtgtggacatgtgcctgaactggctgctgaatgtgtatgacaccggccgcacaggccgcatccgggtgctgtccttcaagacaggcatcatcagcctgtgcaaggcccacctggaggacaagtaccgctacctgttcaagcaggtggccagcagcacaggcttctgtgaccagaggcggctgggcctgctgctgcatgacagcatccagatcccccggcagctgggggaggtggccagctttggaggcagcaacatcgagcccagcgtgcgcagctgcttccagtttgccaacaacaagccagaaattgaggccgccctcttcctggactggatgaggctggagccccagagcatggtgtggctgcctgtgctgcaccgggtggccgctgctgagacagccaagcaccaggccaagtgcaacatctgcaaggagtgccccatcatcggcttccgctaccgcagcctgaagcacttcaactatgacatctgccagagctgcttcttcagcggccgggtggccaagggccacaagatgcactaccccatggtggagtactgcacccccaccaccagcggagaagatgtgcgggactttgccaaggtgctgaagaacaagttccgcaccaagcgctactttgccaagcaccccaggatgggctacctgcctgtgcagacagtgctggagggggacaacatggagaccaacctgcaggccgagtatgaccggctgaagcagcagcacgagcacaagggcctgagccccctgcccagccccccagagatgatgcccaccagcccccagagccccagagatgctgagctgattgctgaggccaagctgctgcggcagcacaagggccgcctggaggccaggatgcagatcctggaggaccacaacaagcagctggagagccagctgcaccggctgcggcagctgctggagcagccccaggccgaggccaaggtgaatggcaccaccgtgagcagccccagcaccagcctgcagaggagtgacagcagccagcccatgctgctgcgggtggtgggcagccagaccagtgacagcatgggagaggaggacctgctgagccccccccaggacaccagcacaggcctggaggaggtgatggagcagctgaacaacagcttccccagcagccggggcaggaacacccctgggaagcccatgagggaggacaccatgtag

SEQ ID NO: 296063 - DNA, 3348 bp, Artificial Sequence
  derived and/or modified sequence
atgcccagcagcctgatgctggaggtgcccgccctggccgacttcaatcgggcatggacggagctcacggactggctctcgttacttgaccaggtgattaagtcccagcgagtgatggttggagatctggaagacattaacgagatgatcataaaacaaaaggccacaatgcaggatttggaacaaagacgccctcagcttgaagaactgatcaccgctgctcagaatctgaaaaacaagaccagcaaccaggaggcccgaactatcatcaccgacaggatagaaaggatacagaaccagtgggacgaagtgcaggaacatttgcaaaatcgtaggcaacagttgaacgaaatgttgaaagattctacacaatggctcgaggcaaaggaagaggcggaacaagttctgggtcaggcgagagccaagcttgaatcatggaaggaagggccgtatactgtcgatgccattcagaagaaaataacagaaacaaaacaactggcaaaggaccttcggcaatggcagacaaatgtggacgtagccaatgatctagccctgaaattgctaagggattactccgctgatgatacgcgcaaagtacatatgattacagagaatattaatgcatcctggcggagtattcacaagcgcgttagcgagcgcgaagcagcgctggaggagacccaccggctgttgcagcagtttcctctggatcttgagaaatttctcgcctggctgacagaagcggaaacaacagcgaatgtcctgcaggatgcaacccggaaggagagactcctggaagacagcaagggggtgaaagagctgatgaaacagtggcaggaccttcagggagagattgaagcacataccgatgtgtaccataatctggatgaaaactcccaaaaaatcctacgctccctcgaaggatcagatgatgctgtcctgttgcaaaggagactggacaacatgaactttaagtggtctgagctgaggaagaaaagcctgaatattagaagtcacctggaggccagtagcgaccagtggaagcgtctccacctctctctgcaggaacttctggtgtggctgcagctgaaggacgatgaactgtcccggcaggcccctattggaggagacttccctgctgttcagaaacagaacgacgtccacagggcgtttaagcgtgaactgaaaaccaaagagccggtgattatgtccacgctggaaactgtgcgaatcttcctgactgaacagcctttggaaggactggaaaagctgtatcaggaaccaagggagctcccacctgaagagagggcacaaaatgttaccagattactgagaaaacaggcggaggaggttaacacagaatgggaaaagctaaacttgcactcagctgattggcaacgaaaaatcgacgaaactctcgaacggttgcgcgaactgcaggaagccacggacgagcttgatctcaagctgagacaagcagaagtgatcaagggctcttggcagccggtaggagacctcctaatcgatagcttgcaggaccatttagagaaggttaaagcactcagaggggaaattgcgcccctcaaggagaatgtgagtcacgtgaatgatctggcaaggcaactcactaccctgggcattcaactgagcccctataacctatctacactcgaggacctcaacacgcgctggaagctcttgcaagtggccgtggaggacagagtacggcagttgcacgaagcccatagagactttggcccggccagtcagcactttctctccacttccgtacagggaccctgggagagggccatttcaccaaacaaagtcccatactatattaaccacgagactcagactacctgctgggatcatccgaagatgacagagctgtatcaaagcctcgccgacctcaataatgtgcgcttctccgcctatcggacagccatgaagcttaggaggttgcagaaggcactgtgcctggacctcttatcgctgtcagcggcatgtgacgctctggatcagcacaacctgaagcagaatgaccaacccatggacattctgcaaatcattaactgcctgacaaccatttatgatcgacttgagcaggagcataataaccttgttaacgtgcctctgtgcgttgatatgtgtctgaattggctactgaatgtgtacgatacaggtaggactggccgtattagagtcttatctttcaagactggcattattagtctgtgcaaggcacatctcgaggataaatataggtatctgtttaagcaagtagcctctagtactggcttctgcgaccagcggcggctgggtctgctactgcacgactctatccagatcccccgccagctcggcgaagtcgcctccttcggcggaagcaacatcgaaccgtcagttcggtcttgttttcagtttgctaacaacaaacccgaaatagaggccgctctcttcttagattggatgagactggaacctcagagtatggtgtggctccccgtgttgcacagggtggcagccgccgagactgccaagcaccaggccaaatgcaacatatgtaaagagtgtccaatcattgggttccgttataggtcgctgaaacactttaattacgatatttgtcagtcttgcttctttagcgggagggtcgctaagggacacaaaatgcactaccctatggttgagtattgcaccccaactacgtccggagaggatgtgagagacttcgccaaagttcttaagaacaaattccgaacaaagcggtacttcgcaaaacatcccagaatgggctatctgcctgtgcagacagtgctggagggggataacatggagaccaacctgcaggcagaatacgacaggttaaagcagcaacacgaacataaagggctctcacccctcccctccccgcccgaaatgatgcccacatctccacaatctcctagggatgccgaactcattgcggaagccaagctgctgaggcagcacaaagggaggttagaggcccgtatgcaaattttggaagatcacaacaaacagcttgaatctcagctgcatcgccttaggcagctgttggagcagccccaggcggaggcaaaggtcaacgggacaacagtttcttctccttctacatcccttcagcggtcagattcgagtcagccaatgcttcttcgggtcgtgggctcccaaacatcagatagcatgggtgaggaggatttactgtctccaccacaggacacttctacaggactagaagaggtgatggaacagctaaataattcttttcccagttccaggggaagaaatactcccggcaagccaatgagagaggacacgatgtag

SEQ ID NO: 296064 - DNA, 3348 bp, Artificial Sequence
  derived and/or modified sequence
atgccaagcagtttgatgcttgaagtgccagcactggcggacttcaatcgagcctggacggaattaacagattggcttagccttctcgaccaggtgatcaagtcacagagagtgatggtcggcgatttagaagatattaatgagatgataatcaaacaaaaagccaccatgcaggatctggaacagcgacgaccacagttggaggaactcataaccgcagctcagaatctcaagaacaagacgagcaaccaggaggcccgtacaatcattactgaccggatcgaacgcatccagaaccaatgggatgaagtccaggagcatctgcagaatagacgccaacagcttaatgaaatgctgaaagattctacccagtggcttgaagcgaaggaagaagccgagcaggttttggggcaggccagggcgaagctcgagtcctggaaagaaggcccatacaccgttgatgcaatccagaagaaaattaccgaaacaaaacagctcgctaaggacctcagacagtggcaaactaatgtcgatgtggccaacgatctggcccttaagttgctgagagactacagcgccgatgatacaagaaaggtccatatgattaccgagaacattaacgcctcatggcggagtatccacaaaagggtgtctgaaagagaagcagcgctagaggagacacaccgcctgctccagcaattccctctggatctggaaaaatttttggcgtggcttactgaagccgaaaccaccgcaaatgtgctgcaggatgccacgaggaaagaacgcctgcttgaggattcgaagggtgttaaggagttgatgaaacagtggcaggacctacaaggtgagattgaggctcacacagatgtttaccacaacctggacgagaattcgcagaaaattctccggtcgctagaagggagcgatgacgccgtcctgcttcagagaagactggacaatatgaactttaaatggtcagagctgagaaaaaaatcgctcaatattagatcccatctggaagcttcctctgaccagtggaagcgtctgcatctgtcattacaggagctgctggtttggctacagttgaaggacgacgagcttagtaggcaggccccaattgggggagacttcccagcagtgcagaagcagaacgacgtacaccgggcttttaagagggagctgaagaccaaggaaccagtgattatgtctaccttagagacagtcagaatcttcctcacagaacagccacttgagggactcgagaagctataccaggagcctagagagctgccccctgaagagagagctcagaatgttacccgacttctgcgaaagcaggcggaggaggtgaacactgagtgggaaaagctgaacctccactccgccgactggcagcgaaaaattgacgaaacactggaacgtttacgtgagctgcaggaggctacagatgagctggacctgaagctgaggcaggcagaagtgataaagggtagctggcagccagtgggcgatcttctgattgactcactgcaggatcatcttgagaaagtgaaagcactacgcggtgagatcgccccactcaaagagaatgtatctcacgtgaacgacctggctcggcaactgacaacactcgggatacagctatctccctataatctgtctactctcgaagatcttaacacacgttggaagcttctgcaagttgctgtggaagatagagtcaggcagcttcacgaagctcacagggattttgggcctgcctctcagcactttctctcaacatcagtgcaggggccatgggagcgagccattagccctaacaaggtgccctactacataaaccacgaaacgcaaaccacgtgctgggaccacccgaagatgactgagctgtaccagtctctggccgacctgaacaatgtgcgcttctctgcctacagaactgccatgaagctgcggcgtctgcaaaaggccctttgtttagatctactgagtttgagcgctgcttgcgatgccctggatcagcataacctgaagcagaatgaccagcctatggacattctgcaaatcattaattgccttactaccatctatgaccggttagaacaggagcataataacctcgtgaatgtgcccctatgcgtcgacatgtgtcttaattggctgctgaacgtctacgataccggcagaactggcagaattagggtgttgagctttaagaccggcattatttctctatgcaaagctcatcttgaggataagtatcgatatctatttaaacaggtagcttcgtcgactggcttttgtgatcagcgtcgactcggcctcctgctccatgatagtatccagatcccaagacagctcggcgaagtcgcttcattcggcggatccaacatcgagccatctgtgaggtcctgcttccaattcgcgaataacaagcccgagattgaagccgcactctttttagactggatgcgcctggaaccccagtcaatggtatggctgccagtcctccacagggtcgcggctgcagaaacagctaagcaccaggccaaatgcaatatctgcaaagagtgtcccatcattgggtttagatatagaagcctgaaacattttaactacgacatctgccaatcctgcttttttagcggacgggttgcgaagggacataaaatgcattacccaatggtcgagtactgcaccccaaccacgtcaggtgaagatgtcagggactttgcgaaagttctgaagaacaaattccgtaccaaacggtattttgcgaaacacccgcgaatgggttacttgccagtccagactgtgcttgaaggggacaacatggagacgaacttgcaggccgaatatgatcggctgaagcagcagcacgaacacaaagggctgtcacctctcccttcaccacccgagatgatgccaactagcccccagtccccccgagatgcagaactcatcgcagaagccaagctgctgcgccagcataaaggcagactggaggcccgaatgcagattttggaagaccataacaagcaactggagagtcaactgcatagactgcgacagctgctggagcagccgcaagcggaagccaaagttaatggaaccaccgtcagttcgcctagtaccagtctgcagcgctctgacagtagccagcctatgctgctgagagtggttgggtcccagacgtctgacagtatgggagaagaagatcttctgagccctccccaggacacctctactggacttgaagaagtgatggaacagctgaacaactcgttcccatcctccaggggacgcaacactcctggaaaacccatgagagaagacacaatgtag

SEQ ID NO: 296065 - DNA, 3345 bp, Artificial Sequence
  derived and/or modified sequence
atgcccagcagcctgatgctggaggtgcccgccctggccgacttcaaccgcgcctggaccgagctgaccgactggctgagcctgctggaccaggtgatcaagagccagcgcgtgatggtgggcgacctggaggacatcaacgagatgatcatcaagcagaaggccaccatgcaggacctggagcagcgccgcccccagctggaggagctgatcaccgccgcccagaacctgaagaacaagaccagcaaccaggaggcccgcaccatcatcaccgaccgcatcgagcgcatccagaaccagtgggacgaggtgcaggagcacctgcagaaccgccgccagcagctgaacgagatgctgaaggacagcacccagtggctggaggccaaggaggaggccgagcaggtgctgggccaggcccgcgccaagctggagagctggaaggagggcccctacaccgtggacgccatccagaagaagatcaccgagaccaagcagctggccaaggacctgcgccagtggcagaccaacgtggacgtggccaacgacctggccctgaagctgctgcgcgactacagcgccgacgacacccgcaaggtgcacatgatcaccgagaacatcaacgccagctggcgcagcatccacaagcgcgtgagcgagcgcgaggccgccctggaggagacccaccgcctgctgcagcagttccccctggacctggagaagttcctggcctggctgaccgaggccgagaccaccgccaacgtgctgcaggacgccacccgcaaggagcgcctgctggaggacagcaagggcgtgaaggagctgatgaagcagtggcaggacctgcagggcgagatcgaggcccacaccgacgtgtaccacaacctggacgagaacagccagaagatcctgcgcagcctggagggcagcgacgacgccgtgctgctgcagcgccgcctggacaacatgaacttcaagtggagcgagctgcgcaagaagagcctgaacatccgcagccacctggaggccagcagcgaccagtggaagcgcctgcacctgagcctgcaggagctgctggtgtggctgcagctgaaggacgacgagctgagccgccaggcccccatcggcggcgacttccccgccgtgcagaagcagaacgacgtgcaccgcgccttcaagcgcgagctgaagaccaaggagcccgtgatcatgagcaccctggagaccgtgcgcatcttcctgaccgagcagcccctggagggcctggagaagctgtaccaggagccccgcgagctgccccccgaggagcgcgcccagaacgtgacccgcctgctgcgcaagcaggccgaggaggtgaacaccgagtgggagaagctgaacctgcacagcgccgactggcagcgcaagatcgacgagaccctggagcgcctgcgcgagctgcaggaggccaccgacgagctggacctgaagctgcgccaggccgaggtgatcaagggcagctggcagcccgtgggcgacctgctgatcgacagcctgcaggaccacctggagaaggtgaaggccctgcgcggcgagatcgcccccctgaaggagaacgtgagccacgtgaacgacctggcccgccagctgaccaccctgggcatccagctgagcccctacaacctgagcaccctggaggacctgaacacccgctggaagctgctgcaggtggccgtggaggaccgcgtgcgccagctgcacgaggcccaccgcgacttcggccccgccagccagcacttcctgagcaccagcgtgcagggcccctgggagcgcgccatcagccccaacaaggtgccctactacatcaaccacgagacccagaccacctgctgggaccaccccaagatgaccgagctgtaccagagcctggccgacctgaacaacgtgcgcttcagcgcctaccgcaccgccatgaagctgcgccgcctgcagaaggccctgtgcctggacctgctgagcctgagcgccgcctgcgacgccctggaccagcacaacctgaagcagaacgaccagcccatggacatcctgcagatcatcaactgcctgaccaccatctacgaccgcctggagcaggagcacaacaacctggtgaacgtgcccctgtgcgtggacatgtgcctgaactggctgctgaacgtgtacgacaccggccgcaccggccgcatccgcgtgctgagcttcaagaccggcatcatcagcctgtgcaaggcccacctggaggacaagtaccgctacctgttcaagcaggtggccagcagcaccggcttctgcgaccagcgccgcctgggcctgctgctgcacgacagcatccagatcccccgccagctgggcgaggtggccagcttcggcggcagcaacatcgagcccagcgtgcgcagctgcttccagttcgccaacaacaagcccgagatcgaggccgccctgttcctggactggatgcgcctggagccccagagcatggtgtggctgcccgtgctgcaccgcgtggccgccgccgagaccgccaagcaccaggccaagtgcaacatctgcaaggagtgccccatcatcggcttccgctaccgcagcctgaagcacttcaactacgacatctgccagagctgcttcttcagcggccgcgtggccaagggccacaagatgcactaccccatggtggagtactgcacccccaccaccagcggcgaggacgtgcgcgacttcgccaaggtgctgaagaacaagttccgcaccaagcgctacttcgccaagcacccccgcatgggctacctgcccgtgcagaccgtgctggagggcgacaacatggagaccaacctgcaggccgagtacgaccgcctgaagcagcagcacgagcacaagggcctgagccccctgcccagcccccccgagatgatgcccaccagcccccagagcccccgcgacgccgagctgatcgccgaggccaagctgctgcgccagcacaagggccgcctggaggcccgcatgcagatcctggaggaccacaacaagcagctggagagccagctgcaccgcctgcgccagctgctggagcagccccaggccgaggccaaggtgaacggcaccaccgtgagcagccccagcaccagcctgcagcgcagcgacagcagccagcccatgctgctgcgcgtggtgggcagccagaccagcgacagcatgggcgaggaggacctgctgagccccccccaggacaccagcaccggcctggaggaggtgatggagcagctgaacaacagcttccccagcagccgcggccgcaacacccccggcaagcccatgcgcgaggacaccatg

SEQ ID NO: 296066 - DNA, 3348 bp, Artificial Sequence
  derived and/or modified sequence
atgcccagcagcctgatgctggaggtgcccgccctggccgacttcaacagagcctggaccgagctgaccgactggctgagcctgctggaccaggtgatcaagagccagagagtgatggtgggcgacctggaggacatcaacgagatgatcatcaagcagaaggccaccatgcaggacctggagcagagaagaccccagctggaggagctgatcaccgccgcccagaacctgaagaacaagaccagcaaccaggaggccagaaccatcatcaccgacagaatcgagagaatccagaaccagtgggacgaggtgcaggagcacctgcagaacagaagacagcagctgaacgagatgctgaaggacagcacccagtggctggaggccaaggaggaggccgagcaggtgctgggccaggccagagccaagctggagagctggaaggagggcccctacaccgtggacgccatccagaagaagatcaccgagaccaagcagctggccaaggacctgagacagtggcagaccaacgtggacgtggccaacgacctggccctgaagctgctgagagactacagcgccgacgacaccagaaaggtgcacatgatcaccgagaacatcaacgccagctggagaagcatccacaagagagtgagcgagagagaggccgccctggaggagacccacagactgctgcagcagttccccctggacctggagaagttcctggcctggctgaccgaggccgagaccaccgccaacgtgctgcaggacgccaccagaaaggagagactgctggaggacagcaagggcgtgaaggagctgatgaagcagtggcaggacctgcagggcgagatcgaggcccacaccgacgtgtaccacaacctggacgagaacagccagaagatcctgagaagcctggagggcagcgacgacgccgtgctgctgcagagaagactggacaacatgaacttcaagtggagcgagctgagaaagaagagcctgaacatcagaagccacctggaggccagcagcgaccagtggaagagactgcacctgagcctgcaggagctgctggtgtggctgcagctgaaggacgacgagctgagcagacaggcccccatcggcggcgacttccccgccgtgcagaagcagaacgacgtgcacagagccttcaagagagagctgaagaccaaggagcccgtgatcatgagcaccctggagaccgtgagaatcttcctgaccgagcagcccctggagggcctggagaagctgtaccaggagcccagagagctgccccccgaggagagagcccagaacgtgaccagactgctgagaaagcaggccgaggaggtgaacaccgagtgggagaagctgaacctgcacagcgccgactggcagagaaagatcgacgagaccctggagagactgagagagctgcaggaggccaccgacgagctggacctgaagctgagacaggccgaggtgatcaagggcagctggcagcccgtgggcgacctgctgatcgacagcctgcaggaccacctggagaaggtgaaggccctgagaggcgagatcgcccccctgaaggagaacgtgagccacgtgaacgacctggccagacagctgaccaccctgggcatccagctgagcccctacaacctgagcaccctggaggacctgaacaccagatggaagctgctgcaggtggccgtggaggacagagtgagacagctgcacgaggcccacagagacttcggccccgccagccagcacttcctgagcaccagcgtgcagggcccctgggagagagccatcagccccaacaaggtgccctactacatcaaccacgagacccagaccacctgctgggaccaccccaagatgaccgagctgtaccagagcctggccgacctgaacaacgtgagattcagcgcctacagaaccgccatgaagctgagaagactgcagaaggccctgtgcctggacctgctgagcctgagcgccgcctgcgacgccctggaccagcacaacctgaagcagaacgaccagcccatggacatcctgcagatcatcaactgcctgaccaccatctacgacagactggagcaggagcacaacaacctggtgaacgtgcccctgtgcgtggacatgtgcctgaactggctgctgaacgtgtacgacaccggcagaaccggcagaatcagagtgctgagcttcaagaccggcatcatcagcctgtgcaaggcccacctggaggacaagtacagatacctgttcaagcaggtggccagcagcaccggcttctgcgaccagagaagactgggcctgctgctgcacgacagcatccagatccccagacagctgggcgaggtggccagcttcggcggcagcaacatcgagcccagcgtgagaagctgcttccagttcgccaacaacaagcccgagatcgaggccgccctgttcctggactggatgagactggagccccagagcatggtgtggctgcccgtgctgcacagagtggccgccgccgagaccgccaagcaccaggccaagtgcaacatctgcaaggagtgccccatcatcggcttcagatacagaagcctgaagcacttcaactacgacatctgccagagctgcttcttcagcggcagagtggccaagggccacaagatgcactaccccatggtggagtactgcacccccaccaccagcggcgaggacgtgagagacttcgccaaggtgctgaagaacaagttcagaaccaagagatacttcgccaagcaccccagaatgggctacctgcccgtgcagaccgtgctggagggcgacaacatggagaccaacctgcaggccgagtacgacagactgaagcagcagcacgagcacaagggcctgagccccctgcccagcccccccgagatgatgcccaccagcccccagagccccagagacgccgagctgatcgccgaggccaagctgctgagacagcacaagggcagactggaggccagaatgcagatcctggaggaccacaacaagcagctggagagccagctgcacagactgagacagctgctggagcagccccaggccgaggccaaggtgaacggcaccaccgtgagcagccccagcaccagcctgcagagaagcgacagcagccagcccatgctgctgagagtggtgggcagccagaccagcgacagcatgggcgaggaggacctgctgagccccccccaggacaccagcaccggcctggaggaggtgatggagcagctgaacaacagcttccccagcagcagaggcagaaacacccccggcaagcccatgagagaggacaccatgtag

SEQ ID NO: 296067 - DNA, 7080 bp, Artificial Sequence
  derived and/or modified sequence
acactagcaatggcaaagctttgtgcggaggcattgctggctgctctgaactaaaagcatccgtggggaccgaaagaggtttttgcacaccttattaaggaactccaggatggcattgggcagcggcaaactgttgtcagaacattgaatgcaactggggaagaaataattcagcaatcctcaaaaacagatgccagtattctacaggaaaaattgggaagcctgaatctgcggtggcaggaggtctgcaaacagctgtcagacagaaaaaagaggctagaagaacaaaagaatatcttgtcagaatttcaaagagatttaaatgaatttgttttatggttggaggaagcagataacattgctagtatcccacttgaacctggaaaagagcagcaactaaaagaaaagcttgagcaagtcaagttactggtggaagagttgcccctgcgccagggaattctcaaacaattaaatgaaactggaggacccgtgcttgtaagtgctcccataagcccagaagagcaagataaacttgaaaataagctcaagcagacaaatctccagtggataaaggtttccagagctttacctgagaaacaaggagaaattgaagctcaaataaaagaccttgggcagcttgaaaaaaagcttgaagaccttgaagagcagttaaatcatctgctgctgtggttatctcctattaggaatcagttggaaatttataaccaaccaaaccaagaaggaccatttgacgttaaggaaactgaaatagcagttcaagctaaacaaccggatgtggaagagattttgtctaaagggcagcatttgtacaaggaaaaaccagccactcagccagtgaagaggaagttagaagatctgagctctgagtggaaggcggtaaaccgtttacttcaagagctgagggcaaagcagcctgacctagctcctggactgaccactattggagcctctcctactcagactgttactctggtgacacaacctgtggttactaaggaaactgccatctccaaactagaaatgccatcttccttgatgttggaggtacctgctctggcagatttcaaccgggcttggacagaacttaccgactggctttctctgcttgatcaagttataaaatcacagagggtgatggtgggtgaccttgaggatatcaacgagatgatcatcaagcagaaggcaacaatgcaggatttggaacagaggcgtccccagttggaagaactcattaccgctgcccaaaatttgaaaaacaagaccagcaatcaagaggctagaacaatcattacggatcgaattgaaagaattcagaatcagtgggatgaagtacaagaacaccttcagaaccggaggcaacagttgaatgaaatgttaaaggattcaacacaatggctggaagctaaggaagaagctgagcaggtcttaggacaggccagagccaagcttgagtcatggaaggagggtccctatacagtagatgcaatccaaaagaaaatcacagaaaccaagcagttggccaaagacctccgccagtggcagacaaatgtagatgtggcaaatgacttggccctgaaacttctccgggattattctgcagatgataccagaaaagtccacatgataacagagaatatcaatgcctcttggagaagcattcataaaagggtgagtgagcgagaggctgctttggaagaaactcatagattactgcaacagttccccctggacctggaaaagtttcttgcctggcttacagaagctgaaacaactgccaatgtcctacaggatgctacccgtaaggaaaggctcctagaagactccaagggagtaaaagagctgatgaaacaatggcaagacctccaaggtgaaattgaagctcacacagatgtttatcacaacctggatgaaaacagccaaaaaatcctgagatccctggaaggttccgatgatgcagtcctgttacaaagacgtttggataacatgaacttcaagtggagtgaacttcggaaaaagtctctcaacattaggtcccatttggaagccagttctgaccagtggaagcgtctgcacctttctctgcaggaacttctggtgtggctacagctgaaagatgatgaattaagccggcaggcacctattggaggcgactttccagcagttcagaagcagaacgatgtacatagggccttcaagagggaattgaaaactaaagaacctgtaatcatgagtactcttgagactgtacgaatatttctgacagagcagcctttggaaggactagagaaactctaccaggagcccagagagctgcctcctgaggagagagcccagaatgtcactcggcttctacgaaagcaggctgaggaggtcaatactgagtgggaaaaattgaacctgcactccgctgactggcagagaaaaatagatgagacccttgaaagactccgggaacttcaagaggccacggatgagctggacctcaagctgcgccaagctgaggtgatcaagggatcctggcagcccgtgggcgatctcctcattgactctctccaagatcacctcgagaaagtcaaggcacttcgaggagaaattgcgcctctgaaagagaacgtgagccacgtcaatgaccttgctcgccagcttaccactttgggcattcagctctcaccgtataacctcagcactctggaagacctgaacaccagatggaagcttctgcaggtggccgtcgaggaccgagtcaggcagctgcatgaagcccacagggactttggtccagcatctcagcactttctttccacgtctgtccagggtccctgggagagagccatctcgccaaacaaagtgccctactatatcaaccacgagactcaaacaacttgctgggaccatcccaaaatgacagagctctaccagtctttagctgacctgaataatgtcagattctcagcttataggactgccatgaaactccgaagactgcagaaggccctttgcttggatctcttgagcctgtcagctgcatgtgatgccttggaccagcacaacctcaagcaaaatgaccagcccatggatatcctgcagattattaattgtttgaccactatttatgaccgcctggagcaagagcacaacaatttggtcaacgtccctctctgcgtggatatgtgtctgaactggctgctgaatgtttatgatacgggacgaacagggaggatccgtgtcctgtcttttaaaactggcatcatttccctgtgtaaagcacatttggaagacaagtacagataccttttcaagcaagtggcaagttcaacaggattttgtgaccagcgcaggctgggcctccttctgcatgattctatccaaattccaagacagttgggtgaagttgcatcctttgggggcagtaacattgagccaagtgtccggagctgcttccaatttgctaataataagccagagatcgaagcggccctcttcctagactggatgagactggaaccccagtccatggtgtggctgcccgtcctgcacagagtggctgctgcagaaactgccaagcatcaggccaaatgtaacatctgcaaagagtgtccaatcattggattcaggtacaggagtctaaagcactttaattatgacatctgccaaagctgctttttttctggtcgagttgcaaaaggccataaaatgcactatcccatggtggaatattgcactccgactacatcaggagaagatgttcgagactttgccaaggtactaaaaaacaaatttcgaaccaaaaggtattttgcgaagcatccccgaatgggctacctgccagtgcagactgtcttagagggggacaacatggaaacgaatctgcaagcagaatatgaccgtctaaagcagcagcacgaacataaaggcctgtccccactgccgtcccctcctgaaatgatgcccacctctccccagagtccccgggatgctgagctcattgctgaggccaagctactgcgtcaacacaaaggccgcctggaagccaggatgcaaatcctggaagaccacaataaacagctggagtcacagttacacaggctaaggcagctgctggagcaaccccaggcagaggccaaagtgaatggcacaacggtgtcctctccttctacctctctacagaggtccgacagcagtcagcctatgctgctccgagtggttggcagtcaaacttcggactccatgggtgaggaagatcttctcagtcctccccaggacacaagcacagggttagaggaggtgatggagcaactcaacaactccttccctagttcaagaggaagaaatacccctggaaagccaatgagagaggacacaatgtaggaagtcttttccacatggcagatgatttgggcagagcgatggagtccttagtatcagtcatgacagatgaagaaggagcagaataaatgttttacaactcctgattcccgcatggtttttataatattcatacaacaaagaggattagacagtaagagtttacaagaaataaatctatatttttgtgaagggtagtggtattatactgtagatttcagtagtttctaagtctgttattgttttgttaacaatggcaggttttacacgtctatgcaattgtacaaaaaagttataagaaaactacatgtaaaatcttgatagctaaataacttgccatttctttatatggaacgcattttgggttgtttaaaaatttataacagttataaagaaagattgtaaactaaagtgtgctttataaaaaaaagttgtttataaaaacccctaaaaacaaaacaaacacacacacacacacatacacacacacacacaaaactttgaggcagcgcattgttttgcatccttttggcgtgatatccatatgaaattcatggctttttctttttttgcatattaaagataagacttcctctaccaccacaccaaatgactactacacactgctcatttgagaactgtcagctgagtggggcaggcttgagttttcatttcatatatctatatgtctataagtatataaatactatagttatatagataaagagatacgaatttctatagactgactttttccattttttaaatgttcatgtcacatcctaatagaaagaaattacttctagtcagtcatccaggcttacctgcttggtctagaatggatttttcccggagccggaagccaggaggaaactacaccacactaaaacattgtctacagctccagatgtttctcattttaaacaactttccactgacaacgaaagtaaagtaaagtattggatttttttaaagggaacatgtgaatgaatacacaggacttattatatcagagtgagtaatcggttggttggttgattgattgattgattgatacattcagcttcctgctgctagcaatgccacgatttagatttaatgatgcttcagtggaaatcaatcagaaggtattctgaccttgtgaacatcagaaggtattttttaactcccaagcagtagcaggacgatgatagggctggagggctatggattcccagcccatccctgtgaaggagtaggccactctttaagtgaaggattggatgattgttcataatacataaagttctctgtaattacaactaaattattatgccctcttctcacagtcaaaaggaactgggtggtttggtttttgttgcttttttagatttattgtcccatgtgggatgagtttttaaatgccacaagacataatttaaaataaataaactttgggaaaaggtgtaaaacagtagccccatcacatttgtgatactgacaggtatcaacccagaagcccatgaactgtgtttccatcctttgcatttctctgcgagtagttccacacaggtttgtaagtaagtaagaaagaaggcaaattgattcaaatgttacaaaaaaacccttcttggtggattagacaggttaaatatataaacaaacaaacaaaaattgctcaaaaaagaggagaaaagctcaagaggaaaagctaaggactggtaggaaaaagctttactctttcatgccattttatttctttttgatttttaaatcattcattcaatagataccaccgtgtgacctataattttgcaaatctgttacctctgacatcaagtgtaattagcttttggagagtgggctgacatcaagtgtaattagcttttggagagtgggttttgtccattattaataattaattaattaacatcaaacacggcttctcatgctatttctacctcactttggttttggggtgttcctgataattgtgcacacctgagttcacagcttcaccacttgtccattgcgttattttctttttcctttataattctttctttttccttcataattttcaaaagaaaacccaaagctctaaggtaacaaattaccaaattacatgaagatttggtttttgtcttgcatttttttcctttatgtgacgctggaccttttctttacccaaggatttttaaaactcagatttaaaacaaggggttactttacatcctactaagaagtttaagtaagtaagtttcattctaaaatcagaggtaaatagagtgcataaataattttgttttaatctttttgtttttcttttagacacattagctctggagtgagtctgtcataatatttgaacaaaaattgagagctttattgctgcattttaagcataattaatttggacattatttcgtgttgtgttctttataaccaccaagtattaaactgtaaatcataatgtaactgaagcataaacatcacatggcatgttttgtcattgttttcaggtactgagttcttacttgagtatcataatatattgtgttttaacaccaacactgtaacatttacgaattatttttttaaacttcagttttactgcattttcacaacatatcagacttcaccaaatatatgccttactattgtattatagtactgctttactgtgtatctcaataaagcacgcagttatgttac

SEQ ID NO: 296068 - protein, 215 aa, Artificial Sequence
  derived and/or modified sequence
MNLHMRMTAFCKDHDSRSGKQPSQTLSPSDFLDKLMGRTSGYDARIRPNFKGPPVNVTCNIFINSFGSVTETTMDYRVNIFLRQQWNDSRLAYSEYPDDSLDLDPSMLDSIWKPDLFFANEKGANFHDVTTDNKLLRISKNGKVLYSIRLTLTLSCPMDLKNFPMDVQTCTMQLESFGYTMNDLIFEWLSDGPVQVAEGLTLPQFILKEEKELGY

SEQ ID NO: 296069 - DNA, 648 bp, Artificial Sequence
  derived and/or modified sequence
atgaatttgcacatgcgtatgacggccttttgtaaagaccatgactcaagaagcggaaaacagccatctcagacgctctctccctcagacttcctcgataaactgatgggcaggaccagcggatacgacgctagaattcgccctaacttcaaggggccccctgtgaatgtaacttgtaacatattcatcaattcctttggatcagtgacagaaaccacaatggattaccgagttaatatctttttaaggcagcagtggaacgatagcaggctggcctactctgaatacccggacgattccctggatttggacccctcgatgttagactccatctggaagcctgatctcttcttcgctaatgagaagggggctaacttccacgatgtcactacagacaacaagctgctgaggatctcaaagaacggaaaagtattatatagcattaggctgactttgactctttcgtgccccatggatctgaagaactttccgatggatgttcaaacatgtacaatgcagcttgagagcttcggctatacaatgaatgacctgattttcgagtggttatccgacggacctgtgcaggtggccgaaggtctgacactcccacagttcatcctcaaggaggagaaagagttaggatactag

SEQ ID NO: 296070 - DNA, 659 bp, Artificial Sequence
  derived and/or modified sequence
cttgattaatcagatgaatctgcatatgagaatgacggctttctgcaaagaccatgactccaggtctggaaaacaaccttcacagaccctatctccttcagatttcttggacaagttaatgggaaggacatcaggatatgatgcaagaatcaggccaaattttaaaggtcctccagtaaacgttacttgcaatatttttatcaacagttttggatcagtcacagaaacgaccatggactaccgagtgaatatttttctgagacaacagtggaatgattcacggctggcgtacagtgagtacccagatgactccctggacttggacccatccatgctagactccatttggaaaccagatttgttctttgccaatgagaagggtgccaacttccacgatgtcaccactgacaacaaattgctacggatttcgaaaaatggcaaagtgctctacagtatcagactcaccttgaccttatcctgtcccatggacttgaagaactttccgatggatgtccagacctgtacaatgcagctggagagttttgggtacacgatgaatgacctgatatttgagtggttaagtgatggtccagtgcaagttgctgaaggattgaccctgccccagtttattttgaaagaagagaaggaacttggctact

SEQ ID NO: 296071 - DNA, 3182 bp, Artificial Sequence
  derived and/or modified sequence
acttccctcaccctctccgtctcccgacctctcttctcctcttgctgtcatcgtacccccttcagtatcccctcgctgaacggccagtcactctttgccttcgaacagcaggcacgtcccctcttgaatgcttttccccgacccccgccccaagcaactgaaaaaggaaacatgcgcacttcagagcttggagctgtccgagtgctgaaatttataggctgggaaactaggttcctgccaaattttgaatctggacaataaacagacactttgtcctagcatctttctggaatcatttcgggatattttccacaagcaacacagaaacaggaatgaaccggcagctagtgaacattttgacagccttgtttgcatttttcttagagacaaaccacttcagaaccaagataaatggaacacatagtaataatgctatgaatactgggaaaacccactatgttcctttcaggtttacacctcctactatgattaagaaaaaatataggctggtttttattagaatcatcatcatcatcatcatcctcaccaccaccaccatcataatcaaataatacttgattaatcagatgaatctgcatatgagaatgacggctttctgcaaagaccatgactccaggtctggaaaacaaccttcacagaccctatctccttcagatttcttggacaagttaatgggaaggacatcaggatatgatgcaagaatcaggccaaattttaaagttttggatcagtcacagaaacgaccatggactaccgagtgaatatttttctgagacaacagtggaatgattcacggctggcgtacagtgagtacccagatgactccctggacttggacccatccatgctagactccatttggaaaccagatttgttctttgccaatgagaagggtgccaacttccacgatgtcaccactgacaacaaattgctacggatttcgaaaaatggcaaagtgctctacagtatcagactcaccttgaccttatcctgtcccatggacttgaagaactttccgatggatgtccagacctgtacaatgcagctggagagttttgggtacacgatgaatgacctgatatttgagtggttaagtgatggtccagtgcaagttgctgaaggattgaccctgccccagtttattttgaaagaagagaaggaacttggctactgtacaaagcactacaacactggaaagtttacctgcattgaggtcaagtttcatctggaacgccaaatgggatattatttgatccagatgtacatcccaagcctgcttatagtaattttgtcctgggtttccttttggataaatatggatgcagcccctgccagggtcgcactgggcatcaccacagtcttaacgatgaccacccagagttcaggctccagggcatctctgccaaaggtctcctatgtaaaagcgattgacatctggatggcggtgtgccttctgtttgtgtttgctgccttactggaatacgcagcggtgaacttcgtctccaggcaacacaaggagttcctgcgcctccgaagaagacagaagaggcagaataaggaagaagacgttactcgtgaaagtcgttttaattttagcggttatgggatgggtcactgcctccaagtgaaagatggaacagctgtcaaggccacacctgccaacccactcccacaaccgccaaaagatggagatgctatcaagaagaagtttgtggaccgggcaaaaaggattgacacgatatctcgagctgccttcccattggccttcctcattttcaacatcttttactggatcacatacaagatcattcggcatgaagatgtccacaagaaatagatgtgccctacagaccctgggaccttcttgcctcagtgttgtgcttgtaaatacacagtgaaattgtctttatatcactttgacagaggagaagattgagggaggggggagggagggtcatgggggtgggtttcctggcacctacatgaaaaaaaagacaagttatatgggtgatgaagaaaactgcacaaaattaaggggttgcagaatcacgggagcataataattcccttccataatctttagcattgttctttcagtcagacatgatatgcgcaacattcagacatgatatgcgcatcattcagacatgatatgcggggtcaagttcttaagggctgtttgccttttggtccttttggtttggtttggctttgactaattctggtactgaaaagttagctatacacacacacacacacacacacacacacacacacacacacacacacacacacacacacaaacttcaaaaatgcttaaccatctgaccatagtgactagcctatagtgagtcgaggaccaaactttttcaggaaaatgctgcctcgtttttaaaacaagcctcctaagctatgttctttacaatgtctgtaattagtgtttcacttgagaaagccttttgtgggtcgtaaattatttctacttatccagtaaataacaatgacaaaataaacaccaatgacagaaaaatttctactttactgtccatataggtgtgcattttaatatttttctttccaagataaaattttgaaacttaaattgtgtattgtgtaattaatttgatagtgtaccctcttaataaatgcccactttattttatatccaagttagtgcattatatatatatttttgctttggctatatttacacgtgactttaatcgcccaactgtgactagtcattgcagctactcagctacagtatttatggagatggtgtgtcctgaacagtgtagctcaggtcagcttgaactttccatttctgctctcattgtaggtgtaactactagtcctaatgtcaactgacccatgatttctactgtcagtcaatataagtgaacattgttttaaatatccttaactaacttaaagaattttaaaattgtactgtgattttcataacccgttgcctttttggtaccagagctacgtggtttgaattctggctacatgttttaagtaagaaaaaaaaagacgtatttttgcttactcagataaaagacaacctgtaaaaatataataattaaattttacatgtgctgtacaaggggttattttaaaaagcatttgttcaatttcaataaagctaagtgtgccgc

SEQ ID NO: 296072 - DNA, 648 bp, Artificial Sequence
  derived and/or modified sequence
atgaacctgcacatgaggatgacagccttctgcaaggaccatgacagccgcagcggcaagcagcccagccagaccctgagccccagcgacttcctggacaagctgatgggccgcaccagcggctatgatgcccgcatccggcccaacttcaagggcccccctgtgaatgtgacctgcaacatcttcatcaacagctttggatctgtgacagagaccaccatggactacagagtgaacatcttcctgcggcagcagtggaatgacagccggctggcctacagcgagtacccagatgacagcctggacctggaccccagcatgctggacagcatctggaagccagacctcttctttgccaatgagaagggggccaacttccatgatgtgaccacagacaacaagctgctgcgcatcagcaagaatggcaaggtgctgtacagcatccggctgaccctgaccctgagctgccccatggacctgaagaacttccccatggatgtgcagacctgcaccatgcagctggagagctttggctacaccatgaatgacctgatctttgagtggctgagtgatggccctgtgcaggtggccgagggcctgaccctgccccagttcatcctgaaggaggagaaggagctgggctactag

SEQ ID NO: 296073 - DNA, 648 bp, Artificial Sequence
  derived and/or modified sequence
atgaacctgcacatgcggatgaccgccttctgcaaggaccacgactcccgctccggcaaacagcctagccagacactctcgccaagcgattttttagacaagctaatgggaaggacctctgggtatgacgcccggattaggcctaatttcaagggaccacccgtcaacgtcacatgcaacatcttcattaattcttttggaagtgttaccgagaccaccatggactatcgtgtgaacatcttcctgcgccagcaatggaacgactccagactcgcttactctgagtatcctgatgatagcctggatcttgacccgagtatgttagattccatatggaagcccgatcttttctttgccaacgagaaaggtgccaactttcatgacgttacaaccgacaataagctcctgaggatcagtaaaaatggaaaggtcctgtacagtatccgcttaacgctgaccctgagttgccccatggatctgaagaattttcccatggatgtccagacctgtaccatgcaactggaatctttcgggtatacgatgaatgatctgatctttgagtggttgtccgacggaccggtacaggtggccgaaggcctgacccttccacagtttattctcaaggaagagaaggagctcggctattag

SEQ ID NO: 296074 - DNA, 648 bp, Artificial Sequence
  derived and/or modified sequence
atgaacctgcatatgaggatgacagcattttgtaaggatcacgattcacggtccggcaaacagccttcccaaaccttaagccctagtgacttcctggacaaactgatgggcaggacatcaggctacgatgcccgaattaggcccaatttcaaaggcccacctgtcaatgtgacatgcaacatcttcataaatagctttggctctgtcaccgaaacaacaatggactacagagtgaacatctttctgcggcagcagtggaatgattctcgactcgcatactcagagtatccggatgattcccttgacctggatccttcaatgctggacagcatctggaagccagacctgttctttgctaacgagaaaggtgccaattttcacgatgttacgacagataacaagcttcttcgaataagcaaaaatggcaaagtactgtatagcattcgtctgaccctaacactttcctgtccgatggatttaaaaaacttccccatggacgtccagacttgtactatgcagctggagagctttggctacacaatgaacgacttaatctttgagtggctttccgatggccctgtccaggtcgcagaagggcttactcttccccaattcattctaaaagaggaaaaagagctagggtactag

SEQ ID NO: 296075 - DNA, 648 bp, Artificial Sequence
  derived and/or modified sequence
atgaacctgcacatgagaatgaccgccttctgcaaggaccacgacagcagaagcggcaagcagcccagccagaccctgagccccagcgacttcctggacaagctgatgggcagaaccagcggctacgacgccagaatcagacccaacttcaagggcccccccgtgaacgtgacctgcaacatcttcatcaacagcttcggcagcgtgaccgagaccaccatggactacagagtgaacatcttcctgagacagcagtggaacgacagcagactggcctacagcgagtaccccgacgacagcctggacctggaccccagcatgctggacagcatctggaagcccgacctgttcttcgccaacgagaagggcgccaacttccacgacgtgaccaccgacaacaagctgctgagaatcagcaagaacggcaaggtgctgtacagcatcagactgaccctgaccctgagctgccccatggacctgaagaacttccccatggacgtgcagacctgcaccatgcagctggagagcttcggctacaccatgaacgacctgatcttcgagtggctgagcgacggccccgtgcaggtggccgagggcctgaccctgccccagttcatcctgaaggaggagaaggagctgggctactag

SEQ ID NO: 296076 - protein, 166 aa, Artificial Sequence
  derived and/or modified sequence
MSPKPRASGPPAKATEAGKRKSSSQPSPSDPKKKTTKVAKKGKAVRRGRRGKKGAATKMAAVTAPEAESGPAAPGPSDQPSQELPQHELPPEEPVSEGTQHDPLSQESELEEPLSQESEVEEPLSQESQVEEPLSQESEVEEPLSQESQVEEPLSQESEMEELPSV

SEQ ID NO: 296077 - DNA, 402 bp, Artificial Sequence
  derived and/or modified sequence
atggacgagcccatgggcgaggaggagatcaacccccagaccgaggaggtgagcatcaaggagatcgccatcacccaccacgtgaaggagggccacgagaaggccgaccccagccagttcgagctgctgaaggtgctgggccagggcagcttcggcaaggtgttcctggtgaagaagatcagcggcagcgacgccagacagctgtacgccatgaaggtgctgaagaaggccaccctgaaggtgagagacagagtgagaaccaagatggagagagacatcctggtggaggtgaaccaccccttcatcgtgaagctgcactacgccttccagaccgagggcaagctgtacctgatcctggacttcctgagaggcggcgacctgttcaccagactgagcaagtag

SEQ ID NO: 296078 - DNA, 2136 bp, Artificial Sequence
  derived and/or modified sequence
atggacgagcccatgggcgaggaggagatcaacccccagaccgaggaggtgagcatcaaggagatcgccatcacccaccacgtgaaggagggccacgagaaggccgaccccagccagttcgagctgctgaaggtgctgggccagggcagcttcggcaaggtgttcctggtgaagaagatcagcggcagcgacgccagacagctgtacgccatgaaggtgctgaagaaggccaccctgaaggtgagagacagagtgagaaccaagatggagagagacatcctggtggaggtgaaccaccccttcatcgtgaagctgcactacgccttccagaccgagggcaagctgtacctgatcctggacttcctgagaggcggcgacctgttcaccagactgagcaaggaggtgatgttcaccgaggaggacgtgaagttctacctggccgagctggccctggccctggaccacctgcacagcctgggcatcatctacagagacctgaagcccgagaacatcctgctggacgaggagggccacatcaagctgaccgacttcggcctgagcaaggagagcatcgaccacgagaagaaggcctacagcttctgcggcaccgtggagtacatggcccccgaggtggtgaacagaagaggccacacccagagcgccgactggtggagcttcggcgtgctgatgttcgagatgctgaccggcaccctgcccttccagggcaaggacagaaaggagaccatgaccatgatcctgaaggccaagctgggcatgccccagttcctgagccccgaggcccagagcctgctgagaatgctgttcaagagaaaccccgccaacagactgggcgccggccccgacggcgtggaggagatcaagagacacagcttcttcagcaccatcgactggaacaagctgtacagaagagagatccacccccccttcaagcccgccaccggcagacccgaggacaccttctacttcgaccccgagttcaccgccaagacccccaaggacagccccggcatcccccccagcgccaacgcccaccagctgttcagaggcttcagcttcgtggccatcaccagcgacgacgagagccaggccatgcagaccgtgggcgtgcacagcatcgtgcagctgcacagaaacagcatccagttcaccgacggctacgaggtgaaggaggacatcggcgtgggcagctacagcgtgtgcaagagatgcatccacaaggccaccaacatggagttcgccgtgaagatcatcgacaagagcaagagagaccccaccgaggagatcgagatcctgctgagatacggccagcaccccaacatcatcaccctgaaggacgtgtacgacgacggcaagtacgtgtacgtggtgaccgagctgatgaagggcggcgagctgctggacaagatcctgagacagaagttcttcagcgagagagaggccagcgccgtgctgttcaccatcaccaagaccgtggagtacctgcacgcccagggcgtggtgcacagagacctgaagcccagcaacatcctgtacgtggacgagagcggcaaccccgagagcatcagaatctgcgacttcggcttcgccaagcagctgagagccgagaacggcctgctgatgaccccctgctacaccgccaacttcgtggcccccgaggtgctgaagagacagggctacgacgccgcctgcgacatctggagcctgggcgtgctgctgtacaccatgctgaccggctacacccccttcgccaacggccccgacgacacccccgaggagatcctggccagaatcggcagcggcaagttcagcctgagcggcggctactggaacagcgtgagcgacaccgccaaggacctggtgagcaagatgctgcacgtggacccccaccagagactgaccgccgccctggtgctgagacacccctggatcgtgcactgggaccagctgccccagtaccagctgaacagacaggacgccccccacctggtgaagggcgccatggccgccacctacagcgccctgaacagaaaccagagccccgtgctggagcccgtgggcagaagcaccctggcccagagaagaggcatcaagaagatcaccagcaccgccctgtag

SEQ ID NO: 296079 - DNA, 402 bp, Artificial Sequence
  derived and/or modified sequence
atggatgagccaatgggggaagaggagataaatccgcagacggaagaagtgtctattaaagaaatcgcgatcacacatcacgtaaaagaaggtcatgaaaaggcagatccaagtcagttcgaactgctgaaggtgctgggccaaggaagcttcggcaaggtattcctggtgaagaagatctccggctcagacgccaggcagctgtatgccatgaaggtactgaagaaggccacactgaaggtcagagatcgggtcagaacaaaaatggaaagagacatccttgtggaggtgaatcaccccttcatcgtgaagctgcactacgctttccagaccgagggcaagctgtacctgatacttgacttcctccggggaggagacctgttcactaggctgtccaaatag

SEQ ID NO: 296080 - DNA, 2136 bp, Artificial Sequence
  derived and/or modified sequence
atggatgaacctatgggagaggaggaaatcaacccacagactgaagaagtctcaataaaagagattgccatcacacatcacgtgaaagaaggtcacgagaaggccgatccatctcagttcgaactgctgaaggtgttagggcaaggttcttttggaaaagtctttctcgtgaagaaaattagtggaagcgacgcccgacaactctatgccatgaaagtgctgaagaaggccactttaaaggtcagagatagagttaggaccaagatggagagggatatcttagtagaggtgaaccatccatttattgtgaagctgcactatgctttccagacggagggtaaactgtaccttatcttggacttcctgcggggtggggacctgttcactcgactgagcaaagaggtgatgttcactgaggaagatgtcaagttctatttggccgagcttgccctggctcttgaccacctgcattctcttggtatcatttacagggacctgaagcctgagaacattctgctggatgaggaaggacacattaagctgactgactttggattgtcaaaggaaagtatcgaccacgaaaagaaggcctatagcttttgtggaaccgtagaatatatggcacccgaagtggtgaaccgcagaggtcatacccagtcagcggattggtggagctttggcgttcttatgtttgaaatgcttacaggcactctccctttccagggaaaggatagaaaagagaccatgacgatgatactgaaggccaaactgggcatgccgcagtttctaagccctgaggcccagtctctcctgaggatgctgttcaaacgcaatcctgccaacagattgggagcaggccctgatggagtggaagagatcaagcggcactctttcttcagcactatagactggaacaaactgtacagaagagaaatccacccccccttcaagccagcgacgggtaggccagaggataccttttatttcgatcccgagttcaccgcaaagacacctaaggacagcccaggaattcccccgtcagccaatgcgcatcaattgttccgcggtttcagctttgttgccataacaagcgacgatgagtctcaggccatgcagacggtcggggtgcacagtattgtacaactgcacaggaactcgattcagttcacggacggctatgaggtgaaggaagatataggagttggttcctacagcgtttgtaagcgttgcatccataaggcaacgaatatggagttcgcagtcaaaattatagacaagtcaaagcgggacccaaccgaggaaattgagatactcttgcgttatggccaacacccaaacatcattaccctgaaggatgtgtacgacgacggtaagtatgtgtacgtggttactgagctgatgaagggaggggaactactggacaaaatccttagacagaagtttttctcggaacgggaggcatccgctgtgttgtttacaataacgaagacagtcgagtatctgcatgcacagggcgttgtccatcgcgacttaaaaccatctaacattctgtacgttgatgagagtgggaacccagagtctattaggatatgcgatttcggattcgctaagcagctccgcgccgagaatggactgcttatgaccccctgttatactgctaactttgtggcgccagaagtgctgaagaggcagggttacgatgccgcttgcgatatctggtctctgggtgttctcctgtacacaatgctcaccggctatactcctttcgcaaacggacctgacgatactcccgaggaaatcctggcacgcatcggatctgggaaattcagcctttccgggggatattggaattccgtctctgacacggctaaggatttggttagtaagatgcttcacgttgacccacaccagagactgaccgccgctcttgtgctcagacacccctggatagttcattgggaccagctgccccagtatcagctgaacagacaggacgcacctcacctggtgaagggagctatggccgcaacttatagcgcactgaatcgaaaccagtctccagtcttagagccagtaggaagatccaccttggctcagagacgcggaattaagaagataacctcgaccgccttatag

SEQ ID NO: 296081 - DNA, 402 bp, Artificial Sequence
  derived and/or modified sequence
atggatgagcccatgggagaggaggagatcaacccccagacagaggaggtgtccatcaaggagatcgccatcacccaccacgtgaaggagggccacgagaaggctgaccccagccagtttgagctgctgaaggtgctgggccagggcagctttgggaaggtgttcctggtgaagaagatcagcggcagtgatgcccggcagctgtatgccatgaaggtgctgaagaaggccaccctgaaggtgcgggacagagtgaggaccaagatggagcgggacatcctggtggaggtgaaccaccccttcatcgtgaagctgcactacgccttccagacagagggcaagctgtacctgatcctggacttcctgcggggcggggacctcttcacccggctgagcaagtag

SEQ ID NO: 296082 - DNA, 2136 bp, Artificial Sequence
  derived and/or modified sequence
atggatgagcccatgggagaggaggagatcaacccccagacagaggaggtgtccatcaaggagatcgccatcacccaccacgtgaaggagggccacgagaaggctgaccccagccagtttgagctgctgaaggtgctgggccagggcagctttgggaaggtgttcctggtgaagaagatcagcggcagtgatgcccggcagctgtatgccatgaaggtgctgaagaaggccaccctgaaggtgcgggacagagtgaggaccaagatggagcgggacatcctggtggaggtgaaccaccccttcatcgtgaagctgcactacgccttccagacagagggcaagctgtacctgatcctggacttcctgcggggcggggacctcttcacccggctgagcaaggaggtgatgttcacagaggaggatgtgaagttctacctggccgagctggccctggccctggaccacctgcacagcctgggcatcatctacagagacctgaagccagagaacatcctgctggatgaggagggccacatcaagctgacagactttggcctgagcaaggagagcattgaccacgagaagaaggcctacagcttctgtggcaccgtggagtacatggcccctgaggtggtgaacagaagaggccacacccagagcgctgactggtggagctttggagtgctgatgtttgagatgctgaccggcaccctgcccttccagggcaaggacaggaaggagaccatgaccatgatcctgaaggccaagctgggcatgccccagttcctgagccctgaggcccagagcctgctgaggatgctgttcaagagaaatcctgccaaccggctgggcgccggcccagatggagtggaggagatcaagaggcacagcttcttcagcaccatcgactggaacaagctgtacagaagagagatccacccccccttcaagccagccaccggccggcctgaggacaccttctactttgatcctgagttcaccgccaagacccccaaggacagccctggcatccccccatctgccaatgcccaccagctgttccggggcttctcctttgtggccatcaccagtgatgatgagagccaggccatgcagacagtgggcgtgcacagcatcgtgcagctgcacaggaacagcatccagttcacagatggctatgaggtgaaggaggacattggagtgggcagctacagcgtgtgcaagcgctgcatccacaaggccaccaacatggagtttgctgtgaagatcatcgacaagagcaagagggaccccacagaggagattgagatcctgctgcgctatggccagcaccccaacatcatcaccctgaaggatgtgtatgatgatggcaagtatgtgtatgtggtgacagagctgatgaagggcggggagctgctggacaagatcctgcggcagaagttcttcagcgagcgggaggccagcgctgtgctcttcaccatcaccaagacagtggagtacctgcacgcccagggcgtggtgcaccgggacctgaagcccagcaacatcctgtatgtggatgagagcggcaaccctgagagcatccgcatctgtgactttggatttgccaagcagctgcgggcagaaaatggcctgctgatgaccccctgctacacagccaactttgtggcccctgaggtgctgaagaggcagggctatgatgctgcctgtgacatctggagcctgggcgtgctgctgtacaccatgctgaccggctacaccccatttgccaatggaccagatgacaccccagaggagatcctggcccgcatcggcagcggcaagttcagcctgagcggcggctactggaacagcgtgtctgacacagccaaggacctggtgtccaagatgctgcacgtggacccccaccagaggctgacagctgccctggtgctgcggcacccctggatcgtgcactgggaccagctgccccagtaccagctgaaccggcaggatgccccccacctggtgaagggggccatggccgccacctacagcgccctgaacagaaaccagagccctgtgctggagcctgtgggccgcagcaccctggcccagaggcggggcatcaagaagatcaccagcacagccctgtag

SEQ ID NO: 296083 - DNA, 402 bp, Artificial Sequence
  derived and/or modified sequence
atggacgagcccatgggcgaggaggagatcaacccccagaccgaggaggtctctattaaagagattgccatcacccaccatgtgaaagaggggcacgagaaagctgatccaagccaattcgagctgctgaaggtacttggacagggatcctttggtaaggtgttcctagtgaaaaaaatttctggaagcgacgccaggcagctctacgcaatgaaagtactcaagaaagccactttgaaagtgagggacagagttaggactaaaatggaaagggacatcctggttgaggttaatcatcccttcatcgtgaaattgcactatgctttccagaccgagggtaaactttatctcattctggacttcctccggggaggcgatctgtttactcgattgagtaagtag

SEQ ID NO: 296084 - DNA, 2136 bp, Artificial Sequence
  derived and/or modified sequence
atggacgagcccatgggcgaggaggagatcaacccccagaccgaggaggtgagcattaaggagatcgctatcacacatcacgtgaaggaaggacacgaaaaagctgatccctctcagttcgaacttctgaaagtgttagggcagggatcattcggcaaggtattcctagtcaagaagattagtggctctgacgccagacagctttacgccatgaaagtattgaagaaggccactttaaaggtgagagatcgtgtgcggacaaagatggaacgggacatccttgttgaggtgaaccaccctttcattgtgaagttgcactacgcgtttcagacagaaggcaagttatacctgatcctggactttctgcgcggcggagatctgttcaccagactcagcaaggaagtcatgtttacggaggaggacgttaagttctatctggccgagctcgccctggctctggaccatttgcattcactgggtattatttaccgagacctgaaaccggagaatatactactggacgaagaaggtcatattaagctgacggattttggactttcaaaggaatctattgaccatgaaaagaaagcttacagcttctgtggcacagtagaatatatggctccggaggtggtcaaccggaggggtcatacccaatccgccgattggtggtcattcggcgtcttgatgtttgagatgcttacagggaccttgccgtttcagggtaaggatagaaaggagaccatgaccatgatattgaaagctaagctggggatgccacagtttttaagccctgaagcacagagcctgctccgcatgctgtttaaaaggaaccccgccaacaggctgggcgccgggcccgacggagtagaggaaattaaacggcattccttcttcagcacgattgactggaataagctgtatcggcgagaaatacatccccccttcaaaccagccacgggcaggcccgaagatacattctactttgatccagagtttacggccaaaacccctaaggactcacccggtatcccaccttcagccaacgcccatcagctgttccggggcttctcatttgtcgccatcacctcagacgatgagtcacaggccatgcagacggtgggtgtccattccattgtccaattgcacaggaacagtattcagtttacggacggttacgaggtgaaagaagatatcggcgtgggttcttacagtgtgtgtaaaaggtgtatccacaaagctactaatatggaatttgcggttaaaataatagataaatcgaagagggatcctacagaggagatcgagatcctgctacgatacggccagcaccccaatataataaccctgaaagacgtgtatgacgacgggaaatacgtgtatgtagtgaccgagcttatgaaaggaggagaacttctggacaagattctgcgccagaaattcttttccgaaagggaggcctccgcggtgctctttactatcacaaaaactgtagaatacttacacgcgcagggagtcgtgcatagggacctcaagcctagcaatatcctctacgtggacgagtcaggcaacccagaatccattcgtatctgtgatttcgggttcgccaagcagctgcgtgctgaaaacggcctcctcatgactccctgctataccgcaaacttcgtggcaccagaggtgttgaaaaggcagggatacgatgccgcctgcgacatctggagcttgggcgttctgctatatacaatgctaacggggtatacgccattcgcaaatggtcctgacgacactccggaggagatccttgcccgcataggttccggcaaattcagcctctcgggtggttactggaactccgtgagtgacaccgcaaaagatttagtttctaaaatgctgcacgtggacccccaccagcggcttaccgcggccctggttcttagacatccatggattgtgcactgggatcagctgccacagtaccaactgaatcggcaggacgctcctcatcttgtgaagggcgcaatggccgcgacttactctgcactcaaccgcaatcagagccccgtcttggagcccgtcgggcgtagtaccctggcccagagacgcgggattaagaagataacctcaaccgctttatag

SEQ ID NO: 296085 - DNA, 402 bp, Artificial Sequence
  derived and/or modified sequence
atggatgaaccaatgggggaggaggagataaatccccaaacagaggaagtatcgatcaaggaaattgctattacacatcatgtgaaggagggccacgagaaggccgatccctcccagtttgaactgctcaaagtgcttggacagggaagctttggaaaagtcttcctcgtgaagaagatctccggctccgatgcccgacagttgtacgctatgaaagtgctgaagaaggccaccctgaaagtccgcgaccgcgtgaggaccaagatggaaagagacattcttgttgaggttaaccaccctttcatagtgaaacttcactacgccttccagacggagggtaagctctacctgatcctggatttcctgcgtggtggcgatctttttaccaggttatccaagtag

SEQ ID NO: 296086 - DNA, 2136 bp, Artificial Sequence
  derived and/or modified sequence
atggacgaacccatgggcgaagaggagattaacccacaaaccgaggaggtgagcatcaaggaaatcgctatcacccaccacgtcaaggagggccacgaaaaggccgatcctagtcagtttgaactgctgaaggtgcttggccagggatcgttcggaaaagtgttcctggtcaagaaaatcagtgggagtgatgcaaggcaactctatgcaatgaaggtgctgaagaaggcaacgctgaaagtgagggaccgggtcaggacgaagatggagcgggatatccttgtggaggtcaaccacccttttatcgtgaagctgcactatgctttccagactgaaggcaaactctacctcatccttgatttcttacgcggaggagatctcttcacccgcctcagtaaagaagttatgttcacggaggaagatgtgaaattctacctagctgaacttgctcttgccctggatcacctccactcactgggcatcatctacagggatctaaaacccgaaaatatccttctggatgaggagggccacatcaaactaacggatttcggcttatcaaaagagtccatcgaccatgaaaagaaggcatacagtttttgcggcacagtggaatatatggccccagaggtcgtcaatcgcagagggcacacccagagtgctgattggtggtccttcggggttttgatgttcgaaatgctgacagggactttgccgttccagggaaaggataggaaggaaactatgacgatgattctgaaagccaaactgggcatgccccagtttctgagccccgaggcccaatcccttcttcgaatgctttttaaacgaaatcctgccaaccggctaggagccggtcccgatggagtcgaagaaatcaaacgccactcttttttttcgaccattgattggaacaagctataccggagggaaatccaccccccttttaaacctgccacagggaggcctgaggatacattttatttcgatcctgagttcaccgcaaagaccccaaaagattcccccggaattcctccctcggcgaatgcacaccagctgttcagaggattctcctttgtggccatcacttctgacgacgaaagccaagctatgcagacagtcggcgttcactccatcgtccagctgcacagaaattcaattcagtttactgatgggtacgaggtgaaggaggacatcggcgtcggatcttatagcgtctgcaaacggtgcattcacaaagccaccaatatggaatttgccgtgaagataattgacaagtcaaagcgagatcccacggaggaaatagagatcctcctccgctacggacagcatcccaacatcattacccttaaggacgtctatgatgacggcaagtatgtttatgtggtaacagagctgatgaaaggcggagagctgctcgataaaatacttagacagaagttcttctctgaacgtgaggcatccgctgtgcttttcacgattacaaagaccgtcgagtatctacatgctcagggcgtagtgcacagagatcttaaacctagtaatatcctgtacgttgatgagagcggcaaccccgagtccatccgcatctgcgacttcgggttcgccaagcagttaagagctgaaaacggcttgctcatgacgccctgttacacagctaattttgtggcacctgaagtcctgaaacgacaggggtatgatgccgcttgcgatatatggagcctgggggtcctcctgtacactatgctgacaggctatacaccgtttgccaatggcccagacgacactcccgaggaaatcctggccagaatcggaagcggcaaatttagcctcagcgggggatactggaactccgtaagcgacacagctaaggacctggtctctaaaatgctgcacgtggaccctcaccaacgactcactgctgcattagttctgagacatccatggatcgttcactgggaccagttaccccagtaccaactgaatcggcaagacgctcctcacctcgtgaagggcgcaatggccgctacctattctgcactgaatcgtaaccagtctcctgtgttagaaccagtcggacgctcaacactggcgcagcgcagaggcattaagaaaataacctcaacagccctctag

SEQ ID NO: 296087 - protein, 527 aa, Artificial Sequence
  derived and/or modified sequence
MDTESEIDPCKVDGTCPEVIKVYIFKADPGEDDLGGTVDIVESEPENDHGVELLDQNSSIRVPREKMVYMTVNDSQPEDEDLNVAEIADEVYMEVIVGEEDAAAAAAAAAVHEQQMDDNEIKTFMPIAWAAAYAIIIGPDGHPLTVYPCMICGKKFKSRGFLKRHMKNHPEHLAKKKYRCTDCDYTTNKKISLHNHLESHKLTSKAEKAIECDECGKHFSHAGALFTHKMVHKEKGANKMHKCKFCEYETAEQGLLNRHLLAVHSKNFPHICVECGKGFRHPSELKKHMRIHTGEKPYQCQYCEYRSADSSNLKTHVKTKHSKEMPFKCDICLLTFSDTKEVQQHALIHQESKTHQCLHCDHKSSNSSDLKRHIISVHTKDYPHKCDMCDKGFHRPSELKKHVAAHKGKKMHQCRHCDFKIADPFVLSRHILSVHTKDLPFRCKRCRKGFRQQSELKKHMKTHSGRKVYQCEYCEYSTTDASGFKRHVISIHTKDYPHRCEYCKKGFRRPSEKNQHIMRHHKEVGLP

SEQ ID NO: 296088 - DNA, 1584 bp, Artificial Sequence
  derived and/or modified sequence
atggacaccgagagcgagatcgacccctgcaaggtggacggcacctgccccgaggtgatcaaggtgtacatcttcaaggccgaccccggcgaggacgacctgggcggcaccgtggacatcgtggagagcgagcccgagaacgaccacggcgtggagctgctggaccagaacagcagcatcagagtgcccagagagaagatggtgtacatgaccgtgaacgacagccagcccgaggacgaggacctgaacgtggccgagatcgccgacgaggtgtacatggaggtgatcgtgggcgaggaggacgccgccgccgccgccgccgccgccgccgtgcacgagcagcagatggacgacaacgagatcaagaccttcatgcccatcgcctgggccgccgcctacgccatcatcatcggccccgacggccaccccctgaccgtgtacccctgcatgatctgcggcaagaagttcaagagcagaggcttcctgaagagacacatgaagaaccaccccgagcacctggccaagaagaagtacagatgcaccgactgcgactacaccaccaacaagaagatcagcctgcacaaccacctggagagccacaagctgaccagcaaggccgagaaggccatcgagtgcgacgagtgcggcaagcacttcagccacgccggcgccctgttcacccacaagatggtgcacaaggagaagggcgccaacaagatgcacaagtgcaagttctgcgagtacgagaccgccgagcagggcctgctgaacagacacctgctggccgtgcacagcaagaacttcccccacatctgcgtggagtgcggcaagggcttcagacaccccagcgagctgaagaagcacatgagaatccacaccggcgagaagccctaccagtgccagtactgcgagtacagaagcgccgacagcagcaacctgaagacccacgtgaagaccaagcacagcaaggagatgcccttcaagtgcgacatctgcctgctgaccttcagcgacaccaaggaggtgcagcagcacgccctgatccaccaggagagcaagacccaccagtgcctgcactgcgaccacaagagcagcaacagcagcgacctgaagagacacatcatcagcgtgcacaccaaggactacccccacaagtgcgacatgtgcgacaagggcttccacagacccagcgagctgaagaagcacgtggccgcccacaagggcaagaagatgcaccagtgcagacactgcgacttcaagatcgccgaccccttcgtgctgagcagacacatcctgagcgtgcacaccaaggacctgcccttcagatgcaagagatgcagaaagggcttcagacagcagagcgagctgaagaagcacatgaagacccacagcggcagaaaggtgtaccagtgcgagtactgcgagtacagcaccaccgacgccagcggcttcaagagacacgtgatcagcatccacaccaaggactacccccacagatgcgagtactgcaagaagggcttcagaagacccagcgagaagaaccagcacatcatgagacaccacaaggaggtgggcctgccctag

SEQ ID NO: 296089 - DNA, 1584 bp, Artificial Sequence
  derived and/or modified sequence
atggacacggagtcagagattgatccgtgtaaagtcgatgggacctgccccgaagtgattaaggtgtacatctttaaagctgaccctggagaagacgacctgggcggaaccgttgacatcgtcgagagtgaaccagagaacgaccatggggttgagctcctggaccagaactcctccatacgggttccaagggagaaaatggtctatatgacagtgaacgattcgcagccagaagacgaggatctcaacgttgccgagatcgccgatgaggtctacatggaagtgattgtgggcgaggaagatgcagccgccgccgctgcagccgccgctgtgcatgagcagcaaatggatgacaatgagattaagactttcatgcccatcgcctgggcagcagcttacgctataattatcgggcctgatggccatcctttgacagtgtacccctgcatgatctgtggcaagaagtttaaatcaaggggattcctcaagaggcacatgaagaaccaccctgaacaccttgcgaagaagaagtaccgatgtactgattgtgattatacaacgaacaaaaagatttccctccacaatcatcttgaatctcacaaattgacgagcaaggctgaaaaggctatcgagtgtgacgagtgtggaaaacacttttctcacgccggggctttgtttacacacaaaatggtgcataaagagaagggggcaaacaagatgcacaaatgtaaattctgcgagtacgagacagcggagcagggtctgttaaacagacacctcctggctgtgcactctaagaattttccccacatttgtgttgaatgtggcaaaggcttccgtcatccttccgaactcaaaaagcatatgcgcattcacacaggcgaaaaaccataccagtgccaatactgcgaatataggtccgcagacagtagcaatctcaaaacacatgttaaaacaaaacactctaaggaaatgcccttcaagtgcgatatttgtctgctcacctttagcgatactaaagaggtccagcaacacgcactgatccatcaggaaagcaagacccaccagtgcctccattgtgatcacaaaagctcaaacagcagtgatctgaagcggcatatcattagtgtacacactaaagactaccctcataagtgcgatatgtgcgacaagggtttccacaggccgagcgagctgaaaaagcacgttgcagctcataagggtaagaagatgcaccagtgcaggcattgtgatttcaaaatcgcggacccctttgtgttgtccagacacattctgtcggttcacacgaaggacctacccttccgttgtaaaaggtgtaggaagggctttcgccagcagtcagaattgaaaaagcacatgaaaactcattcggggaggaaggtttaccaatgcgagtattgcgagtattctacaaccgacgctagcggattcaaacggcatgtcatttccatccacacaaaggattacccccatcggtgcgaatattgcaaaaagggcttcagaaggcctagtgagaagaatcagcacatcatgcggcatcacaaggaggttggcctgccctag

SEQ ID NO: 296090 - DNA, 1584 bp, Artificial Sequence
  derived and/or modified sequence
atggacacagaaagtgaaattgacccctgcaaggtggatggcacctgcccagaggtgatcaaggtgtacatcttcaaggctgaccctggagaagatgacctgggcggcaccgtggacatcgtggagagcgagccagaaaatgaccatggagtggagctgctggaccagaacagcagcatccgggtgccccgggagaagatggtgtacatgacagtgaatgacagccagccagaagatgaggacctgaatgtggccgagattgctgatgaggtgtacatggaggtgattgtgggggaggaggatgctgctgctgctgctgctgctgctgctgtgcatgagcagcagatggatgacaatgagatcaagaccttcatgcccatcgcctgggccgccgcctatgccatcatcattggaccagatggccaccccctgactgtgtacccctgcatgatctgtgggaagaagttcaagagccggggcttcctgaagaggcacatgaagaaccaccctgagcacctggccaagaagaagtaccgctgcacagactgtgactacaccaccaacaagaagatcagcctgcacaaccacctggagagccacaagctgaccagcaaggccgagaaggccattgaatgtgatgaatgtgggaagcacttcagccacgccggggccctcttcacccacaagatggtgcacaaggagaagggggccaacaagatgcacaagtgcaagttctgtgaatatgaaacagctgagcagggcctgctgaacagacacctgctggccgtgcacagcaagaacttcccccacatctgtgtggagtgtgggaagggcttccgccaccccagcgagctgaagaagcacatgaggatccacactggagagaagccctaccagtgccagtactgtgagtacagatctgctgacagcagcaacctgaagacccacgtgaagaccaagcacagcaaggagatgcccttcaagtgtgacatctgcctgctgaccttcagtgacaccaaggaggtgcagcagcacgccctgatccaccaggagagcaagacccaccagtgcctgcactgtgaccacaagagcagcaacagcagtgacctgaagaggcacatcatctctgtgcacaccaaggactacccccacaagtgtgacatgtgtgacaagggcttccaccggcccagcgagctgaagaagcacgtggccgcccacaagggcaagaagatgcaccagtgccgccactgtgacttcaagattgctgacccctttgtgctgagccgccacatcctgtctgtgcacaccaaggacctgcccttccgctgcaagcgctgcaggaagggcttccggcagcagagcgagctgaagaagcacatgaagacccacagcggcaggaaggtgtaccagtgtgagtactgtgagtacagcaccacagatgccagcggcttcaagagacatgtgatcagcatccacaccaaggactacccccaccgctgtgagtactgcaagaagggcttccggcggcccagcgagaagaaccagcacatcatgaggcaccacaaggaggtgggcctgccctag

SEQ ID NO: 296091 - DNA, 1584 bp, Artificial Sequence
  derived and/or modified sequence
atggacaccgagagcgagatcgacccctgcaaggtggacggcacctgtcccgaggttatcaaagtgtatatcttcaaagcagacccaggcgaagacgatttagggggaacagtggatatcgtggagtccgagccagagaatgatcatggcgtcgaattgctggatcagaattcgtccatccgggtgccacgggagaaaatggtctacatgacagtcaacgacagccagccggaggacgaggatctgaacgtggcagaaattgctgatgaggtgtacatggaagtcattgtgggggaggaggacgcagccgccgccgcagccgccgcagcggttcacgagcagcagatggacgacaacgagataaagacattcatgcctattgcgtgggctgccgcatatgctattattatcggtcccgacggccatcccttgaccgtgtatccctgcatgatctgcgggaagaagttcaagagtcgcggattcctgaagcgccacatgaagaaccaccctgagcacctggcaaaaaagaaataccgatgcaccgattgtgattacacaacaaacaaaaagatctccctccataaccatttggagtcacataagctaacaagcaaagccgagaaggctatcgagtgtgatgaatgcggaaagcatttttcccacgccggtgccctgttcacccacaaaatggtgcacaaggaaaaaggcgccaacaaaatgcacaaatgcaagttctgtgagtacgagacagctgaacaggggctgttgaatcgacatctcctggctgtccactcaaagaattttccacatatttgcgtagaatgtggaaaagggttccgtcatccaagtgaacttaaaaaacatatgagaattcatacaggggaaaagccctaccagtgtcagtactgtgagtaccgctccgccgacagcagcaacctgaaaactcacgtgaaaacaaaacatagtaaggaaatgccctttaaatgcgatatttgcctgctcaccttcagtgacacaaaggaggtccagcaacacgcactcatacatcaagaaagcaaaactcaccagtgcctccattgcgaccataagagcagcaatagctctgacctgaagcgccacattataagcgtgcacactaaagattatccacacaagtgtgatatgtgtgataaagggtttcaccgaccgagcgaattgaaaaagcatgtcgccgcccacaaggggaaaaagatgcatcaatgccgacattgcgattttaagattgccgacccctttgtgctgtcccgccacattctctccgttcacactaaggatctgcccttccgctgcaagagatgccgcaaaggatttcgacagcagagtgaactcaaaaaacacatgaagacacacagcggccgcaaggtgtaccagtgtgaatattgcgaatatagcactaccgacgcatcaggcttcaagagacatgtcatatcaatccacaccaaggactaccctcatcggtgtgagtactgcaaaaagggcttcaggagacctagtgagaagaaccaacacatcatgcgccaccacaaggaggtgggactcccgtag

SEQ ID NO: 296092 - DNA, 1584 bp, Artificial Sequence
  derived and/or modified sequence
atggacacagaaagtgaaatcgacccctgtaaagtggatggcacctgcccagaagtgatcaaagtgtatatttttaaggccgaccctggtgaggacgatcttgggggaaccgttgatatcgtcgagtctgaaccggaaaacgaccacggtgttgagctgctcgatcagaactcttccatcagggtgccacgagagaaaatggtatatatgacagtgaacgacagccagccagaggatgaggatctcaatgtcgcagaaattgccgacgaggtatacatggaggtcatagtcggcgaggaggatgctgcagccgctgccgcagcagcggcagtgcatgagcagcagatggatgataatgagattaagactttcatgcccatcgcttgggccgctgcctacgcgatcataatagggcctgacgggcatccgctgactgtgtatccttgcatgatatgcgggaagaagttcaagtcacgcggttttttgaagcgccatatgaaaaaccaccccgagcacctggcaaagaagaagtacagatgcacagactgcgactacacgacaaataagaagatcagtttgcacaaccatttagaaagccataagttgactagtaaggccgaaaaggccattgaatgtgatgaatgcggtaagcacttttcacatgctggagccctgtttacccacaaaatggtacacaaagaaaagggagcgaacaagatgcataagtgcaaattttgcgagtacgaaacggccgagcagggcctgcttaatcgccacctgctggcagtgcacagtaagaacttccctcatatatgcgtagagtgcggaaagggctttcggcatccttctgaactcaagaaacacatgaggatccacaccggggaaaaaccgtaccagtgtcaatattgtgagtaccgcagcgccgactctagtaatcttaagactcatgtcaaaacaaagcacagcaaggagatgccctttaaatgtgacatttgtcttctcactttttcagatacaaaagaggtgcagcagcacgcccttatccatcaagagtccaagactcaccaatgcctccattgtgatcacaaaagttccaactcctccgacctgaagagacacatcatatccgtccacacaaaggactacccgcacaaatgcgacatgtgcgataagggtttccaccggcctagcgagcttaaaaagcacgtagcagcacataaaggcaagaaaatgcaccagtgccgccactgcgactttaaaatagcagacccctttgtgctgtcacgacatatactgtccgtgcatacaaaagatctgcccttcagatgtaagaggtgtcgcaaggggtttcgacagcagtctgagcttaaaaagcacatgaagacccactctgggaggaaggtgtaccagtgtgagtactgtgaatacagtacaacggacgcatcagggttcaagaggcacgtgatttccatccacaccaaggactatcctcaccggtgtgagtattgcaagaagggattcagaagaccaagtgagaagaaccagcacatcatgcgtcaccacaaagaagtgggccttccttag

SEQ ID NO: 296093 - DNA, 7463 bp, Artificial Sequence
  derived and/or modified sequence
agagaaaggccggcctgcagcacccgccaccgtcgccggccgcccgcacgtccgtccggttcttgctatattgccccaggctggtctcgaactcctgggctcaagccgttctcccgcctcccactgcccgcctgtcactgccgtctgttccctgagctgtgctttacgctgggaaagacatagaagaactattaagaagatagaattgttttgctgcgcagtacagcaacagtggatgttcaagattaagattagagtcaagttgtgtgattaagacaggagctgtgactgatgagaattaaaggccatggatgaagatgggcttgaattacaacaagagccaaactcattttttgatgcaacaggagctgatggtacacacatggatggtgatcaaattgttgtggaagtacaagaaactgtttttgtttcagatgttgtggattcagacataactgtgcataactttgttcctgatgacccagattcagttgtaatccaagatgttattgaggacgttgttatagaagatgttcagtgcccagatatcatggaagaagcagatgtgtctgaaacggtcatcattcctgagcaagtgctggactcagatgtaactgaagaagtttctttagcacattgcacagtcccagatgatgttttagcttctgacattacttcagcctcaatgtctatgccagaacacgtcttgacgggtgattctatacatgtgtctgacgttggacatgttggacatgttggacatgttgaacatgtggttcatgatagtgtagtggaagcagaaattgtcactgatcctctgactaccgacgtagtttcagaagaagtattggtagcagactgtgcctctgaagcagtcatagatgccaatgggatccctgtggaccagcaggatgatgacaaaggcaactgtgaggactaccttatgatttccttggatgatgctggcaaaatagaacacgatggttcttctggaatgaccatggacacagagtcggaaattgatccttgtaaagtggatggcacttgccctgaggtcatcaaggtgtacatttttaaagctgaccctggagaagatgacttaggtggaactgtagacattgtggagagtgagcctgagaatgatcatggagttgaactgcttgatcagaacagcagtattcgtgttcccagggaaaagatggtttatatgactgtcaatgactctcagccagaagatgaagatttaaatgttgctgaaatcgctgacgaagtttatatggaagtgatcgtaggagaggaggatgctgcagcagcagcggcagccgccgccgtgcacgagcagcaaatggatgacaatgaaatcaaaaccttcatgccgattgcatgggcagcagcttatgcaataattattggccctgatggacatcctttgactgtctatccttgcatgatttgtgggaagaagtttaagtcgagaggttttttgaaaaggcacatgaaaaaccatcccgaacaccttgccaagaagaaataccgctgtactgactgtgattacactaccaacaagaagataagtttacacaaccacctggagagccacaagctgaccagcaaggcagagaaggccattgaatgcgatgagtgtgggaagcatttctctcatgcaggggctttgtttactcacaaaatggtgcataaggaaaaaggagccaacaaaatgcacaagtgtaaattctgtgaatacgagacagctgaacaagggttattgaatcgccacctcttggcagtccacagcaagaactttcctcatatttgtgtggagtgtggtaagggttttcgtcacccgtcagagctcaaaaagcacatgagaatccatactggggagaagccgtaccaatgccagtactgcgaatataggtctgcagactcttctaacttgaaaacgcatgtcaaaactaagcatagtaaagagatgccattcaagtgtgacatttgtcttctgactttctcggataccaaagaggtgcagcaacatgctcttatccaccaagaaagcaaaacacaccagtgtttgcattgcgaccacaagagttcgaactcaagtgatttgaaacgacacataatttcagttcacacgaaagactacccccataagtgtgacatgtgtgataaaggctttcacaggccttcagaactcaagaaacacgtggctgcccacaagggcaaaaaaatgcaccagtgtagacattgtgactttaagattgcagatccatttgttctaagtcgccatattctctcagttcacacaaaggatcttccatttaggtgcaagagatgtagaaagggatttaggcaacagagtgagcttaaaaagcatatgaagacacacagtggcaggaaagtgtatcagtgtgagtactgtgagtatagcactacagatgcctcaggctttaaacggcacgttatttccattcacacgaaagactatcctcaccggtgtgagtactgcaagaaaggcttccgaagaccttcagaaaagaaccagcacataatgcgacatcataaagaagttggcctgccctaacaatacttctacagaacgtttgtagagatattggccttgaagcagaaaattcattttaaagccaatcagtctcattcacatacaatactgtatattgatttatgctgtgtacaaatagaattattacttctagttgacttttttttaaatatacattttgctcagtagtgtgttctgaattctattcagtttgtttaataaatagggaaaactggcaacatgctagttacttttaataaagtaatccctgattctataccgaagttttatatcttagaattttatatttatttaaatatttaccttgcttaccttgatggtactcttctaagaccattaacttaaggtaactttatattggtaactctgaaagtattcatgttgactcatttttttccccatacatttctcacaataaaattgtcagagacatctactaatataaatgggagattttacagtcaggtctaattatcataacatggaagtcatttacttgtcttgcttaatattttcagaccacttgacagtgaaagtttccatttgagctgttgcgtccctggctttgctgagtaaagagcagtggctgggttcgtgtttacttttcaaatatacttcttttggctttctttggattatttacatcttttgtcagcgtagcaaacttttagaaaaccttattgaaaaactgtgcttgctcatgttgtattttgattattctgtctgtgcggcttcatcttggaatggttgtgtgctacaaatgacacttactgaggactgcattttggaatctcctagaggtaactcatggcttataggatcttttgcaactttatgtatgtaaatgtaccctgaattatatatatacacatatatatcatgtacctgtgtgtattgcttattttacatatttatacacacaaccccaagtagtagttgtttaaaatctataatgaaaagtattaaatttacaataacatgaaagatccagggatgcatgagagagcattttgtaagtcatgctcttcagagagactactcaggtgaagaattagaaggaaaataaggacactagtatttttaaagagtaaagatattttcttttaaatatctttggtaattgaaacatagaggttaagatgtttctaggtagaatgttttcatacaatttcacctccatgtctttatgtttttctgaaaagcaaatgagtatccagacatgactcccacagttctctttgagaagcctgagagggaactctgtcttacctagtgagggggatggaaaagaagtgatggctctgtggaccagagaacgggtgctaattatgacttcacactcggcaagttcaggctgatctgttatttctcagttacagttagcaaactttaaaaacttaacactcaagttggctttgattaaaaggtaaagatgtgttttaagtggataaggaaagtctgaggccttatttggaacatcactaagtcttccacaggttttttgtttgtttgtttttttttgttgtttttttttcttaagacggagtcttgctctgttgcccaggctggactgcagtggtgtgatcactgcaacctctgcagctcactgcaacctctgcttcctgggttcaagcaattatctgcctcagcctctcgagtagctgggattacaggcgcccaccaccacgcccggctaattttttgtatttttaatagagatggggtttcaccatcttggccaggctggtcttgaaccctgacctcgtgatccacctgcctcggccttccatagtgctgggtttacaggcgtgagccaccgtgcccagacaccacataggtctgaatcagtgtcatacattcataaaacaaactcggttaattagaacttggttatgttaagacgaatctgggagaacagaaaacagtttttggggtcccttcagttggctattggtccgtatgcatctagcacattgtaggagatttagaaattgtcttcccacccgatagctgccttgtcacctcattatggtgctccatcccctgtgtgcttaggtttttacctttcatctttctctttgccattgatgtttgtattcaagagttatatttttagggttagaaatcaaaatatttggtgtttggcaaacctctgaagtgctagactgatttagtctagttttaaaccaagtgctttaggcaggtgtgaactccagcccaaatgccagtcaaagtcaaggcatgggttttcctagcctatcttataggaaattcctgtaccttcttggcccccataatgtgttttttttttttttttttttttaaactaacttacaattttgtgatccgtgattcattgccctgcgattcttgaaagctctgtctgtttttttgtgagaacctttaaaatctcccttaatttttattttcccagaaataatgtaaaaacacttaaatgaaagtggaaatgtattaattttaaatcctataaaattaatacagaaaatataaatgattgggtcatttaactatatttttttaaataaactgaaagataaagaacacaacacttcacacattttatatttctcttacatactccggaatcatacacagttctttttaaagcacaacattaaaacctttaaaaggtatttaagggtttggtcaagtgaatatgataaaacatacttgtctgtataaagagaaaatgaaattgtagtcactgttatgtactgacattagttacaacctagttttaattcttaaaacaattttgattagcaaagctaaaaaaaaatggatgtttcagttaaatgttttaaagaggtacagatttttacaaggacataatataagttattgttctgtagaaatatcctattaaatattgtatgtccctccctctgtacactttgtaaagaaagtaaaatacataaaaagaaaatcatatagggatgtgtgacattattgtaattgtgtacttgagaataacgtgcaaaaataaaaatcagaatattttcctgttattgaatgtttagtctatttgataccagtactaagttaatgctttttctcaaggaaaaaaaatgtacagtttttgtaaacctaataaacatcaaaagcagtggattattttcatccccccatttcttaatttctttttcacagcagtggaatgcaaagtgcttgattgctttgaattttgtgactcggatgcaaatactggtaatatttcagttctgtgaatttgcaagtaatatttcagagaagttaagaggtgattggtgagtcctttgatgagcatgtccttggaattcattttttcttttatcttcataaaggatttgttttattagcatctccaattcccctgagataaattactcatgcataaagtggtttttgagagcacttaaagttcatttcagtattaatttacagcatatttaatcagtggggactgttaccacctccacaacagaaatcatgccctcgagttaccccactgcgcccagtttagaggactagtagatgctaacatactagggaatggtcattgccacagttaaaaatcggcagttaagtaaatgtcaggagtcaaaagagatagagttgtgccatctttgattttatagacaagattctgcagttcttccaactgtatgaacaaacgtttgcctaatagttgaaacaataaattaaaattttaggtaaatgacgaagggaatgtggtgaatgtcactgtccagagccataaatcagacaaaaccatacatagcatgctgaaaaacttttgtaatggaacacccaacaaatgacacctaacctgtctgtgatccaacaagtccgataacatgctgctgtatttgtattctctgggaatctcagtattaataatttcatttcccacaaattctagcattcatgtaaggaaaaacatggctaatcaatatcttaaaggggcaatctttcagagcagtggttttcaaagtatggccggacagcattggcagcatcttaatctcctgggactttgttaaaaatgcaaattctcagccccaccctagtcctactgaattgggaaactggcgtgggacccagcagtctttgttttaacatgttctccaagtgattctgatgcctgttcaaacttgggaaacacttttagagcacttgaggaacctaaaagatgactggttcagcattttgtgtggtagataagaaagaaattatcacaaaaaatcagaaatgaacagtgagagaaaaataggaccccagacagtttataccttccatttgctgttttaaaagtgtgagcctgccaagtcaacaagtatgcctttagcgcacatgtaaatagcctgcacttcctaaatctcgtgtggcctcccatggttacattcttcaaaggtaaactgagttgagaggaagattcagcatttaaaagagaagggttgaaaaagattgtgtgtgtgtgtgtgtgtgtttaattggcccagggttacttaaataaatcataaccattttgccacattctgtaactgtttagctaaggtcaaattaagtttaccctatggattttgtttcatcttttgtttcgtgtatatactgtttgcctttttcataaaaatcttggatttgttatatattgttcctgttatttttgacatctttgctattgtaaataaattactattttgttttaagttaccctagtggagtgttggctatagacaaggtatatactcgaaacgaggagacttaaatcacacagttaatgaattcccaacttgtttgaagctggaggtgattcgactcccttcagtggttcaacactaataatagcaccaaggaacatgtcactggtgcatatagg

SEQ ID NO: 296094 - protein, 147 aa, Artificial Sequence
  derived and/or modified sequence
MAAPEKMTFPEKPSHKKYRAALKKEKRKKRRQELARLRDSGLSQKEEEEDTFIEEQQLEEEKLLERERLECSGVISAHRNLHLPGSHDSPASASRVAGITGTHRHTQLIFFCTFSRDGVSPCWPGWSRSLDLMICPPRPHKVLRLQV

SEQ ID NO: 296095 - protein, 465 aa, Artificial Sequence
  derived and/or modified sequence
MSETEFHHGAQAGLELLRSSNSPTSASQSAGMTVTDQAFVTLATNDIYCQGALVLGQSLRRHRLTRKLVVLITPQVSSLLRVILSKVFDEVIEVNLIDSADYIHLAFLKRPELGLTLTKLHCWTLTHYSKCVFLDADTLVLSNVDELFDRGEFSAAPDPGWPDCFNSGVFVFQPSLHTHKLLLQHAMEHGSFDGADQGLLNSFFRNWSTTDIHKHLPFIYNLSSNTMYTYSPAFKQFGSSAKVVHFLGSMKPWNYKYNPQSGSVLEQGSASSSQHQAAFLHLWWTVYQNNVLPLYKSVQAGEARASPGHTLCHSDVGGPCADSASGVGEPCENSTPSAGVPCANSPLGSNQPAQGLPEPTQIVDETLSLPEGRRSEDMIACPETETPAVITCDPLSQPSPQPADFTETETILVDLAVSVSQISIEEKVKELSPEEERRKWEEGRIDYMGKDAFARIQEKLDRFLQ

SEQ ID NO: 296096 - DNA, 1398 bp, Artificial Sequence
  derived and/or modified sequence
atgagcgagacagagtttcatcacggagcccaggccgggctagaactgctgaggagcagtaactcccccacctccgcctcccagtctgcagggatgaccgtgacggaccaggcatttgtcaccctggctacaaatgacatatactgccaaggtgccttggtgctgggtcaatccttgagaagacatcggctgacccgcaagctcgtcgttctaatcacacctcaggtgtctagcctgctacgggtgatccttagtaaagttttcgatgaggttatcgaggttaatttaatcgactcagctgattatatacacctcgcctttctaaagcgtccagagcttggactgaccctgacaaagctccattgctggacactgactcattactcgaaatgtgtgtttctggatgcggatacacttgtcctttcaaacgtggacgaattgttcgacaggggagagttcagcgcagcacctgatccaggttggcccgactgttttaattcaggagtcttcgtttttcaaccaagcctccacactcacaaacttctcctacagcatgcaatggagcatgggagtttcgacggagctgaccaagggttactgaatagtttcttccggaactggtcgacaacagatattcacaagcacttgccattcatttacaacctgtcttccaacactatgtacacttatagcccagcatttaagcagttcgggtcttcagccaaagtagttcattttctcgggagcatgaagccctggaactataagtataatccgcagtcaggaagcgtgctcgaacaggggtctgctagctcgagccagcatcaggcagcgttccttcacctttggtggactgtgtaccaaaataatgtgttgcccctttacaaatcagtgcaagctggggaggcccgcgcctcccctggtcacaccttgtgccattccgatgtgggcggaccctgcgcagatagcgccagcggcgttggggaaccatgtgagaattctacccctagcgctggcgtgccctgcgcaaactcaccactgggaagcaatcaacctgcacagggattgccagaacctacacaaatcgttgacgaaactctctctttgcccgagggaagaaggtccgaggacatgattgcatgcccagagacggagactccagccgttattacgtgtgatccgttgtctcaaccttccccgcagccagctgacttcaccgagacagagactatcttagtcgatcttgcggtctctgtctcccagatctccatcgaggaaaaagtgaaggagctgagtccagaggaagaaaggagaaaatgggaggagggtagaattgattatatgggtaaagacgcgtttgctcgaatccaggaaaaattggatcggtttcttcagtag

SEQ ID NO: 296097 - DNA, 3277 bp, Artificial Sequence
  derived and/or modified sequence
cgcgggcttgcgggcaggggctgcagggaggaggagaggacccgcgcccgcgggggctggcggaggcggggccgggcttccggacagaggccaatcgctgccctcggggcctccagcgccggctctgggccgaggcagccagagcgcggaagaggcctggaaatccacgcggattcccggagacggcgcctctgctctgcgggttcgtggcgaggaagtccacccactgctcccgggcgcaggtctgcaggtccgcgcccactgcccgcggcgccactgaccatgtcggagacagagtttcaccatggtgcccaggctggtctcgaactcctgaggtcaagcaattcacccacctcagcctcccaaagtgctggaatgacagtgactgatcaggcttttgtcacactagccaccaatgacatctactgccagggcgccctggtcctggggcagtcactgaggagacacaggctgacgaggaagctggtggtgttgatcactcctcaggtgtccagcctgctcagggtcatcctctcgaaggtgttcgatgaagtcattgaagtgaatctaatcgatagtgccgactacatccacctggcctttctgaagagacctgagctcgggctcaccctcaccaagcttcactgttggactctcactcactacagcaagtgtgtcttcctggatgcagacactctggtgctgtccaatgtcgatgagctgtttgacaggggagagttttctgcggccccggaccccggatggccggattgcttcaatagcggggtgtttgtcttccagccttctctccacacgcataaactcctgctacagcacgccatggaacacggcagctttgacggggcagaccaaggcttactgaatagtttcttcaggaactggtcgaccacagacatccacaagcacctgccgttcatctataacttgagtagtaacacgatgtacacttacagccctgccttcaagcaattcggttccagtgcaaaggtcgtccactttttggggtccatgaaaccttggaactacaagtacaatccacagagtggctcggtgttggagcaaggctcagcgtccagcagccagcaccaggcggcattccttcatctctggtggacggtctaccagaacaacgtgctgcccctttataaaagcgtccaagcgggggaagcacgcgcgtctcctggtcacacactttgccacagtgatgtgggggggccgtgtgcggattcagcctctggtgttggagagccgtgtgaaaattcaacacccagtgcgggcgtgccgtgtgcaaattcaccactgggttctaaccagcctgctcagggccttccggagccgacccagatagtggatgagaccctgtccctacctgaaggacgccgttcagaagatatgatagcttgtcctgaaactgagactcctgccgtgataacgtgtgacccactgtcccagccttcccctcagcctgcagacttcacagagactgaaaccatcttggtcgacctggccgtctctgtttcccagatctccatcgaagagaaggtgaaggaattgagccccgaggaagagaggaggaagtgggaggaaggccgtatcgactacatggggaaggacgcgtttgctcgcatccaggagaagctggaccggttcctgcagtaatccggcagctggtgggcgttgtgtgtagttagacaatgtcctgttgggtggtcctgttgcgtggagatctcctctggtcctttcaaagggaaacgctgttgaaccttgtgcctctatttatgcttaatccatttgagtgcctcacacaaaaaacgtagagtatagaaatccaccttaaagcccctcgccccaacttctccaccaacgccttctgggctttcttcagaggtcacttctacccttgaagctgtcggcaaaagcgagcagtaataacattctagtagactctcgatggtggtctccgctcttgcccgaaggacctctgaagtacgctggagctgtgttgtacaggtgctgtgagacctaccctattcagaattaaacctcactgcaaatttcctcccatcacgaagctaacaacactaatatacgtatttagcacctctgaggctttgccatggagacccatttctgtagggctaaggaaacatttagacgtggtgactgactttcatttggacttggcgaagtgtatctgagaaacacctcggctgtggtctctctgctttaaatcctaacaggacttcctagagcgttgacagaaattctactcgtggacgttgggaagaaagattgtaggtggcttggggaatgtgggtggcttagaggatctaaaccgattcacttcctggttgagaagcaacgagggcttgctctaaatcgtttagaggataacaggatctagagatgctctctgcttgacaacaaaagtcagggtgcagtcggtccacccttgactgctcttggcttggtctctaccctcactacctcagttctcaataacttagtgaatcactgccctcctcaaagccatttccactcagctctttccagagaattctcagttttatgagacgggaaactttatttcacgagaaagcctcattgtcagaagtatcttcattcaatgggcacaatatgctgtgtatctcaccaggtagctgtcaggggccaccgagagtgtcgttaaaaatgggcatggttgtaataaaggaggaaagtgcgacttttgaaatgtttggaaggtttatttctcatgcacattccagggaaaagcagagagtaaattagagacgggataggaaggccgtgggagaactcgatcctagcctgtgtcagctggatgtgtttacgtggagaggcgtggccactttttaggtcacctgaagcagtttagcctttggatagaggaacctgcctgaatttatggcattagtggtggcatttttttgtgtacaagatgtgggtgatggaggggctgtttctttttccgtgtgggtggttaataatcgtcagtctcggagggcgaggctcgtaggatatttcaggtgagtcagggttggatggtcatcggctttcagaaggagaccacgggaatgttcagggaaacaatgtcagcttctctgaggaccagaattcatgttcacgggcagtgatgagttggcttatggagtgagtccagtctggaattccgccgtgcattctagcctgtatcatctcatttggacaaatgctggcacgttgaaattaaaatgtt

SEQ ID NO: 296098 - DNA, 1398 bp, Artificial Sequence
  derived and/or modified sequence
atgtctgaaacagagttccaccacggggcccaggccggcctggagctgctgcggagcagcaacagccccaccagcgccagccagagcgctggcatgacagtgacagaccaggcctttgtgaccctggccaccaatgacatctactgccagggcgccctggtgctgggccagagcctgcggcggcaccggctgaccaggaagctggtggtgctgatcaccccccaggtgagcagcctgctgcgggtcatcctgagcaaggtgtttgatgaagtcatcgaggtgaacctgattgattctgctgactacatccacctggccttcctgaagaggcctgagctgggcctgaccctgaccaagctgcactgctggaccctgacccactacagcaaatgtgtgttcctggatgctgacaccctggtgctgagcaatgtggatgagctgtttgacagaggagagttctctgctgccccagaccccggctggccagactgcttcaacagcggcgtgtttgtgttccagcccagcctgcacacccacaagctgctgctgcagcacgccatggagcacggcagctttgatggagctgaccagggcctgctgaacagcttcttcaggaactggagcaccacagacatccacaagcacctgcccttcatctacaacctgagcagcaacaccatgtacacctacagccctgccttcaagcagtttggcagcagcgccaaggtggtgcacttcctgggctccatgaagccctggaactacaagtacaacccccagagcggctctgtgctggagcagggcagcgccagcagcagccagcaccaggccgccttcctgcacctgtggtggacagtgtaccagaacaacgtgctgcccctgtacaagtctgtgcaggccggggaggcccgggccagccctggccacaccctgtgccacagtgatgtgggcggcccctgtgccgacagcgccagcggcgtgggggagccctgtgagaacagcaccccatctgctggggtgccctgtgccaacagccccctgggcagcaaccagcctgcccagggcctgcctgagcccacccagatcgtggatgagaccctgagcctgcctgagggcagaagaagtgaggacatgattgcctgcccagagacagagaccccagctgtgatcacctgtgaccccctgagccagcccagcccccagcctgctgacttcacagaaacagagaccatcctggtggacctggccgtgtctgtgtcccagatcagcattgaggagaaggtgaaggagctgagccctgaggaggagaggaggaagtgggaggagggcagaattgactacatgggcaaggatgcctttgcccgcatccaggagaagctggaccgcttcctgcagtag

SEQ ID NO: 296099 - DNA, 1398 bp, Artificial Sequence
  derived and/or modified sequence
atgagcgagaccgagttccaccacggcgcccaggccggcctggagctcttaaggtcgagcaactctcctacctctgcttcccagtcagccggaatgacagtcaccgatcaggccttcgtgaccttagctactaatgacatctactgtcagggcgctttggttttaggacagagtttgcgacgtcatcgcctcacaaggaaactggtggtgctgattaccccccaagtttcctcacttttgcgagttattctgtcaaaggtgttcgatgaggttatagaggtgaacctgattgatagtgccgattacatccatctggcttttctgaagcgaccagagctgggactgactttaacaaaactccactgttggacccttactcactattccaaatgcgtgtttttggacgctgatacactggtcctctccaatgtcgatgaactgtttgacagaggcgagttttctgctgcgccagaccccggttggcccgactgcttcaatagtggcgtattcgtattccagccgagcctccacacccataagctgttacttcagcacgccatggagcacgggtcgttcgatggggctgatcagggactgcttaattctttcttccggaattggagcaccaccgacatccacaaacacctcccattcatttataatctgtctagcaatacgatgtacacgtactccccggccttcaagcagttcggtagcagcgccaaagttgttcactttctgggcagcatgaagccatggaattataagtacaatccccagtctggatccgtgctggagcagggctcagccagcagttctcagcaccaggcagccttccttcatttatggtggacagtgtatcaaaataatgtgttgcccctgtataagtcggtgcaggctggcgaagccagagccagtccgggccatacactgtgtcactccgatgttggtgggccctgtgcagacagtgccagtggcgttggggaaccttgcgagaactccacccccagcgcgggtgtgccttgcgctaactcccccctgggttctaaccagccagcccagggcttgccggagcctacacagatagttgatgagacgctgtccctgcccgagggcagacggtccgaggatatgatagcctgccccgaaacagagacacctgcagttatcacatgtgatccactgtcgcaaccctcgccgcaacctgcggacttcaccgaaaccgagaccattctggttgatctggcagtatcagtcagtcagatctcaattgaagagaaggtgaaggagctctcaccagaggaggagcgccggaagtgggaggaggggagaatcgattatatggggaaggacgcattcgcccggattcaggaaaagctcgaccgcttcctacaatag

SEQ ID NO: 296100 - DNA, 1398 bp, Artificial Sequence
  derived and/or modified sequence
atgtctgaaacagagtttcaccatggagctcaggccggactggagttacttaggagttccaactcgccgacatctgctagccagtccgcaggcatgacagtgactgaccaagctttcgtaacactggcaaccaacgatatttactgtcaaggcgctcttgtcctgggccagtccctgcggcgacatcgcctaacacgtaaattagtggtgctcataactcctcaggtgtccagcctgcttagagtgatactgtcaaaggtcttcgatgaagtgattgaggtcaacctcatcgacagcgcagattacatccatctggccttcctgaagcggccagaattgggtctgacactgactaaactgcactgttggacccttacccactatagcaaatgcgtgttcctggatgcagataccttggttttgtcgaacgttgacgagttgttcgatagaggcgaattcagcgctgcgccagaccccggttggcccgactgttttaattctggcgtgtttgtgttccaaccctccctccatacccacaagcttctgctgcagcacgcgatggagcacggaagttttgacggcgctgatcagggactcttgaactccttcttccggaactggagtactaccgacattcataagcatctgccgttcatctataatcttagcagtaacaccatgtacacttattctcccgctttcaaacaattcggatcttcagctaaagtcgtgcacttccttggttccatgaaaccatggaattacaagtacaacccgcagtctggctcagtgctggagcagggcagtgccagtagcagtcagcatcaggccgcttttctccacctgtggtggaccgtctaccaaaacaatgtcctcccactctacaagtctgtacaagctggtgaggcaagagctagtcctggtcataccctgtgccacagcgacgtgggaggtccctgtgcagattccgcttcaggagtcggcgaaccctgcgagaactccactccctctgctggagtcccctgtgcaaactcccctcttggttctaatcagcctgcccagggcctgccagaacccacacagattgttgacgagactcttagtctgccggaaggtaggcggtccgaagatatgatcgcgtgtcccgagaccgaaactcctgcagtcataacctgcgatccgctctcccagccctcccctcagccagccgacttcacggagacagaaaccattctggtcgacctcgcagtgtccgtgtctcagatctcaattgaagagaaggtaaaagaattgagtcctgaagaggagagacggaaatgggaagaaggtaggatagattatatggggaaagatgcattcgcgaggatccaggagaagctggatcggttcctgcaatag

SEQ ID NO: 296101 - DNA, 1398 bp, Artificial Sequence
  derived and/or modified sequence
atgagcgagaccgagttccaccacggcgcccaggccggcctggagctgctgagaagcagcaacagccccaccagcgccagccagagcgccggcatgaccgtgaccgaccaggccttcgtgaccctggccaccaacgacatctactgccagggcgccctggtgctgggccagagcctgagaagacacagactgaccagaaagctggtggtgctgatcaccccccaggtgagcagcctgctgagagtgatcctgagcaaggtgttcgacgaggtgatcgaggtgaacctgatcgacagcgccgactacatccacctggccttcctgaagagacccgagctgggcctgaccctgaccaagctgcactgctggaccctgacccactacagcaagtgcgtgttcctggacgccgacaccctggtgctgagcaacgtggacgagctgttcgacagaggcgagttcagcgccgcccccgaccccggctggcccgactgcttcaacagcggcgtgttcgtgttccagcccagcctgcacacccacaagctgctgctgcagcacgccatggagcacggcagcttcgacggcgccgaccagggcctgctgaacagcttcttcagaaactggagcaccaccgacatccacaagcacctgcccttcatctacaacctgagcagcaacaccatgtacacctacagccccgccttcaagcagttcggcagcagcgccaaggtggtgcacttcctgggcagcatgaagccctggaactacaagtacaacccccagagcggcagcgtgctggagcagggcagcgccagcagcagccagcaccaggccgccttcctgcacctgtggtggaccgtgtaccagaacaacgtgctgcccctgtacaagagcgtgcaggccggcgaggccagagccagccccggccacaccctgtgccacagcgacgtgggcggcccctgcgccgacagcgccagcggcgtgggcgagccctgcgagaacagcacccccagcgccggcgtgccctgcgccaacagccccctgggcagcaaccagcccgcccagggcctgcccgagcccacccagatcgtggacgagaccctgagcctgcccgagggcagaagaagcgaggacatgatcgcctgccccgagaccgagacccccgccgtgatcacctgcgaccccctgagccagcccagcccccagcccgccgacttcaccgagaccgagaccatcctggtggacctggccgtgagcgtgagccagatcagcatcgaggagaaggtgaaggagctgagccccgaggaggagagaagaaagtgggaggagggcagaatcgactacatgggcaaggacgccttcgccagaatccaggagaagctggacagattcctgcagtag

SEQ ID NO: 296102 - DNA, 1824 bp, Artificial Sequence
  derived and/or modified sequence
atggaagctgccgctgccgccgcggccgctgcagccgccgctgccgccgctggtggcgggtgcgggtcgggtcctccccctctcctgttaagtgaaggagagcagcagtgttacagcgagctgtttgcccggtgtgccggtgctgccggaggcggaccagggtcgggccccccggaagccgcacgcgtggcgcctggaaccgccacagcggccgccggacccgtagccgacctgttccgggcctcccagttgccagctgaaaccttacatcagatcacagagttgtgtggggctaaacgagtcggctattttggaccaacgcaattctacatcgcgctgaagctcatcgccgccgcccagtctggcctgccagtcagaatcgagagcataaaatgtgagctgcctctccctcgttttatgatgtctaaaaacgacggggagatcagattcggaaatccagctgaactacatggtacgaaagttcagattccttatctgaccacagagaaaaacagctttaagaggatggatgatgaggataagcagcaagagactcagagccccacgatgagccccttggcaagtccaccctcatctccacctcactaccagagggtccccctctctcatgggtatagcaaacttagaagttcagctgaacagatgcatccagccccttacgaagcccggcaacccttggttcaacctgagggttcctccagcggtggccctggaactaaaccactgcggcatcaggccagcctgatcagaagcttttctgttgaacgagagctgcaggacaactccagctaccctgatgaaccctggcgcattacagaggagcagcgcgagtattacgtaaatcaattcaggtccctgcagccagaccctagcagtttcattagcgggagcgtggcaaagaactttttcactaagtctaagctgagcattcctgagctctcttacatctgggagctgagtgatgcagactgtgatggagcccttactttaccagaattttgcgctgcttttcacctcatcgttgcccgaaagaatggatatccactccccgagggactccccccaaccctacagcccgaatatttgcaggccgcctttccaaagcctaaatgggattgtcagctgtttgatagctactctgaatcattgcccgcgaaccagcagcctcgcgatttaaaccgcatggagaagaccagcgtaaaggacatggcagatcttccggtgccgaatcaggatgttaccagcgatgacaagcaagctcttaagtcgactataaacgaagccttaccgaaggacgtctcagaggacccagctactcccaaggactccaattccctcaaagcacgacctcgctcgcgttcatactcttcaacttctatagaagaagctatgaagcggggggaagacccacctactccccctccaaggccgcagaaaacccattctcgagctagttccctcgacctaaataaggtcttccaacctagtgtccctgctacaaaatcagggctacttcctccaccccccgccctgcccccgcggccatgtccgtctcagtcagaacaggtcagtgaggccgagctgctgccacaattgagtcgggcaccctcacaagccgcagagtcttcaccggctaaaaaggacgtcttgtactcccagccgcctagtaagcctattaggagaaaatttcgcccggtgtgcggcatccaacccctgattagtattgagctgcgagccttcaggacaagtcgacacctgttcaatgtgtccctggtgcattggcaggcgttgtctatagcttag

SEQ ID NO: 296103 - DNA, 1824 bp, Artificial Sequence
  derived and/or modified sequence
atggaggccgctgctgctgctgctgctgctgctgctgctgctgctgctgctgggggcggctgcggcagcggccccccacccctgctgctgtctgagggggagcagcagtgctacagcgagctgtttgcccgctgtgccggggctgctgggggcggccctggcagcggccccccagaggccgcccgggtggcccctggaacagccacagctgctgctggccctgtggccgacctcttccgggccagccagctgcctgctgagaccctgcaccagatcacagagctgtgtggggccaagagggtgggctacttcggccccacccagttctacatcgccctgaagctgattgctgctgcccagagcggcctgcctgtgagaattgagagcatcaagtgtgagctgcccctgccccgcttcatgatgagcaagaatgatggagagatccgcttcggcaacccagctgagctgcacggcaccaaggtgcagatcccctacctgaccacagagaagaacagcttcaagaggatggatgatgaggacaagcagcaggagacccagagccccaccatgagccccctggccagcccccccagcagccccccccactaccagagggtgcccctgagccacggctacagcaagctgcggagcagcgctgagcagatgcacccagccccctatgaggcccggcagcccctggtgcagcctgagggcagcagcagcggcggccctggcaccaagcccctgcggcaccaggccagcctcatccgctccttctctgtggagcgggagctgcaggacaacagcagctacccagatgagccctggaggatcacagaggagcagcgggagtactacgtgaaccagttccgcagcctgcagcctgaccccagcagcttcatcagcggctctgtggccaagaacttcttcaccaagagcaagctgagcatccctgagctgagctacatctgggagctgagtgatgctgactgtgatggagccctgaccctgcctgagttctgtgccgccttccacctgattgtggccaggaagaatggctaccccctgcctgagggcctgccccccaccctgcagcctgagtacctgcaggccgccttccccaagcccaagtgggactgccagctgtttgacagctacagcgagagcctgcctgccaaccagcagccccgggacctgaacaggatggagaagacctctgtgaaggacatggctgacctgcctgtgcccaaccaggatgtgaccagtgatgacaagcaggccctgaagagcaccatcaatgaggccctgcccaaggatgtgtctgaggaccctgccacccccaaggacagcaacagcctgaaggcccggcccaggagccgcagctacagcagcaccagcattgaggaggccatgaagagaggagaagatcctcccaccccaccaccccggccccagaagacccacagccgggccagcagcctggacctgaacaaggtgttccagcccagcgtgcctgccaccaagagcggcctgctgcccccacctccagccctgcccccccggccctgccccagccagagcgagcaggtgtctgaggccgagctgctgccccagctgagccgggcccccagccaggccgctgagagcagccctgccaagaaggatgtgctgtacagccagccccccagcaagcccatccggaggaagttccggcctgtgtgtggcatccagcccctcatcagcattgagctgcgggccttccgcaccagccgccacctgttcaacgtgtccctggtgcactggcaggccctgagcatcgcctag

SEQ ID NO: 296104 - DNA, 1824 bp, Artificial Sequence
  derived and/or modified sequence
atggaggccgccgccgccgccgccgccgccgccgccgccgccgccgctgctggtggcggctgcggctcagggcctccccctctgctcctgtccgagggagagcagcaatgttactctgaactttttgctaggtgcgctggcgcagccggaggagggcccggctccggaccacccgaggccgccagggtggctccaggaaccgccacagctgcagctggacccgtggctgatttatttagagcctcccaacttcctgctgaaactctccatcagattactgagctgtgcggcgcgaagcgcgtcggttactttggacctacccagttttacatcgcactgaaattgattgcagccgctcaatccgggttgccagtgcgcatcgaaagcataaagtgcgagttgccattaccccgttttatgatgagcaaaaatgatggggagattcgattcggaaaccccgccgaactgcatggaactaaagtccagatcccatacttgactaccgaaaagaattcctttaaaagaatggatgacgaggataagcaacaagaaacccagtccccgactatgagccccctcgcatccccaccttcaagtcctcctcattatcagcgtgtgccactttctcacggctactccaagttacgtagctccgctgagcaaatgcacccagcaccatacgaggcccgccagccactcgtgcagccagaaggatcttcatccgggggtcccggaaccaaaccgctgaggcaccaagcttcactgattcgttccttctcggtcgagagagaacttcaggataacagctcttaccccgatgagccctggaggatcaccgaagagcagcgagaatactacgtgaaccagtttaggtcactgcaacccgacccatctagctttataagcggatcagtagcgaagaacttctttacaaagtccaagttatccatcccagagcttagctacatctgggagctgtcagacgctgactgcgacggtgcgctgacactgcccgagttctgtgctgcattccatctgattgtggccaggaaaaatggctatccgctccccgagggactcccacccaccttgcagcctgaatacctgcaggcggcttttcccaagccgaagtgggactgtcagctctttgactcctatagcgagtcattgcctgccaatcagcaaccccgagatctcaataggatggagaagacgtccgttaaagacatggccgatcttcctgtgccaaatcaggacgtgacttcagacgacaaacaggctctgaaaagtaccatcaacgaagccttgcctaaggatgtttcagaggatcccgccactccgaaagacagtaacagcctaaaggctagaccccgttcccgttcctactccagcaccagtatagaggaagcaatgaagaggggagaagaccctcctacaccgcccccccggccacagaagacacattctagagcctcaagcctagatctgaacaaggtcttccagccctccgtcccagccaccaagtccggactgctcccacccccacccgcgctcccccccagaccttgtcctagccagagtgagcaggtaagtgaagcggaacttttaccccagctttctcgagccccatctcaggctgccgagtcttccccggccaagaaggacgtgctctattcccagccaccttcgaagcctatcagaaggaagttccgccccgtctgcggcatccaacctttaatcagtatcgaactgagggccttcagaacctctagacacctttttaatgtgtctctggtgcactggcaggccctttccatagcatag

SEQ ID NO: 296105 - DNA, 1824 bp, Artificial Sequence
  derived and/or modified sequence
atggaggccgcagccgcagccgcagccgctgccgcagccgcagctgccgctgggggaggttgtggcagcggtccacctcctctcctcctgtctgagggcgagcagcaatgctatagcgagctgttcgccaggtgtgccggagccgctggcggaggacccggatccggacccccagaggctgctcgcgtcgctcctggtactgccaccgctgccgcagggcctgtggctgacttattccgtgccagccagttaccagctgaaacgctgcatcagatcaccgagctatgtggtgccaagagggtggggtattttggaccaacccagttctatatcgccctgaagctgattgctgccgcacagtcaggacttcccgtgcgcatagagtctattaagtgtgagctacccttgcctagattcatgatgtctaaaaatgatggcgagatccggttcggcaaccctgcagaactgcacggaactaaggtccagatcccatacttgacaactgaaaaaaattcttttaagcggatggatgacgaggacaagcagcaggagacccaaagcccaaccatgtcccccttggcttcgccgccaagcagtccccctcattaccagcgggtgcccttaagccatggctattcaaagttaaggtcctccgctgagcaaatgcatccagcaccctacgaagccaggcagccgctcgtgcagcctgaaggctccagttcaggcggacctgggacaaaaccgctccgacatcaggcaagcctgatacgctctttcagtgttgaacgcgaactgcaagataactcttcttatcccgatgaaccatggcggatcactgaagaacaacgcgaatactacgtgaatcagttccgctccctccagccagatcctagttcctttatctctgggagcgtggctaagaattttttcactaaatcgaagctgtctatccctgagttgagctatatctgggagttgtcagacgctgactgcgatggcgctctcactttgcccgagttctgcgcggcatttcatctgatcgtggctagaaaaaacggatacccactgccagaggggttgcccccaacacttcaacccgagtacctccaggcagcctttcctaaaccaaagtgggattgccagcttttcgactcctatagcgaatctttaccagctaatcagcaacctagagatttgaaccgaatggaaaagacatcagttaaggatatggcagacctgccagtgcccaaccaagatgtgacatctgacgataaacaggctctaaagtcaaccatcaacgaagcactccctaaagacgtgagcgaggacccagctacacccaaagactctaattcgctgaaagcaaggcctagaagcagatcatactcatctacctccatcgaggaagctatgaagaggggagaagatccgcctacccccccaccacggcctcagaaaactcactcacgagcaagctctctcgacttaaacaaggtatttcagccgtctgttcccgctaccaaaagcgggcttttgcctccccctcctgcccttcctccaaggccttgccccagccagagtgagcaggttagtgaggctgaacttctccctcagctcagccgcgctccctcacaggccgctgagtcttcgcctgccaaaaaagacgtgctctactctcagccgcctagcaagcccatccgacgcaaattcagacccgtttgtggtatccaacccctcattagtattgagcttcgggctttccggacgtctcggcatctttttaatgtcagcctggtacactggcaggccctcagtatcgcctag

SEQ ID NO: 296106 - DNA, 1995 bp, Artificial Sequence
  derived and/or modified sequence
ccgggaggaagcggccgcgcggcagctgcggggcgtgggggtggtggtggcggcggcggtggtggcggcggcggcggcggcggcagctgaggccgaggaggcggtggctgtggcggacgcagcagcaccccagctagggacagggctccgccgcgcccccttgctggccccatggaggcggcagcggcggcggcggcggcggcagcggcagcggcagcggcgggcgggggctgtggctccgggccgccgccgctgctgctgagcgagggcgagcagcagtgctactccgagctcttcgcgcgctgtgccggcgccgcgggcgggggccccgggtctgggccccccgaggccgccagagtcgcccccggcacggccactgcggccgccggccccgtggctgacctgtttcgggcatcgcagctgcccgccgagacgctgcaccagatcacagaactgtgtggtgcaaagcgggttggttattttggtccaacacagttttacattgccctgaaattaattgctgcagcacaatctggcctcccggtacggatagagagtattaaatgtgaattgcctctgcctcgctttatgatgtcaaagaatgatggtgagatacgatttgggaacccagctgagctgcatggaactaaggttcagattccatatttaactacagaaaaaaattccttcaaaagaatggacgatgaggataaacagcaggaaacacagtctcccacgatgtcacccctcgcctcccctccttcttccccgcctcattaccagagggtgcccttgagccatggctacagcaaactgcggagcagcgcagaacagatgcatccagcaccttatgaagctaggcagccccttgtccagcccgagggatcctcatcagggggcccaggaaccaagccccttcggcatcaggcttcccttatccggtccttttcagtggagagggaactacaggataacagcagttaccccgacgaaccctggaggataacagaagaacagcgcgagtactatgtcaatcagttccgatcccttcagccagacccaagctctttcatttcaggttctgtggccaagaacttcttcaccaaatcaaagctttccattccagaactctcctatatatgggagcttagtgatgctgactgtgatggagccctgaccctgcctgagttctgtgctgcgtttcatctcattgtggctcggaagaacggctacccattgcctgagggcctccctccaactctgcagccagaatacctgcaggcagcttttcctaagcccaaatgggactgtcaattatttgattcttattctgagtcactgccggcaaatcaacaacctcgtgacttgaatcggatggagaagacatctgttaaagacatggctgaccttcctgtccctaaccaggatgtaactagtgatgacaaacaagctttgaaaagtactatcaatgaagccttaccaaaggacgtgtctgaggatccagcaactcccaaggattccaacagtctcaaagcaagaccaagatccagatcttactctagcacctccatagaagaggccatgaaaaggggcgaggaccctcccaccccgccacctcggccacagaaaacccattccagagcctcctccttggatctgaataaagtcttccagcccagtgtgccagctaccaagtcaggattgttacccccaccacctgcgctccctccaagaccttgtccatcacagtctgaacaagtgtcggaggccgagttactcccacagctgagcagagccccatcccaggctgcagaaagtagtccagcaaagaaggatgtactgtattctcagccaccatcaaagcccattcgtaggaaattcagaccagtatgtgggattcagcctttgatttcaatagagctgagagcttttagaacaagcaggcatttatttaatgtttccttagtccattggcaagctttatcaatagcttaa

SEQ ID NO: 296107 - DNA, 1824 bp, Artificial Sequence
  derived and/or modified sequence
atggaggccgccgccgccgccgccgccgccgccgccgccgccgccgccgccggcggcggctgcggcagcggccccccccccctgctgctgagcgagggcgagcagcagtgctacagcgagctgttcgccagatgcgccggcgccgccggcggcggccccggcagcggcccccccgaggccgccagagtggcccccggcaccgccaccgccgccgccggccccgtggccgacctgttcagagccagccagctgcccgccgagaccctgcaccagatcaccgagctgtgcggcgccaagagagtgggctacttcggccccacccagttctacatcgccctgaagctgatcgccgccgcccagagcggcctgcccgtgagaatcgagagcatcaagtgcgagctgcccctgcccagattcatgatgagcaagaacgacggcgagatcagattcggcaaccccgccgagctgcacggcaccaaggtgcagatcccctacctgaccaccgagaagaacagcttcaagagaatggacgacgaggacaagcagcaggagacccagagccccaccatgagccccctggccagcccccccagcagccccccccactaccagagagtgcccctgagccacggctacagcaagctgagaagcagcgccgagcagatgcaccccgccccctacgaggccagacagcccctggtgcagcccgagggcagcagcagcggcggccccggcaccaagcccctgagacaccaggccagcctgatcagaagcttcagcgtggagagagagctgcaggacaacagcagctaccccgacgagccctggagaatcaccgaggagcagagagagtactacgtgaaccagttcagaagcctgcagcccgaccccagcagcttcatcagcggcagcgtggccaagaacttcttcaccaagagcaagctgagcatccccgagctgagctacatctgggagctgagcgacgccgactgcgacggcgccctgaccctgcccgagttctgcgccgccttccacctgatcgtggccagaaagaacggctaccccctgcccgagggcctgccccccaccctgcagcccgagtacctgcaggccgccttccccaagcccaagtgggactgccagctgttcgacagctacagcgagagcctgcccgccaaccagcagcccagagacctgaacagaatggagaagaccagcgtgaaggacatggccgacctgcccgtgcccaaccaggacgtgaccagcgacgacaagcaggccctgaagagcaccatcaacgaggccctgcccaaggacgtgagcgaggaccccgccacccccaaggacagcaacagcctgaaggccagacccagaagcagaagctacagcagcaccagcatcgaggaggccatgaagagaggcgaggacccccccacccccccccccagaccccagaagacccacagcagagccagcagcctggacctgaacaaggtgttccagcccagcgtgcccgccaccaagagcggcctgctgccccccccccccgccctgccccccagaccctgccccagccagagcgagcaggtgagcgaggccgagctgctgccccagctgagcagagcccccagccaggccgccgagagcagccccgccaagaaggacgtgctgtacagccagccccccagcaagcccatcagaagaaagttcagacccgtgtgcggcatccagcccctgatcagcatcgagctgagagccttcagaaccagcagacacctgttcaacgtgagcctggtgcactggcaggccctgagcatcgcctag

SEQ ID NO: 296108 - DNA, 1755 bp, Artificial Sequence
  derived and/or modified sequence
tgacagatctatccatctggccatccatccgtgggggtctgcaatggccacctttagccgccaggaatttttccagcagctactgcaaggctgtctcctgcctactgcccagcagggccttgaccagatctggctgctccttgccatctgcctcgcctgccgcctcctctggaggctcgggttgccatcctacctgaagcatgcaagcaccgtggcaggcgggttcttcagcctctaccacttcttccagctgcacatggtttgggtcgtgctgctcagcctcctgtgctacctcgtgctgttcctctgccgacattcctcccatcgaggcgtcttcctatccgtcaccatcctcatctacctactcatgggtgagatgcacatggtagacaccgtgacatggcacaagatgcgaggggcacagatgattgtggccatgaaggcagtgtctctgggcttcgacctggaccggggcgaggtgggtacggtgccctcgccagtggagttcatgggctacctctacttcgtgggcaccatcgtcttcgggccctggatatccttccacagctacctacaagctgtccaaggccgcccactgagctgccggtggctgcagaaggtggcccggagcctggcactggccctgctgtgccttgtgctgtccacttgcgtgggcccctacctcttcccgtacttcatccccctcaacggtgaccgcctccttcgcaacaagaaacgcaaagccaggggcaccatggtaaggtggctgcgagcctacgagagtgctgtctccttccacttcagcaactattttgtgggctttctttccgaggccacggccacgttggcgggggctggctttaccgaggagaaggatcacctggaatgggacctgacggtgtccaagccactgaatgtggagctgcctcggtcaatggtggaagttgtcacaagctggaacctgcccatgtcttattggctaaataactatgttttcaagaatgctctccgcctggggaccttctcggctgtgctggtcacctatgcagccagcgccctcctacatggcttcagtttccacctggctgcggtcctgctgtccctggcttttatcacttacgtggagcatgtcctccggaagcgcctggctcggatcctcagtgcctgtgtcttgtcaaagcggtgcccgccagactgttcgcaccagcatcgcttgggcctgggggtgcgagccttaaacttgctctttggagctctggccatcttccacctggcctacctgggctccctgtttgatgtcgatgtggatgacaccacagaggagcagggctacggcatggcatacactgtccacaagtggtcagagctcagctgggccagtcactgggtcacttttggatgctggatcttctaccgtctcataggctgaggcacatctgtggaccctcataaccctcttaagacccctctcagggtgccactgatgggggatgagggaaggccctctctctactccttgaccccctccatccttgacccccaacacctcaacacacacacacacacacacacacaaaatcacaccattttcatgcctgtcaatccccaccccaccacaaggcaggaagggggtggtgcctgctggggcctagagggggatgcttggggaaacagagaaggggagatccagggcctccccgccttccttcttcctttttatatacaatttgttattgtcaaataaaagtaggaaat

SEQ ID NO: 296109 - DNA, 1743 bp, Artificial Sequence
  derived and/or modified sequence
atctatccatctggccatccatccgtgggggtctgcaatggccacctttagccgccaggaatttttccagcagctactgcaaggctgtctcctgcctactgcccagcagggccttgaccagatctggctgctccttgccatctgcctcgcctgccgcctcctctggaggctcgggttgccatcctacctgaagcatgcaagcaccgtggcaggcgggttcttcagcctctaccacttcttccagctgcacatggtttgggtcgtgctgctcagcctcctgtgctacctcgtgctgttcctctgccgacattcctcccatcgaggcgtcttcctatccgtcaccatcctcatctacctactcatgggtgagatgcacatggtagacaccgtgacatggcacaagatgcgaggggcacagatgattgtggccatgaaggcagtgtctctgggcttcgacctggaccggggcgaggtgggtacggtgccctcgccagtggagttcatgggctacctctacttcgtgggcaccatcgtcttcgggccctggatatccttccacagctacctacaagctgtccaaggccgcccactgagctgccggtggctgcagaaggtggcccggagcctggcactggccctgctgtgccttgtgctgtccacttgcgtgggcccctacctcttcccgtacttcatccccctcaacggtgaccgcctccttcgcaagggcaccatggtaaggtggctgcgagcctacgagagtgctgtctccttccacttcagcaactattttgtgggctttctttccgaggccacggccacgttggcgggggctggctttaccgaggagaaggatcacctggaatgggacctgacggtgtccaagccactgaatgtggagctgcctcggtcaatggtggaagttgtcacaagctggaacctgcccatgtcttattggctaaataactatgttttcaagaatgctctccgcctggggaccttctcggctgtgctggtcacctatgcagccagcgccctcctacatggcttcagtttccacctggctgcggtcctgctgtccctggcttttatcacttacgtggagcatgtcctccggaagcgcctggctcggatcctcagtgcctgtgtcttgtcaaagcggtgcccgccagactgttcgcaccagcatcgcttgggcctgggggtgcgagccttaaacttgctctttggagctctggccatcttccacctggcctacctgggctccctgtttgatgtcgatgtggatgacaccacagaggagcagggctacggcatggcatacactgtccacaagtggtcagagctcagctgggccagtcactgggtcacttttggatgctggatcttctaccgtctcataggctgaggcacatctgtggaccctcataaccctcttaagacccctctcagggtgccactgatgggggatgagggaaggccctctctctactccttgaccccctccatccttgacccccaacacctcaacacacacacacacacacacacacaaaatcacaccattttcatgcctgtcaatccccaccccaccacaaggcaggaagggggtggtgcctgctggggcctagagggggatgcttggggaaacagagaaggggagatccagggcctccccgccttccttcttcctttttatatacaatttgttattgtcaaataaaagtaggaaatattcaataggct

SEQ ID NO: 296110 - DNA, 1877 bp, Artificial Sequence
  derived and/or modified sequence
atttaaagggcccgctcgccgcgccgctctgggagccgctgctggtcccggccttgcggcctgcgggggaggctgcccggaggaggcagcggcggcggcagcgcgtcctcggtccccaggaccacggcttctttcctgccagatctatccatctggccatccatccgtgggggtctgcaatggccacctttagccgccaggaatttttccagcagctactgcaaggctgtctcctgcctactgcccagcagggccttgaccagatctggctgctccttgccatctgcctcgcctgccgcctcctctggaggctcgggttgccatcctacctgaagcatgcaagcaccgtggcaggcgggttcttcagcctctaccacttcttccagctgcacatggtttgggtcgtgctgctcagcctcctgtgctacctcgtgctgttcctctgccgacattcctcccatcgaggcgtcttcctatccgtcaccatcctcatctacctactcatgggtgagatgcacatggtagacaccgtgacatggcacaagatgcgaggggcacagatgattgtggccatgaaggcagtgtctctgggcttcgacctggaccggggcgaggtgggtacggtgccctcgccagtggagttcatgggctacctctacttcgtgggcaccatcgtcttcgggccctggatatccttccacagctacctacaagctgtccaaggccgcccactgagctgccggtggctgcagaaggtggcccggagcctggcactggccctgctgtgccttgtgctgtccacttgcgtgggcccctacctcttcccgtacttcatccccctcaacggtgaccgcctccttcgcaagggcaccatggtaaggtggctgcgagcctacgagagtgctgtctccttccacttcagcaactattttgtgggctttctttccgaggccacggccacgttggcgggggctggctttaccgaggagaaggatcacctggaatgggacctgacggtgtccaagccactgaatgtggagctgcctcggtcaatggtggaagttgtcacaagctggaacctgcccatgtcttattggctaaataactatgttttcaagaatgctctccgcctggggaccttctcggctgtgctggtcacctatgcagccagcgccctcctacatggcttcagtttccacctggctgcggtcctgctgtccctggcttttatcacttacgtggagcatgtcctccggaagcgcctggctcggatcctcagtgcctgtgtcttgtcaaagcggtgcccgccagactgttcgcaccagcatcgcttgggcctgggggtgcgagccttaaacttgctctttggagctctggccatcttccacctggcctacctgggctccctgtttgatgtcgatgtggatgacaccacagaggagcagggctacggcatggcatacactgtccacaagtggtcagagctcagctgggccagtcactgggtcacttttggatgctggatcttctaccgtctcataggctgaggcacatctgtggaccctcataaccctcttaagacccctctcagggtgccactgatgggggatgagggaaggccctctctctactccttgaccccctccatccttgacccccaacacctcaacacacacacacacacacacacacaaaatcacaccattttcatgcctgtcaatccccaccccaccacaaggcaggaagggggtggtgcctgctggggcctagagggggatgcttggggaaacagagaaggggagatccagggcctccccgccttccttcttcctttttatatacaatttgttattgtcaaataaaagtaggaaatattc

SEQ ID NO: 296111 - DNA, 1539 bp, Artificial Sequence
  derived and/or modified sequence
ctctgggagccgctgctggtcccggccttgcggcctgcgggggaggctgcccggaggaggcagcggcggcggcagcgcgtcctcggtccccaggaccacggcttctttcctgccagatctatccatctggccatccatccgtgggggtctgcaatggccacctttagccgccaggaatttttccagcagctactgcaaggctgtctcctgcctactgcccagcagggccttgaccagatctggctgctccttgccatctgcctcgcctgccgcctcctctggaggctcgggttgccatcctacctgaagcatgcaagcaccgtggcaggcgggttcttcagcctctaccacttcttccagctgcacatggtttgggtcgtgctgctcagcctcctgtgctacctcgtgctgttcctctgccgacattcctcccatcgaggcgtcttcctatccgtcaccatcctcatctacctactcatgggtgagatgcacatggtagacaccgtgacatggcacaagatgcgaggggcacagatgattgtggccatgaaggcagtgtctctgggcttcgacctggaccggggcgaggtgggtacggtgccctcgccagtggagttcatgggctacctctacttcgtgggcaccatcgtcttcgggccctggatatccttccacagctacctacaagctgtccaaggccgcccactgagctgccggtggctgcagaaggtggcccggagcctggcactggccctgctgtgccttgtgctgtccacttgcgtgggcccctacctcttcccgtacttcatccccctcaacggtgaccgcctccttcgcaacaagaaacgcaaagccaggggcaccatggtaaggtggctgcgagcctacgagagtgctgtctccttccacttcagcaactattttgtgggctttctttccgaggccacggccacgttggcgggggctggctttaccgaggagaaggatcacctggaatgggacctgacggtgtccaagccactgaatgtggagctgcctcggtcaatggtggaagttgtcacaagctggaacctgcccatgtcttattggctaaataactatgttttcaagaatgctctccgcctggggaccttctcggctgtgctggtcacctatgcagccagcgccctcctacatggcttcagtttccacctggctgcggtcctgctgtccctggcttttatcacttacgtggagcatgtcctccggaagcgcctggctcggatcctcagtgcctgtgtcttgtcaaagcggtgcccgccagactgttcgcaccagcatcgcttgggcctgggggtgcgagccttaaacttgctctttggagctctggccatcttccacctggcctacctgggctccctgtttgatgtcgatgtggatgacaccacagaggagcagggctacggcatggcatacactgtccacaagtggtcagagctcagctgggccagtcactgggtcacttttggatgctggatcttctaccgtctcataggctga

SEQ ID NO: 296112 - DNA, 1975 bp, Artificial Sequence
  derived and/or modified sequence
gagccgctgctggtcccggccttgcggcctgcgggggaggctgcccggaggaggcagcggcggcggcagcgcgtcctcggtccccaggaccacggcttctttcctgccaggtcacaggctgtgcgtgtgcatgccgaacacccacatgcacacagttggtggctcagtctgatgtacctgacttctcacgccttcccccagtcctccagtaccgtgcctctacatgggctgggcagccccaaactgaaatgtgagtgccagagtgcatcctttaagcgaggtctgccccacggacacccgctccctctgtgtccctgctttgacagatctatccatctggccatccatccgtgggggtctgcaatggccacctttagccgccaggaatttttccagcagctactgcaaggctgtctcctgcctactgcccagcagggccttgaccagatctggctgctccttgccatctgcctcgcctgccgcctcctctggaggctcgctgcacatggtttgggtcgtgctgctcagcctcctgtgctacctcgtgctgttcctctgccgacattcctcccatcgaggcgtcttcctatccgtcaccatcctcatctacctactcatgggtgagatgcacatggtagacaccgtgacatggcacaagatgcgaggggcacagatgattgtggccatgaaggcagtgtctctgggcttcgacctggaccggggcgaggtgggtacggtgccctcgccagtggagttcatgggctacctctacttcgtgggcaccatcgtcttcgggccctggatatccttccacagctacctacaagctgtccaaggccgcccactgagctgccggtggctgcagaaggtggcccggagcctggcactggccctgctgtgccttgtgctgtccacttgcgtgggcccctacctcttcccgtacttcatccccctcaacggtgaccgcctccttcgcaagtggctgcgagcctacgagagtgctgtctccttccacttcagcaactattttgtgggctttctttccgaggccacggccacgttggcgggggctggctttaccgaggagaaggatcacctggaatgggacctgacggtgtccaagccactgaatgtggagctgcctcggtcaatggtggaagttgtcacaagctggaacctgcccatgtcttattggctaaataactatgttttcaagaatgctctccgcctggggaccttctcggctgtgctggtcacctatgcagccagcgccctcctacatggcttcagtttccacctggctgcggtcctgctgtccctggcttttatcacttacgtggagcatgtcctccggaagcgcctggctcggatcctcagtgcctgtgtcttgtcaaagcggtgcccgccagactgttcgcaccagcatcgcttgggcctgggggtgcgagccttaaacttgctctttggagctctggccatcttccacctggcctacctgggctccctgtttgatgtcgatgtggatgacaccacagaggagcagggctacggcatggcatacactgtccacaagtggtcagagctcagctgggccagtcactgggtcacttttggatgctggatcttctaccgtctcataggctgaggcacatctgtggaccctcataaccctcttaagacccctctcagggtgccactgatgggggatgagggaaggccctctctctactccttgaccccctccatccttgacccccaacacctcaacacacacacacacacacacacacaaaatcacaccattttcatgcctgtcaatccccaccccaccacaaggcaggaagggggtggtgcctgctggggcctagagggggatgcttggggaaacagagaaggggagatccagggcctccccgccttccttcttcctttttatatacaatttgttattgtcaaataaaagtaggaaatattc

SEQ ID NO: 296113 - DNA, 3431 bp, Artificial Sequence
  derived and/or modified sequence
gggggaggagggcggtcgtccggggttaggttgagggggggcgtcggtccgttctgggcgggggatgactcacagcccatcccatctcccagacgccgcccgcccgcgcagtgctagctccatggcttagcggaggaggcggcagtggcgagctggggggaggggggactcttattttgttagggggaccgggccgaggcccgaccggcctggcagggctcgcccggggccgggcgtcatgtctcatgcggccgaaccagctcgggatggcgtagaggccagcgcggagggccctcgagccgtgttcgtgctgttggaggagcgcaggccggccgactcggctcagctgctcagcctgaactctttgcttccggaatccgggattgttgctgacatagaattagaaaacgtccttgatcctgacagcttctacgagctcaaaagccaacccttaccccttcgctcaagcctcccaatatcactgcaggccacaccagccaccccagctacactctctgcatcgtcttctgcagggggctccaggacccctgccatgtcgtcatcttcttcatcgagggtcttgctgcggcagcagctaatgcgggcccaggcgcaggagcaggagaggcgtgagcgtcgggaacaggccgccgcggctcccttccccagtcctgcacctgcctctcctgccatctctgtggttggcgtctctgctgggggccacacattgagccgtccaccccctgctcaggtgcccagggaggtgctcaaggtgcagacccatctggagaacccaacgcgctaccacctgcagcaggcgcgccggcagcaggtgaaacagtacctgtccaccacactcgggcccaagctggcttcccaggccctcaccccaccgccggggcccgcaagtgcccagccactgcctgcccctgaggctgcccacactaccggccccacaggcagtgcgcccaacagccccatggcgctgctcaccatcgggtccagctcagagaaggagattgatgatgtcattgatgagatcatcagcctggagtccagttacaatgatgaaatgctcagctatctgcccggaggcaccacaggactgcagctccccagcacgctgcctgtgtcagggaatctgcttgatgtgtacagtagtcaaggcgtggccacaccagccatcactgtcagcaactcctgcccagctgagctgcccaacatcaaacgggagatctctgagaccgaggcaaaggcccttttgaaggaacggcagaagaaagacaatcacaacctaattgagcgtcgcaggcgattcaacattaacgacaggatcaaggaactgggcactctcatccctaagtccagtgacccggagatgcgctggaacaagggcaccatcctgaaggcctctgtggattatatccgcaagctgcagaaggagcagcagcgctccaaagacctggagagccggcagcgatccctggagcaggccaaccgcagcctgcagctccgaattcaggaactagaactgcaggcccagatccatggcctgccagtacctcccactccagggctgctttccttggccacgacttcggcttctgacagcctcaagccagagcagctggacattgaggaggagggcaggccaggcgcagcaacgttccatgtaggggggggacctgcccagaatgctccccatcagcagccccctgcaccgccctcagatgcccttctggacctgcactttcccagcgaccacctgggggacctgggagaccccttccacctggggctggaggacattctgatggaggaggaggagggggtggtgggaggactgtcggggggtgccctgtccccactgcgggctgcctccgatcccctgctctcttcagtgtcccctgctgtctccaaggccagcagccgccgcagcagcttcagcatggaagaggagtcctgatcaggcctcacccctcccctgggactttcccacccaggaaaggaggaccagtcaggatgaggccccgccttttcccccaccctcccatgagactgccctgcccaggtatcctgggggaagaggagatgtgatcaggccccacccctgtaatcaggcaaggaggaggagtcagatgaggccctgcaccttccccaaaggaaccgcccagtgcaggtatttcagaaggagaaggctggagaaggacatgagatcagggcctgccccctggggatcacagcctcacccctgcccctgtgggactcatccttgcccaggtgagggaaggagacaggatgaggtctcgaccctgtcccctagggactgtcctagccaggtctcctgggaaagggagatgtcaggatgttgctccatcctttgtcttggaaccaccagtctagtccgtcctggcacagaagaggagtcaagtaatggaggtcccagccctgggggtttaagctctgccccttccccatgaaccctgccctgctctgcccaggcaaggaacagaagtgaggatgagacccagccccttcccctgggaactctcctggccttctaggaatggaggagccaggccccaccccttccctataggaacagcccagcacaggtatttcaggtgtgaaagaatcagtaggaccaggccaccgctagtgcttgtggagatcacagccccacccttgtccctcagcaacatcccatctaagcattccacactgcagggaggagtggtacttaagctcccctgccttaacctgggaccaacctgacctaacctaggagggctctgagccaaccttgctcttggggaaggggacagattatgaaatttcatggatgaattttccagacctatatctggagtgagaggcccccacccttgggcagagtcctgccttcttccttgaggggcagtttgggaaggtgatgggtattagtgggggactgagttcaggttaccagaaccagtacctcagtattctttttcaacatgtagggcaagaggatgaaggaaggggctatcctgggacctccccagcccaggaaaaactggaagccttcccccagcaaggcagaagcttggaggagggttgtaaaagcatattgtaccccctcatttgtttatctgatttttttattgctccgcatactgagaatctaggccaccccaacctctgttccccacccagttcttcatttggaggaatcaccccatttcagagttatcaagagacactcccccctccattcccacccctcatacctacacccaaggttgtcagctttggattgctggggccaggccccatggagggtatactgaggggtctataggtttgtgattaaaataataaaagctaggcgtgtttgatgcgcttttaactttgaaaaaaaaaaaaaaaaaaaaaaaaaaaaaaaaaaaaaa

SEQ ID NO: 296114 - DNA, 1728 bp, Artificial Sequence
  derived and/or modified sequence
atgagccacgccgccgagcccgccagagacggcgtggaggccagcgccgagggccccagagccgtgttcgtgctgctggaggagagaagacccgccgacagcgcccagctgctgagcctgaacagcctgctgcccgagagcggcatcgtggccgacatcgagctggagaacgtgctggaccccgacagcttctacgagctgaagagccagcccctgcccctgagaagcagcctgcccatcagcctgcaggccacccccgccacccccgccaccctgagcgccagcagcagcgccggcggcagcagaacccccgccatgagcagcagcagcagcagcagagtgctgctgagacagcagctgatgagagcccaggcccaggagcaggagagaagagagagaagagagcaggccgccgccgcccccttccccagccccgcccccgccagccccgccatcagcgtggtgggcgtgagcgccggcggccacaccctgagcagacccccccccgcccaggtgcccagagaggtgctgaaggtgcagacccacctggagaaccccaccagataccacctgcagcaggccagaagacagcaggtgaagcagtacctgagcaccaccctgggccccaagctggccagccaggccctgacccccccccccggccccgccagcgcccagcccctgcccgcccccgaggccgcccacaccaccggccccaccggcagcgcccccaacagccccatggccctgctgaccatcggcagcagcagcgagaaggagatcgacgacgtgatcgacgagatcatcagcctggagagcagctacaacgacgagatgctgagctacctgcccggcggcaccaccggcctgcagctgcccagcaccctgcccgtgagcggcaacctgctggacgtgtacagcagccagggcgtggccacccccgccatcaccgtgagcaacagctgccccgccgagctgcccaacatcaagagagagatcagcgagaccgaggccaaggccctgctgaaggagagacagaagaaggacaaccacaacctgatcgagagaagaagaagattcaacatcaacgacagaatcaaggagctgggcaccctgatccccaagagcagcgaccccgagatgagatggaacaagggcaccatcctgaaggccagcgtggactacatcagaaagctgcagaaggagcagcagagaagcaaggacctggagagcagacagagaagcctggagcaggccaacagaagcctgcagctgagaatccaggagctggagctgcaggcccagatccacggcctgcccgtgccccccacccccggcctgctgagcctggccaccaccagcgccagcgacagcctgaagcccgagcagctggacatcgaggaggagggcagacccggcgccgccaccttccacgtgggcggcggccccgcccagaacgccccccaccagcagccccccgccccccccagcgacgccctgctggacctgcacttccccagcgaccacctgggcgacctgggcgaccccttccacctgggcctggaggacatcctgatggaggaggaggagggcgtggtgggcggcctgagcggcggcgccctgagccccctgagagccgccagcgaccccctgctgagcagcgtgagccccgccgtgagcaaggccagcagcagaagaagcagcttcagcatggaggaggagagctag

SEQ ID NO: 296115 - DNA, 1728 bp, Artificial Sequence
  derived and/or modified sequence
atgagccatgccgcagagcctgctcgggatggggtggaggccagcgcagagggtccacgggcagtgttcgtacttcttgaggagcgtcgccctgctgattcagctcagctcctttctctgaattccctgttgcccgaatctggaatagttgccgatatcgaactggaaaatgtcctagatcctgactccttctacgaactcaagagtcagcctctgccactccgcagcagtctgccgatcagtctgcaggccactcctgctactccggcaaccctgtcagctagcagctccgccggtgggtctcgcacccccgccatgagtagctcatcttccagcagggttttgctgagacagcagctgatgagggcccaggctcaggaacaggagcgacgcgaacggcgtgaacaggccgcagccgcacctttcccatcccccgcccctgcttctcccgccatctctgtggtcggagtaagcgcgggcggccatacactgtctcgcccccctccagctcaagtgccaagggaggtcctgaaggtgcaaactcatcttgagaaccctacaaggtaccacctccagcaggcccgtaggcagcaggtaaaacagtatctgtcaaccaccttggggcccaaactcgcaagtcaggcgttgaccccacccccgggaccagccagcgcccagccactccctgcacccgaggccgcccacactaccggccccacgggatcagcacctaattctccgatggctctgttgaccatcgggtcgtcaagcgagaaagagattgatgatgttatcgacgagattatttcccttgagagcagttacaacgacgagatgctgtcctacctccccgggggaacgactggtctgcaactcccctccactcttcccgtgtctggcaacctgctggacgtttattcttcacaaggcgttgccacgccagctatcactgtgagcaatagttgtccggctgaactccccaatataaagcgtgaaatttctgagacggaagccaaggcactgctgaaagagagacagaagaaagacaatcataatcttattgagcgacggcgccgcttcaatatcaacgataggataaaggaactgggcacactgataccgaagagcagcgatccagaaatgagatggaataaggggaccattttgaaggcctccgtggactatatccggaagctgcagaaggagcaacagaggagcaaagacctggagagccgacagcgcagccttgagcaagcgaatagatcgctgcagctccggatccaggaattggagctgcaggcacagatccacggtttgcccgtgccgcccactccaggcctcctgagcctggctacaacatcagcttcagactctctcaagccagaacagctggacattgaggaggagggccgaccaggcgctgctacatttcacgtggggggcggacctgcacagaacgccccacatcagcaaccaccagcccccccttcggatgccctgttggatcttcactttccatccgatcacctgggggacctgggagacccttttcatcttggtctcgaggacatccttatggaagaggaggagggggtagtggggggtctgtctggcggtgcattgagcccactgcgggccgcatcagatccccttctgtcgtccgtgtctccggcggtatcaaaggccagctcacggagatccagcttttccatggaagaggagtcctag

SEQ ID NO: 296116 - DNA, 1728 bp, Artificial Sequence
  derived and/or modified sequence
atgagccacgccgctgagcccgccagagatggagtggaggccagcgctgagggccccagggctgtgtttgtgctgctggaggagaggaggcctgctgacagcgcccagctgctgagcctgaacagcctgctgcctgagagcggcatcgtggccgacatcgagctggagaatgtgctggaccctgacagcttctatgagctgaagagccagcccctgcccctgcggagcagcctgcccatcagcctgcaggccaccccagccaccccagccaccctgagcgccagcagcagcgctgggggcagcaggaccccagccatgagcagcagcagcagcagccgggtgctgctgcggcagcagctgatgagggcccaggcccaggagcaggagcggcgggagcggcgggagcaggccgctgctgcccccttccccagccctgccccagccagccctgccatctctgtggtgggcgtgtctgctgggggccacaccctgagcaggcctcctccagcccaggtgccccgggaggtgctgaaggtgcagacccacctggagaaccccacccgctaccacctgcagcaggcccggcggcagcaggtgaagcagtacctgagcaccaccctgggccccaagctggccagccaggccctgaccccacctcctggccctgccagcgcccagcccctgcctgcccctgaggccgcccacaccaccggccccaccggcagcgcccccaacagccccatggccctgctgaccatcggcagcagcagcgagaaggagattgatgatgtgattgatgagatcatcagcctggagagcagctacaatgatgagatgctgagctacctgcccggcggcaccaccggcctgcagctgcccagcaccctgcctgtgtctggcaacctgctggatgtgtacagcagccagggcgtggccaccccagccatcaccgtgagcaacagctgcccagctgagctgcccaacatcaagcgggagatcagcgagacagaggccaaggccctgctgaaggagcggcagaagaaggacaaccacaacctgattgaaagaagaagacgcttcaacatcaatgaccgcatcaaggagctgggcaccctcatccccaagagcagtgaccctgagatgcgctggaacaagggcaccatcctgaaggcctctgtggactacatcaggaagctgcagaaggagcagcagaggagcaaggacctggagagccggcagaggagcctggagcaggccaacagaagcctgcagctgcgcatccaggagctggagctgcaggcccagatccacggcctgcctgtgccccccaccccaggcctgctgagcctggccaccaccagcgccagtgacagcctgaagccagagcagctggacatcgaggaggagggccggcctggggccgccaccttccacgtgggcggcggccctgcccagaatgccccccaccagcagcccccagcccccccatctgatgccctgctggacctgcacttccccagcgaccacctgggggacctgggggaccccttccacctgggcctggaggacatcctgatggaggaggaggagggcgtggtgggcggcctgtctggaggagccctgagccccctgcgggccgccagtgaccccctgctgagctctgtgtccccagctgtgtccaaggccagcagcagaagaagcagcttctccatggaggaggagagctag

SEQ ID NO: 296117 - DNA, 1728 bp, Artificial Sequence
  derived and/or modified sequence
atgagccacgccgccgagcccgcccgggacggcgtggaggccagcgccgaaggccccagagccgtctttgtacttctggaggaaaggcggcccgcagactcagcccagctactgagcttgaattccctgctccctgagtctgggatcgttgctgacattgagctcgaaaatgttctggatcccgattctttttatgaattgaagagccaacccttaccactccgctcgtcacttccaatatcactgcaagccacacctgctacaccggctacactaagtgccagctcgtcggccggcggaagcaggacgcctgcgatgtcctcttctagctcttcaagagtgttgctgcggcagcaactaatgagagctcaagcccaggaacaggaaagaagagagcggagagagcaagcggcggcagccccattcccaagcccagctcccgctagcccagctatctccgtggtgggggtttctgcagggggacataccttgagccgccccccaccggctcaagtgccccgagaagtattgaaggtccagacccaccttgagaaccccacaagatatcacttacaacaggctcgtagacaacaagttaaacagtatttgtctacaacactgggcccgaaattagcctcacaagcccttaccccaccgcctggacccgcatccgctcaaccgctgcctgcccccgaggcagcgcataccacaggtcctactggcagcgctcctaattctcctatggccttgctaaccattggctcaagtagcgaaaaggaaatcgacgacgtgatcgacgaaataatctctctggaatcttcctataatgacgagatgctgtcgtatcttccaggagggacaaccggcctccagctcccaagcactctgcctgtgagtggcaacctgcttgatgtgtacagctctcagggcgtggccactcccgccattacagtgtccaactcttgtcccgctgaattgcctaatatcaaaagggaaatctcagagacagaagctaaagctctgctcaaggagagacagaaaaaagacaaccataacctgatagagagaaggcgccgcttcaacattaatgacagaattaaggagcttggaaccctgatccccaaatcttcagacccagagatgaggtggaacaaagggacaattctcaaagcttcagttgactacataagaaagctacagaaggagcagcagcgatcaaaggatcttgagagccggcagcgcagcctggagcaggctaaccgatccctacaattaagaattcaggaactggagctccaggcccagatccacggactcccagtcccgccaacccccggcctgctctccctggctacgaccagtgcctcagactctttgaagcccgagcaacttgacatcgaggaggagggccgacccggagctgccacattccatgtcggaggaggtcccgctcaaaacgccccccaccaacagcccccggcccccccttccgacgctctgttggatttgcactttcccagcgaccatctgggggatctgggggacccctttcatctgggactggaggacattctgatggaggaagaagagggtgttgtaggaggccttagtggaggtgccctttctcccctgagagcagcctccgatcccctcctgtcctcggtgagtcctgccgtgtccaaagcctcttctcgaaggtcatccttctcaatggaggaggaatcatag

SEQ ID NO: 296118 - DNA, 1728 bp, Artificial Sequence
  derived and/or modified sequence
atgagccatgccgcagagcccgcacgagacggggtcgaggcaagcgctgaaggacccagagccgtcttcgttttgctggaggagaggcgtccggcagattcggctcagctgctgagccttaattccttgttgcctgagtctggcatcgtggctgatattgaattggagaacgtgctggacccggactctttctatgaactaaagagccagcccctgcctctgcgtagctcactgcctatcagcctgcaagccacacctgcaacaccagccacactgagtgcatcttcctcagccggaggctcccgcactcctgctatgagcagctctagctcttcaagggtgcttctgcgccagcagctgatgagggcccaggctcaggagcaggagcggcgagaaagaagggaacaagccgctgcggcaccgtttccttcacccgcaccagcttcacctgcaataagcgtcgtaggagtgagtgccggaggccatacccttagtcgcccacctcctgcccaagtgcccagggaagtactaaaagtccaaacccatctagagaacccgacgcggtatcatctgcagcaggcacggaggcagcaggtgaaacagtacttgtctaccactctcgggcctaagctagcttcacaagcacttaccccaccgccagggccagcgtccgcccagccgctgccagcccctgaggcagcgcacacgacgggaccgactggttccgcccctaattctccaatggctcttctgaccattggtagtagctctgaaaaggagattgacgatgtaatcgacgagatcatttcactggagtcctcttacaacgatgaaatgctgagctatttgccaggcggtactacaggtctgcagctcccgtcaacactcccggtgtccggcaatctgttggacgtctactcctcgcagggtgtcgcaacgccggctatcaccgtctccaactcctgcccagcggagctccctaacatcaagcgcgaaataagtgaaacggaagccaaagctttgctgaaagagcggcagaagaaagataatcataacctcattgagagacgacggaggttcaatatcaacgaccgcattaaggaactaggcacactcatacccaaatcctctgacccggagatgagatggaacaaagggacgatacttaaggcctctgtggattatattagaaagctgcagaaagaacagcagcgtagtaaagacttggaatctcgacagcggtcactagaacaggccaacaggtccctccagctccggatacaggagctggaactacaggcccaaatccatgggctccccgtgccgccaactcccggtctgctgagcctcgctaccacttctgcgtccgattcccttaaacctgagcagctcgatattgaagaagaagggagacccggagcagcaactttccacgttggagggggtcccgcacagaacgccccacaccaacagcccccagccccaccaagtgacgctctgttagatcttcacttcccttctgaccatttaggagacctgggggaccccttccacctagggttggaagacatactgatggaggaggaggagggtgtggtaggaggcttatctggtggcgcactgtctcctctccgggctgcctctgaccctctgctgtcaagtgtgagcccagcagtgagcaaagcatcctcacgcagatcctcgttcagtatggaagaagagtcatag

SEQ ID NO: 296119 - DNA, 3415 bp, Artificial Sequence
  derived and/or modified sequence
gggaggagggggaagaagacgagggggaggagggcggtcgtccggggttaggttgagggggggcgtcggtccgttctgggcgggggatgactcacagcccatcccatctcccagacgccgcccgcccgcgcagtgctagctccatggcttagcggaggaggcggcagtggcgagctggggggaggggggactcttattttgttagggggaccgggccgaggcccgaccggcctggcagggctcgcccggggccgggcgtcatgtctcatgcggccgaaccagctcgggatggcgtagaggccagcgcggagggccctcgagccgtgttcgtgctgttggaggagcgcaggccggccgactcggctcagctgctcagcctgaactctttgcttccggaatccgggattgttgctgacatagaattagaaaacgtccttgatcctgacagcttctacgagctcaaaagccaacccttaccccttcgctcaagcctcccaatatcactgcaggccacaccagccaccccagctacactctctgcatcgtcttctgcagggggctccaggacccctgccatgtcgtcatcttcttcatcgagggtcttgctgcggcagcagctaatgcgggcccaggcgcaggagcaggagaggcgtgagcgtcgggaacaggccgccgcggctcccttccccagtcctgcacctgcctctcctgccatctctgtggttggcgtctctgctgggggccacacattgagccgtccaccccctgctcaggtgcccagggaggtgctcaaggtgcagacccatctggagaacccaacgcgctaccacctgcagcaggcgcgccggcagcaggtgaaacagtacctgtccaccacactcgggcccaagctggcttcccaggccctcaccccaccgccggggcccgcaagtgcccagccactgcctgcccctgaggctgcccacactaccggccccacaggcagtgcgcccaacagccccatggcgctgctcaccatcgggtccagctcagagaaggagattgatgatgtcattgatgagatcatcagcctggagtccagttacaatgatgaaatgctcagctatctgcccggaggcaccacaggactgcagctccccagcacgctgcctgtgtcagggaatctgcttgatgtgtacagtagtcaaggcgtggccacaccagccatcactgtcagcaactcctgcccagctgagctgcccaacatcaaacgggagatctctgagaccgaggcaaaggcccttttgaaggaacggcagaagaaagacaatcacaacctaattgagcgtcgcaggcgattcaacattaacgacaggatcaaggaactgggcactctcatccctaagtccagtgacccggagatgcgctggaacaagggcaccatcctgaaggcctctgtggattatatccgcaagctgcagaaggagcagcagcgctccaaagacctggagagccggcagcgatccctggagcaggccaaccgcagcctgcagctccgaattcaggaactagaactgcaggcccagatccatggcctgccagtacctcccactccagggctgctttccttggccacgacttcggcttctgacagcctcaagccagagcagctggacattgaggaggagggcaggccaggcgcagcaacgttccatgtaggggggggacctgcccagaatgctccccatcagcagccccctgcaccgccctcagatgcccttctggacctgcactttcccagcgaccacctgggggacctgggagaccccttccacctggggctggaggacattctgatggaggaggaggagggggtggtgggaggactgtcggggggtgccctgtccccactgcgggctgcctccgatcccctgctctcttcagtgtcccctgctgtctccaaggccagcagccgccgcagcagcttcagcatggaagaggagtcctgatcaggcctcacccctcccctgggactttcccacccaggaaaggaggaccagtcaggatgaggccccgccttttcccccaccctcccatgagactgccctgcccaggtatcctgggggaagaggagatgtgatcaggccccacccctgtaatcaggcaaggaggaggagtcagatgaggccctgcaccttccccaaaggaaccgcccagtgcaggtatttcagaaggagaaggctggagaaggacatgagatcagggcctgccccctggggatcacagcctcacccctgcccctgtgggactcatccttgcccaggtgagggaaggagacaggatgaggtctcgaccctgtcccctagggactgtcctagccaggtctcctgggaaagggagatgtcaggatgttgctccatcctttgtcttggaaccaccagtctagtccgtcctggcacagaagaggagtcaagtaatggaggtcccagccctgggggtttaagctctgccccttccccatgaaccctgccctgctctgcccaggcaaggaacagaagtgaggatgagacccagccccttcccctgggaactctcctggccttctaggaatggaggagccaggccccaccccttccctataggaacagcccagcacaggtatttcaggtgtgaaagaatcagtaggaccaggccaccgctagtgcttgtggagatcacagccccacccttgtccctcagcaacatcccatctaagcattccacactgcagggaggagtggtacttaagctcccctgccttaacctgggaccaacctgacctaacctaggagggctctgagccaaccttgctcttggggaaggggacagattatgaaatttcatggatgaattttccagacctatatctggagtgagaggcccccacccttgggcagagtcctgccttcttccttgaggggcagtttgggaaggtgatgggtattagtgggggactgagttcaggttaccagaaccagtacctcagtattctttttcaacatgtagggcaagaggatgaaggaaggggctatcctgggacctccccagcccaggaaaaactggaagccttcccccagcaaggcagaagcttggaggagggttgtaaaagcatattgtaccccctcatttgtttatctgatttttttattgctccgcatactgagaatctaggccaccccaacctctgttccccacccagttcttcatttggaggaatcaccccatttcagagttatcaagagacactcccccctccattcccacccctcatacctacacccaaggttgtcagctttggattgctggggccaggccccatggagggtatactgaggggtctataggtttgtgattaaaataataaaagctaggcgtgtttgatgcgcttttaactttg

SEQ ID NO: 296120 - protein, 789 aa, Artificial Sequence
  derived and/or modified sequence
MGTLPHGPRPWLQRDVAAHVSADHAALNSIVSLQASVSFEDVTVDFSKEEWQHLDPAQRRLYWDVTLENYSHLLSVGYQIPKSEAAFKLEQGEGPWMLEGEAPHQSCSGEAIGKMQQQGIPGGIFFHCERFDQPIGEDSLCSILEELWQDNDQLEQRQENQNNLLSHVKVLIKERGYEHKNIEKIIHVTTKLVPSIKRLHNCDTILKHTLNSHNHNRNSATKNLGKIFGNGNNFPHSPSSTKNENAKTGANSCEHDHYEKHLSHKQAPTHHQKIHPEEKLYVCTECVMGFTQKSHLFEHQRIHAGEKSRECDKSNKVFPQKPQVDVHPSVYTGEKPYLCTQCGKVFTLKSNLITHQKIHTGQKPYKCSECGKAFFQRSDLFRHLRIHTGEKPYECSECGKGFSQNSDLSIHQKTHTGEKHYECNECGKAFTRKSALRMHQRIHTGEKPYVCADCGKAFIQKSHFNTHQRIHTGEKPYECSDCGKSFTKKSQLHVHQRIHTGEKPYICTECGKVFTHRTNLTTHQKTHTGEKPYMCAECGKAFTDQSNLIKHQKTHTGEKPYKCNGCGKAFIWKSRLKIHQKSHIGERHYECKDCGKAFIQKSTLSVHQRIHTGEKPYVCPECGKAFIQKSHFIAHHRIHTGEKPYECSDCGKCFTKKSQLRVHQKIHTGEKPNICAECGKAFTDRSNLITHQKIHTREKPYECGDCGKTFTWKSRLNIHQKSHTGERHYECSKCGKAFIQKATLSMHQIIHTGKKPYACTECQKAFTDRSNLIKHQKMHSGEKRYKASD

SEQ ID NO: 296121 - protein, 178 aa, Artificial Sequence
  derived and/or modified sequence
MGTLPHGPRPWLQRDVAAHVSADHAALNSIVSLQASVSFEDVTVDFSKEEWQHLDPAQRRLYWDVTLENYSHLLSVGYQIPKSEAAFKLEQGEGPWMLEGEAPHQSCSGEAIGKMQQQGIPGGIFFHCERFDQPIGEDSLCSILEELWQDNDQLEQRQENQNNLLSHVKVLIKERGYE

SEQ ID NO: 296122 - DNA, 2370 bp, Artificial Sequence
  derived and/or modified sequence
atgggcaccctgccccacggccccagaccctggctgcagagagacgtggccgcccacgtgagcgccgaccacgccgccctgaacagcatcgtgagcctgcaggccagcgtgagcttcgaggacgtgaccgtggacttcagcaaggaggagtggcagcacctggaccccgcccagagaagactgtactgggacgtgaccctggagaactacagccacctgctgagcgtgggctaccagatccccaagagcgaggccgccttcaagctggagcagggcgagggcccctggatgctggagggcgaggccccccaccagagctgcagcggcgaggccatcggcaagatgcagcagcagggcatccccggcggcatcttcttccactgcgagagattcgaccagcccatcggcgaggacagcctgtgcagcatcctggaggagctgtggcaggacaacgaccagctggagcagagacaggagaaccagaacaacctgctgagccacgtgaaggtgctgatcaaggagagaggctacgagcacaagaacatcgagaagatcatccacgtgaccaccaagctggtgcccagcatcaagagactgcacaactgcgacaccatcctgaagcacaccctgaacagccacaaccacaacagaaacagcgccaccaagaacctgggcaagatcttcggcaacggcaacaacttcccccacagccccagcagcaccaagaacgagaacgccaagaccggcgccaacagctgcgagcacgaccactacgagaagcacctgagccacaagcaggcccccacccaccaccagaagatccaccccgaggagaagctgtacgtgtgcaccgagtgcgtgatgggcttcacccagaagagccacctgttcgagcaccagagaatccacgccggcgagaagagcagagagtgcgacaagagcaacaaggtgttcccccagaagccccaggtggacgtgcaccccagcgtgtacaccggcgagaagccctacctgtgcacccagtgcggcaaggtgttcaccctgaagagcaacctgatcacccaccagaagatccacaccggccagaagccctacaagtgcagcgagtgcggcaaggccttcttccagagaagcgacctgttcagacacctgagaatccacaccggcgagaagccctacgagtgcagcgagtgcggcaagggcttcagccagaacagcgacctgagcatccaccagaagacccacaccggcgagaagcactacgagtgcaacgagtgcggcaaggccttcaccagaaagagcgccctgagaatgcaccagagaatccacaccggcgagaagccctacgtgtgcgccgactgcggcaaggccttcatccagaagagccacttcaacacccaccagagaatccacaccggcgagaagccctacgagtgcagcgactgcggcaagagcttcaccaagaagagccagctgcacgtgcaccagagaatccacaccggcgagaagccctacatctgcaccgagtgcggcaaggtgttcacccacagaaccaacctgaccacccaccagaagacccacaccggcgagaagccctacatgtgcgccgagtgcggcaaggccttcaccgaccagagcaacctgatcaagcaccagaagacccacaccggcgagaagccctacaagtgcaacggctgcggcaaggccttcatctggaagagcagactgaagatccaccagaagagccacatcggcgagagacactacgagtgcaaggactgcggcaaggccttcatccagaagagcaccctgagcgtgcaccagagaatccacaccggcgagaagccctacgtgtgccccgagtgcggcaaggccttcatccagaagagccacttcatcgcccaccacagaatccacaccggcgagaagccctacgagtgcagcgactgcggcaagtgcttcaccaagaagagccagctgagagtgcaccagaagatccacaccggcgagaagcccaacatctgcgccgagtgcggcaaggccttcaccgacagaagcaacctgatcacccaccagaagatccacaccagagagaagccctacgagtgcggcgactgcggcaagaccttcacctggaagagcagactgaacatccaccagaagagccacaccggcgagagacactacgagtgcagcaagtgcggcaaggccttcatccagaaggccaccctgagcatgcaccagatcatccacaccggcaagaagccctacgcctgcaccgagtgccagaaggccttcaccgacagaagcaacctgatcaagcaccagaagatgcacagcggcgagaagagatacaaggccagcgactag

SEQ ID NO: 296123 - DNA, 537 bp, Artificial Sequence
  derived and/or modified sequence
atgggcaccctgccccacggccccagaccctggctgcagagagacgtggccgcccacgtgagcgccgaccacgccgccctgaacagcatcgtgagcctgcaggccagcgtgagcttcgaggacgtgaccgtggacttcagcaaggaggagtggcagcacctggaccccgcccagagaagactgtactgggacgtgaccctggagaactacagccacctgctgagcgtgggctaccagatccccaagagcgaggccgccttcaagctggagcagggcgagggcccctggatgctggagggcgaggccccccaccagagctgcagcggcgaggccatcggcaagatgcagcagcagggcatccccggcggcatcttcttccactgcgagagattcgaccagcccatcggcgaggacagcctgtgcagcatcctggaggagctgtggcaggacaacgaccagctggagcagagacaggagaaccagaacaacctgctgagccacgtgaaggtgctgatcaaggagagaggctacgagtag

SEQ ID NO: 296124 - DNA, 2370 bp, Artificial Sequence
  derived and/or modified sequence
atgggaactttgcctcacgggccgcgcccgtggctgcagcgggatgtggccgctcacgtgtctgcagatcatgctgccctgaattctatcgtgtctcttcaggcaagcgtgtcgttcgaggatgtaaccgtggatttttcaaaggaggagtggcagcacctggacccggctcagcgacgtctgtattgggatgtaactctggagaactactcacatctgctgagtgttggctaccaaattccaaagtcagaggccgcatttaagttagagcagggagaggggccatggatgctggagggcgaagctccccatcagagctgcagcggtgaagctatcgggaaaatgcagcaacaagggataccaggcgggattttcttccactgcgagaggttcgatcagccaatcggggaagactctctgtgttccatcttagaagaactgtggcaggacaatgatcagctcgagcaaaggcaggaaaatcagaacaatctgctatctcacgtgaaggtcctcataaaggagagaggttacgaacacaagaatattgaaaagataattcatgtaacaacaaagctcgtgccgtcaataaagcgcctccacaattgcgatacaatcctcaagcacacattgaactcccataaccacaatcgcaatagcgccactaaaaacttaggtaagatattcggcaatggcaacaactttcctcattcgccgtctagcacaaaaaacgaaaatgctaaaaccggagctaactcatgtgaacatgaccattacgaaaagcacctgtctcacaaacaagcccccacccaccatcaaaaaattcaccctgaggagaagctgtatgtgtgtaccgaatgcgtgatggggtttacacaaaaaagccacctgtttgagcaccaacggatccatgccggagaaaagagcagagagtgtgacaaatcaaacaaagtctttccccagaaaccacaggtagacgtccaccccagcgtctacaccggtgagaaaccctacctttgcacgcagtgtggcaaagtcttcacgctaaaaagtaacctgattacacaccaaaagattcacaccggccagaaaccatataagtgctccgagtgtggtaaggctttcttccagagaagcgaccttttccgccaccttcgcattcacaccggggaaaagccgtatgaatgtagtgagtgcggaaagggatttagtcagaactcagaccttagcattcaccagaaaacccacaccggggagaaacactacgagtgcaatgaatgtggcaaggcttttactcgcaagtcagcactgaggatgcatcagaggatccatacaggcgagaaaccttatgtgtgcgccgactgcggtaaggctttcatccagaagtcacacttcaatacccaccagagaatccacactggggagaaaccatatgagtgtagcgattgcgggaagtcctttaccaagaagtcccagcttcacgttcaccagaggattcacactggcgaaaagccatacatctgtactgagtgcggtaaggtgttcactcaccgcacaaacctgacaactcatcagaaaacacacacaggcgagaaaccatatatgtgtgctgaatgtgggaaggcctttacggaccagtctaacctgataaaacatcagaaaacgcacacaggtgaaaaaccttacaaatgcaacggttgtgggaaggctttcatttggaagagtcggcttaaaattcatcagaagtcccacattggggagagacactatgaatgcaaggattgcggcaaagccttcatccagaagagtactttatcagtacatcagcgcatccatacgggcgaaaagccctacgtttgcccagagtgtggaaaggcatttatccagaagtcacatttcattgcacaccacagaatccacactggcgagaagccctacgagtgctccgactgtggtaagtgcttcacaaagaaaagccagctgcgggtacaccagaaaatccacactggcgagaaaccaaatatttgtgccgagtgtggaaaggcctttaccgaccgctcgaatctcattacccatcagaaaatccatactcgcgagaaaccatacgagtgtggtgactgtggtaaaacatttacctggaagtctcgacttaatatccaccagaagtctcatacgggagaacgccattacgagtgctccaagtgtgggaaggcttttattcagaaggccaccctgtccatgcaccagataatacacaccgggaagaaaccatatgcatgcacagagtgtcaaaaagcgttcacagacaggtcaaacctcatcaagcaccagaagatgcattcaggcgagaagcggtataaagcatcagactag

SEQ ID NO: 296125 - DNA, 537 bp, Artificial Sequence
  derived and/or modified sequence
atgggtactcttccacatggtccacggccttggcttcagcgggatgtcgctgcgcacgtttcagctgatcacgcagccctaaatagtattgtttcgctgcaggctagcgtaagctttgaagatgtaacagtggactttagtaaagaggagtggcagcacctggaccctgcacagaggaggctctattgggatgtcacgctggagaattactctcacctcctcagcgtgggataccagattccaaagtccgaggccgcatttaaattggaacagggagagggcccctggatgctcgaaggcgaggctccgcaccagtcttgtagtggcgaggccattggcaagatgcagcagcagggtattcccgggggcattttctttcactgcgagagattcgaccaaccgattggagaggatagcttgtgctctatcctagaggagctttggcaggataacgaccagctggagcagagacaggagaaccagaacaacttgctctcacacgtaaaggtgctgatcaaggagcgggggtacgagtag

SEQ ID NO: 296126 - DNA, 2370 bp, Artificial Sequence
  derived and/or modified sequence
atgggcaccctgccccacggcccccggccctggctgcagagagatgtggccgcccacgtgtctgctgaccatgctgccctgaacagcatcgtgtccctgcaggcctctgtgtcctttgaagatgtgacagtggacttcagcaaggaggagtggcagcacctggaccctgcccagaggcggctgtactgggatgtgaccctggagaactacagccacctgctgtctgtgggctaccagatccccaagtctgaggccgccttcaagctggagcagggcgagggcccctggatgctggagggggaggccccccaccagagctgcagcggggaggccatcggcaagatgcagcagcagggcatccctgggggcatcttcttccactgtgaaagatttgaccagcccatcggggaggacagcctgtgcagcatcctggaggagctgtggcaggacaatgaccagctggagcagaggcaggagaaccagaacaacctgctgagccacgtgaaggtgctgatcaaggagcggggctatgagcacaagaacatcgagaagatcatccacgtgaccaccaagctggtgcccagcatcaagaggctgcacaactgtgacaccatcctgaagcacaccctgaacagccacaaccacaacagaaattctgccaccaagaacctgggcaagatctttggaaatggaaacaacttcccccacagccccagcagcaccaagaatgaaaatgccaagacaggagccaacagctgtgaacatgaccactatgagaagcacctgagccacaagcaggcccccacccaccaccagaagatccaccctgaggagaagctgtatgtgtgcacagaatgtgtgatgggcttcacccagaagagccacctgtttgagcaccagagaattcatgctggggagaagagccgggagtgtgacaagagcaacaaggtgttcccccagaagccccaggtggatgtgcaccccagcgtgtacaccggggagaagccctacctgtgcacccagtgtgggaaggtgttcaccctgaagagcaacctgatcacccaccagaagatccacacaggccagaagccctacaagtgcagtgaatgtgggaaggccttcttccagaggagtgacctcttccgccacctgcgcatccacactggagagaagccctatgagtgcagtgaatgtgggaagggcttcagccagaacagcgacctgagcatccaccagaagacccacactggagagaagcactatgagtgcaatgaatgtgggaaggccttcaccaggaagagcgccctgaggatgcaccagaggatccacactggagagaagccctacgtgtgtgccgactgtgggaaggccttcatccagaagagccacttcaacacccaccagaggatccacactggagagaagccctatgagtgcagcgactgtgggaagagcttcaccaagaagagccagctgcacgtgcaccagaggatccacactggagagaagccctacatctgcacagaatgtgggaaggtgttcacccacaggaccaacctgaccacccaccagaagacccacactggagagaagccctacatgtgtgctgaatgtgggaaggccttcacagaccagagcaacctgatcaagcaccagaagacccacactggagagaagccctacaagtgcaatggctgtgggaaggccttcatctggaagagccggctgaagatccaccagaagagccacatcggggagcggcactatgagtgcaaggactgtgggaaggccttcatccagaagagcaccctgtctgtgcaccagaggatccacactggagagaagccctacgtgtgcccagaatgtgggaaggccttcatccagaagagccacttcatcgcccaccaccgcatccacactggagagaagccctatgagtgcagcgactgtgggaagtgcttcaccaagaagagccagctgcgggtgcaccagaagatccacactggagagaagcccaacatctgtgctgaatgtgggaaggccttcacagacaggagcaacctgatcacccaccagaagatccacacccgggagaagccctatgaatgtggggactgtgggaagaccttcacctggaagagccggctgaacatccaccagaagagccacactggagagcggcactatgagtgcagcaaatgtgggaaggccttcatccagaaggccaccctgtccatgcaccagatcatccacacaggcaagaagccctatgcctgcacagagtgccagaaggccttcacagacaggagcaacctgatcaagcaccagaagatgcacagcggggagaagcgctacaaggccagtgactag

SEQ ID NO: 296127 - DNA, 537 bp, Artificial Sequence
  derived and/or modified sequence
atgggcaccctgccccacggcccccggccctggctgcagagagatgtggccgcccacgtgtctgctgaccatgctgccctgaacagcatcgtgtccctgcaggcctctgtgtcctttgaagatgtgacagtggacttcagcaaggaggagtggcagcacctggaccctgcccagaggcggctgtactgggatgtgaccctggagaactacagccacctgctgtctgtgggctaccagatccccaagtctgaggccgccttcaagctggagcagggcgagggcccctggatgctggagggggaggccccccaccagagctgcagcggggaggccatcggcaagatgcagcagcagggcatccctgggggcatcttcttccactgtgaaagatttgaccagcccatcggggaggacagcctgtgcagcatcctggaggagctgtggcaggacaatgaccagctggagcagaggcaggagaaccagaacaacctgctgagccacgtgaaggtgctgatcaaggagcggggctatgaatag

SEQ ID NO: 296128 - DNA, 2370 bp, Artificial Sequence
  derived and/or modified sequence
atgggcaccctgccccacggcccccggccctggctgcagcgggacgtagccgcccacgtctctgctgaccacgctgcgctgaacagcatcgtgtcacttcaagcctccgttagcttcgaggatgtgactgtcgatttctccaaggaggaatggcaacacctggacccagcccagaggaggctttactgggatgtcaccttagagaactacagccatctcctgtccgttggttaccagattcctaagagtgaagcggctttcaagctagaacagggagaaggtccctggatgttagaaggcgaagccccacaccagtcgtgttccggcgaggcgatcggcaagatgcagcagcagggaatccctggaggaattttcttccactgcgagcggtttgatcagcccataggcgaggacagcctgtgtagcatattggaggagctgtggcaggacaatgaccaactcgagcagcgacaggaaaatcaaaacaaccttttgtcccacgtgaaggtcctaattaaggagaggggctacgagcataagaacatcgagaaaatcattcatgtgaccactaaacttgtgccctccattaagcggttgcacaattgtgacacaatacttaagcataccctgaattcacacaaccataatcgcaacagcgccacaaagaacttgggaaaaattttcggtaacggaaataacttcccacacagtccatcatccaccaaaaatgagaatgcgaaaacgggagcaaatagctgcgagcacgatcactacgaaaagcatctgtcccataagcaggcaccaacacaccaccagaagatccacccagaagagaaactgtatgtgtgtacggaatgcgtcatggggttcacgcagaagtcccacctcttcgaacaccagcggattcatgccggtgaaaaaagtcgggaatgtgacaaaagcaacaaagtgtttccgcagaaaccacaggtggatgtgcacccctcagtgtacaccggtgaaaagccttacctgtgtacacagtgcggcaaggtgttcactctgaaatcaaatcttattactcatcagaagattcacactggtcagaaaccatacaagtgtagtgagtgcggtaaggcatttttccagaggtcggatcttttccgtcacttgcgcatccacacgggcgaaaagccatacgaatgctccgaatgcggcaagggattttcacaaaacagcgacctgagtatccaccagaagacacatacaggagagaaacattatgagtgtaatgagtgcggtaaagctttcacaagaaaatccgccctccggatgcatcagaggatccacacaggtgaaaaaccctacgtgtgtgcagattgcggtaaagcctttattcagaagagtcactttaacacacaccaacggatccatactggagagaagccgtacgagtgttccgactgtggaaagtcctttaccaagaaatctcagctgcacgtacaccagcggatccacaccggcgaaaaaccatacatctgcactgaatgcggcaaggttttcacccatcgaactaatctgacaactcatcagaagacacatacaggggaaaaaccgtatatgtgtgccgagtgtggaaaggcctttacggatcagtctaacctaattaagcaccagaagacccacacgggcgaaaagccttacaaatgtaacggctgtggcaaagcctttatttggaaaagccgccttaaaattcaccagaagagccacatcggcgagaggcattacgaatgcaaggactgcggaaaagcctttatccaaaaaagcacactgtcagtccatcaaaggatccacaccggcgagaaaccttacgtctgccccgaatgtggcaaggcatttatccagaaaagtcattttatcgcccaccatcggattcacaccggagaaaagccatatgagtgctccgactgtggcaaatgcttcacaaagaagtcccagctgcgggttcatcagaaaatccataccggggaaaagcccaatatttgcgccgaatgcgggaaggcctttactgataggagtaatctgatcacccatcagaaaatccacacacgagagaagccatacgaatgcggagactgtggtaagacgttcacttggaagtctcggctcaatatacatcagaaatcccatactggcgaacggcactacgaatgctccaagtgtggcaaagcttttattcaaaaggctaccttatccatgcatcagatcatccatacaggcaaaaagccatatgcctgcaccgagtgtcagaaggccttcactgacagaagcaatctcataaagcaccagaagatgcactcaggtgaaaaacgatacaaagccagtgattag

SEQ ID NO: 296129 - DNA, 537 bp, Artificial Sequence
  derived and/or modified sequence
atgggcaccctgccccacggcccccggccctggctgcagcgggacgtagccgcccacgtgagtgctgaccacgccgcgctcaactctatagtctcgctgcaagcttccgtatccttcgaagatgtgactgttgacttttcaaaggaagagtggcagcaccttgatcctgcccagagacgtctgtactgggacgtcacccttgaaaactactcccatctactctcagtggggtatcaaatcccaaagtccgaagccgcttttaaactggaacaaggcgaaggaccatggatgctggaaggggaggcacctcatcagtcatgttcaggcgaggccataggaaaaatgcaacagcagggcatcccaggaggtattttttttcattgcgaacgcttcgaccagccaatcggggaagattctctgtgtagtatcctggaggaactgtggcaggataatgatcaacttgagcagcgtcaagagaatcagaacaatctgttgtcacacgttaaggtgctgatcaaagagcgaggatatgaatag

SEQ ID NO: 296130 - DNA, 2370 bp, Artificial Sequence
  derived and/or modified sequence
atgggcacgctgccccatgggccaagaccatggttgcagcgcgatgtggcggctcacgtctctgccgaccatgctgcgctgaactcgattgtatctctgcaggctagcgtgtcgtttgaagacgtgaccgtggacttttctaaggaagagtggcagcatcttgacccagcccaacgccgattgtattgggacgttacgctggaaaattactcacaccttctgagcgttggctaccagattcccaagtcggaggccgcttttaaacttgagcagggagagggcccatggatgcttgaaggggaagcaccccatcaatcgtgctctggcgaagcgatcggcaagatgcagcagcagggaatccccggaggaatcttcttccattgcgagagattcgatcagccaattggagaggatagtctgtgctcaattctcgaggagttgtggcaggataacgaccagctggaacagcgccaggagaaccagaacaatctcttgagccatgtgaaggtgttaataaaggagagaggttatgagcacaaaaatattgagaagattattcatgttaccacgaagcttgtgccttcaatcaagagactgcataactgcgatacaatcctgaagcatacactaaacagtcataatcacaatcgcaactcagccaccaagaacctgggcaagatattcggcaatggcaacaatttcccccactcaccttcatctaccaagaacgaaaacgctaagaccggtgctaattcctgtgagcatgatcactacgagaagcacctgagtcataagcaagccccaacccatcatcagaagatccatccggaagaaaaactctacgtgtgtaccgaatgtgtaatgggctttacgcagaaatcgcacctgttcgagcatcagcggatccacgccggagagaagtcacgtgaatgtgataagagcaataaagtgttcccgcaaaagccccaggtggatgtccacccaagcgtgtatactggcgagaagccttatctctgtactcaatgcggcaaagtattcactctgaaatccaatctcataacccatcagaaaatacacacagggcaaaagccatacaagtgctcagagtgtggcaaggcattcttccaaagatctgatctgttccgccatctccggattcatacgggtgagaaaccgtacgagtgttctgaatgtgggaagggattctctcaaaatagtgatcttagcattcatcagaaaacgcatactggtgaaaagcattacgagtgcaatgagtgcggcaaggcctttactcggaaatccgcgttgagaatgcaccagagaatccataccggcgagaagccatacgtgtgtgcagattgcggaaaggctttcattcaaaaatcccatttcaatacacaccagaggatccacactggtgagaaaccgtatgaatgctcggactgtggtaaatcattcacaaaaaaatctcaacttcacgttcaccaacgtatccatacaggcgagaagccatacatctgtactgaatgtggtaaagtgttcacacataggactaacctcactactcatcaaaaaacccatacaggagagaaaccttacatgtgcgcagagtgtggtaaggcgtttacggatcaatcaaatttaatcaaacaccagaaaactcacaccggagagaagccttataaatgtaatggttgcggtaaagcatttatctggaagagccgccttaagattcaccagaagtcacacattggcgaacgtcactacgaatgcaaggactgcggcaaggcctttattcaaaaaagcaccctttcagtacatcagaggatccatactggagaaaaaccatatgtctgcccagaatgcggaaaggcgtttatccagaagagccactttattgcccatcaccgcatccacaccggggagaaaccttatgagtgcagtgactgcggaaagtgcttcacaaaaaaatcacagctcagagtgcatcagaagatccatacaggtgagaagccgaacatatgtgcagagtgcggcaaggcgtttacggataggagcaatttgatcactcatcagaagatccacacccgcgaaaaaccctacgaatgtggtgactgtggcaagactttcacatggaagtcaaggttaaacatccaccaaaaaagtcacaccggggaaagacattacgaatgctctaagtgcggtaaggcctttattcagaaggccacccttagcatgcatcagattattcacaccgggaaaaaaccttatgcctgcacagagtgccagaaggcattcactgatcgcagcaacctgataaaacaccaaaagatgcactccggagaaaagcgctacaaagcttccgactag

SEQ ID NO: 296131 - DNA, 537 bp, Artificial Sequence
  derived and/or modified sequence
atggggactttgccacacggacccagaccttggctgcagcgcgacgtggcagcccatgtcagcgcagaccacgcagccctcaactctatcgtctcacttcaggcttccgtgtcattcgaggatgtgaccgtcgacttcagtaaagaggaatggcagcacctggatccagctcagcggcgactgtattgggatgttactctcgagaattactcacatctccttagtgtcggctaccagatcccgaagtctgaggccgcattcaagctcgaacagggagaaggaccatggatgctagagggcgaggcgccacatcagtcttgttccggggaggctattggtaaaatgcagcagcaggggatcccaggcggaatttttttccattgcgagcggttcgatcagcctatcggagaggatagcctgtgctctatcctcgaagaactgtggcaggataacgatcagctcgaacagagacaagagaaccagaacaacttgttgagccacgtgaaggtgctgataaaggagcgtgggtacgagtag

SEQ ID NO: 296132 - DNA, 4415 bp, Artificial Sequence
  derived and/or modified sequence
cggaggctccccggtagggacggcctgaggccgagggcaccctgagggcggaagaggcaaagcgcctcgcccgccggggcctcggaggtgactaactcctagaggctgcggcggaggggagaagcctggtggtacattccatggcccagtgcctcggccactggaaaatcccacaggggtatatcgagtaggggaccgcgggctccgcggcagaaatgaccgcccttccaagatggcggctcccgtagagacactcccaaggagacagccatgttccttgcctgagagtcactgaaggaaattggaaagcccgcctctccttcgacgcacacgcgcacgcgcacgcacgcaccggcgcggtgtaagggcacccaccaggtgtaattgtgggcgagcggccgcttcggagctgacactaagcatgtgcagatcaagtccagaagcgccggggttcctcgaagcagttttcaggacttaaggctctgggacatccagcacagtgagcggcccctgggcaccaccagaaaacatttgtgagtgaacgtggagtgatgaccatgtggacactgtctttccagggtttcttggagcctctgcagagtctgggggccaggcttcttagtggaaactgcaggatcttccttctgacccctgcttgcctcgccccagcagctccggttgagtccacagatgccagctcagcttccagcttggggaagagtggggttgtcagcaggagagcctgagggctgaggcccagcgtgaacatggcagctaatggggactctcccccatggtccccggccctggctgcagagggacgtggcagctcatgtgagtgctgaccatgctgccttgaacagcattgtgtcgttacaggcttcagtgtcatttgaggacgtgactgtggacttcagcaaggaggagtggcagcacttggaccctgcccagagacgcctgtactgggatgtgacactagagaactacagccacctgctctcagtggggtaccaaattcccaagtcagaggctgccttcaagttggagcaaggagaggggccatggatgctggagggggaagccccacatcagagctgttcaggtgaggctattgggaaaatgcagcaacagggaattcctggaggaattttcttccactgtgagagatttgatcaacccataggagaagattcattatgttctattttagaagaactgtggcaagataatgaccagctagagcaacgtcaggaaaaccagaataaccttttaagtcatgtgaaagtattgattaaggagaggggctatgaacataaaaacattgaaaaaataattcatgtgactaccaagcttgttccttcaattaaaagactccataactgtgacacaattttgaagcatactttaaactcacataatcataatagaaacagtgcaacaaagaaccttggcaagatttttggaaatggtaacaatttcccccatagcccttcctctactaagaatgagaatgctaaaacaggagcaaattcctgtgaacatgaccactatgaaaaacatctcagccacaaacaagctcccacccaccatcagaaaattcatcctgaggagaagctttatgtgtgtactgaatgtgtaatgggcttcactcagaagtcacatctgtttgagcatcagagaattcatgctggagaaaagtcccgtgaatgtgacaaaagcaacaaagtcttcccccagaaaccccaggttgatgtacatccaagtgtttatacaggagaaaaaccctatctgtgtactcaatgtgggaaagtctttaccctcaaatcaaacctcattacacatcaaaaaattcataccgggcagaaaccctacaaatgcagtgaatgtggaaaagcctttttccagagatcagacctctttagacatctgagaattcatacaggagaaaaaccttatgaatgcagtgaatgtggaaaaggcttctcccagaactcagacctcagtatacatcagaaaactcataccggagagaaacactatgaatgcaatgaatgtgggaaggctttcacaagaaaatcagcactcaggatgcatcagagaatccacacgggagagaaaccttatgtatgcgctgactgtgggaaggccttcatccagaaatcacatttcaacacacatcagagaattcatactggagaaaagccgtatgaatgcagtgactgtgggaaatccttcactaagaagtcacaactccatgtgcatcaaagaattcacaccggagagaaaccctatatatgtacagaatgtggaaaggtcttcactcacaggacaaacctcaccacacatcagaaaactcatactggggaaaaaccctatatgtgtgctgaatgtggaaaggcttttactgaccagtcaaatctcattaaacaccagaaaactcacactggagagaaaccctataagtgcaatggctgtggaaaagccttcatatggaagtcgcgcctcaaaatacatcagaaatctcatattggagagagacactatgaatgcaaggactgcgggaaagccttcatccagaaatcaacactaagcgtgcatcagagaatccatacaggagagaaaccgtacgtttgtcctgaatgcgggaaggcctttatccagaaatcgcacttcattgcgcatcatagaatccatactggagagaagccttatgaatgcagcgactgtgggaaatgcttcactaagaagtcacaactccgtgtgcatcagaaaatccacacaggtgagaagcccaatatatgtgctgaatgtggaaaggccttcactgaccgatcaaatctcataacacatcagaaaatccacactagggagaaaccctatgaatgtggtgactgcgggaaaaccttcacctggaagtcacgcctcaatatacatcagaagtctcatactggagaaagacactatgaatgtagtaaatgtgggaaagctttcatccagaaagccacactaagtatgcatcagataattcatacaggaaagaaaccttatgcttgtacagaatgtcagaaggcctttactgacagatcgaatctcattaaacaccagaaaatgcatagtggagaaaaacgctataaagccagtgactgagaaagtcttcacctggaaatcacaactgggtatgcatcaggtatctaatagcagggaggaggaaggcctgttgctgcaatcattgtacagggggaaatgggtatgagagactgaggcttgagtgaactgaaggcaaacagagccaagtatccttcagtccactggaaagacaagttcctgcatcaccacagtgtatatgcaattctatgcataggaagagcctttagagaaagcatttgagcgaaagtcatgtttggtgacatgattcatacagacctcttgagctcctggaaatagtagaattaagacctgaggagatgactcgtcatctcttatgcttcactttttggataaagaactttttaaattcagtactgattggttcagcatatcctgggacataaaaatactcactactgggaaaaactttttcaaatttctaggttgaggagaagagttttcattgtccaaacactggcagggcactgacatcaaggcagaaaacctacttgggaatgcagatatctgtttttgtgatcattggcacttaagacatagaaaagatttccatgaaaaacttttttcttttcccttgggaagtcctcatggtatatatattttaagtgcaatggaatttttaaatttaaagatataactttatgaattgagaaattaggcctagctctaggctatgttacagaaatatagtcattgaatgatacagacatataaaggtagtagttgtctcattattaattccctgctgggagagcagatgagtcataccctataagaagtatgcatgccttctaacctatgtccccaaagctgtcatttgcataagctgcaggccatagattcctgattccctcagtaactgaccctacgacaatggaactgatccacggcactctagattttcaggctaacccaccaacacccctgctttccttgggatttcctgaaaaagaatggttgaaaaattgagtttcacttcctaatattttgtttttcttcctatttggttaaggtatattcatttcctacatgcacattaagggtagttttgtgtagactgctatgtgataaagtcatgttgcattgcaattagttattctaagacataattacagtttatcatagttgaataactggaagacttctcaagaaagagcactgctcttttttaacactgatatatagacacgttctcattttcccttaaacattttttacaatactcataaaaaggaactttctttctagca

SEQ ID NO: 296133 - DNA, 613 bp, Artificial Sequence
  derived and/or modified sequence
agcttccagcttggggaagagtggggttgtcagcaggagagcctgagggctgaggcccagcgtgaacatggcagctaatggggactctcccccatggtccccggccctggctgcagagggacgtggcagctcatgtgagtgctgaccatgctgccttgaacagcattgtgtcgttacaggcttcagtgtcatttgaggacgtgactgtggacttcagcaaggaggagtggcagcacttggaccctgcccagagacgcctgtactgggatgtgacactagagaactacagccacctgctctcagtggggtaccaaattcccaagtcagaggctgccttcaagttggagcaaggagaggggccatggatgctggagggggaagccccacatcagagctgttcaggtgaggctattgggaaaatgcagcaacagggaattcctggaggaattttcttccactgtgagagatttgatcaacccataggagaagattcattatgttctattttagaagaactgtggcaagataatgaccagctagagcaacgtcaggaaaaccagaataaccttttaagtcatgtgaaagtattgattaaggagaggggctatgaaca

SEQ ID NO: 296134 - protein, 162 aa, Artificial Sequence
  derived and/or modified sequence
MSLTVGNLAEQEFVTIARHYRVPEGTCSDMDFLIALAHEKFKKNMFENFDTFIYSCVYEDREKKNVLPTKDIKRLCKSSRLPLSDDLLESLLSRFEDSEKQIDYKSFFSALNWRKNPVPELQPASYLKERCEDVWLGMPSPIPAKYIDYWTFLKDAFGLEEE

SEQ ID NO: 296135 - protein, 250 aa, Artificial Sequence
  derived and/or modified sequence
MKIRREVVEHVEPLRPYESLDTLKQFLQYHGKILCFFCLWDDSVSMFGDRRELILHYFLCDDTIEIKELLPHSSGRDALKMFLRRSKLPKNCPPRVYQPGQITDRAVLNSYGDFIKNQADGYLFDRYKLGKVDQEFYKDSDLSLGVTINVWGRKVLLYDCDEFTKSYYKSKYGIENFTSVSCKPPSPPPKIERKFPPYNGFGSEEDSLRNCIDLKPTPHRRNFKKFMEKDSYGSKSNILFFCKTSHRQMC

SEQ ID NO: 296136 - DNA, 489 bp, Artificial Sequence
  derived and/or modified sequence
atgtcccttacagtcggaaacctggctgagcaggaatttgtcacgatagccaggcattatagagtccccgaaggtacctgtagcgacatggacttcctgatcgctttagctcacgaaaagtttaagaaaaatatgttcgagaactttgacaccttcatctattcctgtgtgtacgaggaccgagagaagaaaaatgttttacctaccaaggacattaagcggttatgcaagtcaagtaggctacccctgtcagatgatctcctcgaaagtttgctatctcggttcgaagacagcgaaaagcagattgattacaaaagtttctttagcgccctcaattggcgtaaaaacccagtcccagaactgcagccagcttcttatctgaaagagaggtgtgaggatgtttggctggggatgcctagtccaatcccagcaaagtatattgactactggaccttcctcaaggacgcctttggcctggaagaagaatag

SEQ ID NO: 296137 - DNA, 753 bp, Artificial Sequence
  derived and/or modified sequence
atgaagattcggagagaagtggtcgaacacgtggagccgctgaggccctacgagtcactggacacactcaagcagtttctacagtaccatggcaaaattttatgttttttctgtttatgggacgatagcgtttcgatgttcggcgataggagagaactcatactgcactattttctgtgtgacgacaccatcgagattaaagaactgcttccccactcaagcggacgtgatgccctgaaaatgtttttgcggagaagcaagctcccaaagaactgcccaccgagggtgtatcagcctggacagattaccgatagggccgtgttgaatagctacggagatttcattaagaatcaggccgatgggtacctattcgacaggtacaaactggggaaggttgaccaggaattctacaaggactcagacctgagtttgggcgtgacaattaacgtgtggggaaggaaggttctgctgtacgactgcgatgaattcacaaagtcctattacaaaagcaagtatgggattgaaaatttcaccagcgtaagctgcaaacctcccagccctcccccaaaaattgaaagaaagtttccaccttataacggcttcggatctgaggaagattcacttcggaactgcatcgacttgaagcctaccccccatcgaaggaactttaagaagttcatggagaaggattcctacggaagcaagtcgaatatcctgtttttttgtaagacaagccatcgccagatgtgctag

SEQ ID NO: 296138 - DNA, 489 bp, Artificial Sequence
  derived and/or modified sequence
atgagcctgactgtgggcaacctggccgagcaggagtttgtgaccatcgcccggcactacagagtgcctgagggcacctgcagcgacatggacttcctgattgccctggcccacgagaagttcaagaagaacatgtttgaaaattttgacaccttcatctacagctgtgtgtatgaagatcgggagaagaagaatgtgctgcccaccaaggacatcaagaggctgtgcaagagcagccggctgcccctgagtgatgacctgctggagagcctgctgagcagatttgaggacagcgagaagcagattgactacaagagcttcttcagcgccctgaactggaggaagaaccctgtgcctgagctgcagcctgccagctacctgaaggagcgctgtgaagatgtgtggctgggcatgcccagccccatcccagccaagtacatcgactactggaccttcctgaaggatgccttcggcctggaggaggagtag

SEQ ID NO: 296139 - DNA, 753 bp, Artificial Sequence
  derived and/or modified sequence
atgaagatccggcgggaggtggtggagcacgtggagcccctgcggccctatgagagcctggacaccctgaagcagttcctgcagtaccacggcaagatcctgtgcttcttctgcctgtgggatgattctgtgtccatgtttggagaccggcgggagctgatcctgcactacttcctgtgtgatgacaccatcgagatcaaggagctgctgccccacagcagcggcagagatgccctgaagatgttcctgcggcgcagcaagctgcccaagaactgccccccccgggtgtaccagcccggccagatcacagacagagctgtgctgaacagctatggagacttcatcaagaaccaggctgatggctacctgtttgaccgctacaagctgggcaaggtggaccaggagttctacaaggacagcgacctgagcctgggcgtgaccatcaacgtgtggggcaggaaggtgctgctgtatgactgtgatgagttcaccaagagctactacaagagcaaatatggaattgagaacttcacctctgtgtcctgcaagccacccagccccccacccaagattgaaaggaagttccccccctacaatggatttggaagtgaggaggacagcctgaggaactgcatcgacctgaagcccaccccccacagaagaaacttcaagaagttcatggagaaggacagctatggcagcaagagcaacatcctcttcttctgcaagaccagccaccggcagatgtgctag

SEQ ID NO: 296140 - DNA, 489 bp, Artificial Sequence
  derived and/or modified sequence
atgagcctgaccgtgggcaacctggccgagcaggagttcgtgaccattgccaggcattatagggtgcccgagggcacttgttccgacatggatttcctgattgccctagctcacgagaagtttaaaaaaaacatgttcgagaatttcgacaccttcatttattcatgtgtgtatgaggacagggagaagaagaatgtgttacccacaaaggatatcaaaaggctgtgcaagtcctcacgcctgcctctgagtgacgacttactcgagtcgctgctgagcagatttgaggatagcgaaaagcaaattgactacaagagtttttttagcgccttgaattggcgcaaaaaccctgtgcccgaactgcagcccgctagctacctaaaggagaggtgcgaagacgtctggctcggaatgcctagcccaattcctgccaaatatatcgactactggacattcctcaaggacgctttcggactcgaggaagagtag

SEQ ID NO: 296141 - DNA, 753 bp, Artificial Sequence
  derived and/or modified sequence
atgaagatccggcgggaggtggtggagcacgtggagcccctgcggccgtatgagagcctggacacactcaagcagtttctgcagtaccacgggaaaatcctctgcttcttctgtctctgggatgatagcgtcagtatgtttggcgaccgcagggagcttatactccactacttcctgtgcgacgatactatcgagattaaagagctgctgccacattcctccgggcgggatgctcttaagatgtttcttaggcgctctaagcttcccaagaactgtccacctcgcgtttaccagccaggtcagattacagatagagcagttctcaatagctatggagatttcatcaagaatcaggctgatgggtatctgttcgacagatacaaactgggaaaagttgaccaggaattttataaggactctgacctgtctctgggcgtcacgattaatgtgtggggacgtaaggtactactgtacgactgcgatgaattcaccaagtcctattataagagcaaatacggaatcgaaaattttaccagcgtgtcctgcaaaccgccatccccaccgcccaaaatagagcgaaaattccctccttacaatggatttggatccgaggaagactcactacggaattgcatagaccttaaacccacaccccatagaagaaattttaaaaaatttatggaaaaggactcctatggatccaagagcaacatcctgttcttttgcaagacttcccatcgacagatgtgctag

SEQ ID NO: 296142 - DNA, 489 bp, Artificial Sequence
  derived and/or modified sequence
atgtctttaaccgtgggaaatctggcagaacaggaatttgtgacaatcgccagacactacagagtccctgagggaacgtgctctgacatggattttttgattgcactggcacacgagaaattcaagaagaatatgtttgaaaattttgatacattcatatattcttgcgtctacgaagatcgcgagaaaaagaacgtgctgccaacgaaagatataaagaggctgtgcaagagtagtaggctgcctctgtccgacgacctgctggaatccttactctctagatttgaggactccgagaagcagattgattataagtcatttttcagcgctctgaactggcgcaaaaatccggtccctgagctgcagcccgcaagctacttgaaggagcggtgcgaagacgtatggctgggcatgccgagtcccataccagcaaaatacattgactattggaccttcctgaaggatgcctttgggctcgaagaagaatag

SEQ ID NO: 296143 - DNA, 753 bp, Artificial Sequence
  derived and/or modified sequence
atgaaaattcgtagagaagtggtggagcacgtcgaaccccttaggccatacgagagtctcgacacccttaaacagttcctccagtaccatgggaaaatattgtgttttttttgtctttgggatgacagcgtctccatgttcggggaccggagggagctcatcttgcactacttcctctgtgacgacaccatcgaaatcaaagagttattaccacactcttcgggcagagatgctctcaaaatgttcttgagaagaagcaagctgcccaaaaattgcccgcctagggtctaccagccaggccagattaccgatcgggctgtgctgaacagttacggagatttcattaagaatcaggccgatgggtacttgttcgaccggtacaagcttggaaaagtcgatcaggaattttacaaagactctgatctgagcttgggagttacaatcaacgtctgggggcgtaaggtcttgctctacgattgcgacgagttcacaaagtcatactataaatccaaatatggtatagaaaacttcacttcagtcagctgtaaaccgccttctcctcctcccaaaatcgaaagaaagtttcccccatacaatggattcggctcggaggaggactccctgcgcaactgtatcgacttgaaacccaccccccatcgccgtaattttaaaaaatttatggagaaagattcctatggctcaaagtcaaatatactgtttttttgcaaaacatcccatcgtcagatgtgttag

SEQ ID NO: 296144 - DNA, 489 bp, Artificial Sequence
  derived and/or modified sequence
atgagcctgaccgtgggcaacctggccgagcaggagttcgtgaccatcgccagacactacagagtgcccgagggcacctgcagcgacatggacttcctgatcgccctggcccacgagaagttcaagaagaacatgttcgagaacttcgacaccttcatctacagctgcgtgtacgaggacagagagaagaagaacgtgctgcccaccaaggacatcaagagactgtgcaagagcagcagactgcccctgagcgacgacctgctggagagcctgctgagcagattcgaggacagcgagaagcagatcgactacaagagcttcttcagcgccctgaactggagaaagaaccccgtgcccgagctgcagcccgccagctacctgaaggagagatgcgaggacgtgtggctgggcatgcccagccccatccccgccaagtacatcgactactggaccttcctgaaggacgccttcggcctggaggaggagtag

SEQ ID NO: 296145 - DNA, 753 bp, Artificial Sequence
  derived and/or modified sequence
atgaagatcagaagagaggtggtggagcacgtggagcccctgagaccctacgagagcctggacaccctgaagcagttcctgcagtaccacggcaagatcctgtgcttcttctgcctgtgggacgacagcgtgagcatgttcggcgacagaagagagctgatcctgcactacttcctgtgcgacgacaccatcgagatcaaggagctgctgccccacagcagcggcagagacgccctgaagatgttcctgagaagaagcaagctgcccaagaactgcccccccagagtgtaccagcccggccagatcaccgacagagccgtgctgaacagctacggcgacttcatcaagaaccaggccgacggctacctgttcgacagatacaagctgggcaaggtggaccaggagttctacaaggacagcgacctgagcctgggcgtgaccatcaacgtgtggggcagaaaggtgctgctgtacgactgcgacgagttcaccaagagctactacaagagcaagtacggcatcgagaacttcaccagcgtgagctgcaagccccccagccccccccccaagatcgagagaaagttccccccctacaacggcttcggcagcgaggaggacagcctgagaaactgcatcgacctgaagcccaccccccacagaagaaacttcaagaagttcatggagaaggacagctacggcagcaagagcaacatcctgttcttctgcaagaccagccacagacagatgtgctag

SEQ ID NO: 296146 - DNA, 1484 bp, Artificial Sequence
  derived and/or modified sequence
atctcactcatttgttcatatattggtctctgaggtcccttctaggctctgacaactggaaactctgaaaatagacatattgatgtctttgactgttggaaaccttgcagagcaagaatttgtaaccattgcacgtcactaccgtgtgcctgagggcacatgttcagatatggatttcttaatcgcactggcccacgaaaagttcaagaaaaatatgtttgagaatttcgacactttcatttattcctgtgtgtatgaagatcgagaaaaaaaaaatgtattacccaccaaagacattaaaaggctgtgcaaatcctccagattacctttgagtgatgatcttctagaatccttattgtcaaggtttgaagacagtgaaaaacaaatagattataagtcatttttctctgccctgaactggagaaagaatccagtgcctgaattgcaaccagcatcataccttaaagagagatgtgaagatgtttggcttggtatgccatcacctattcctgcgaaatacattgactactggacctttttgaaggacgcgtttggcttagaggaggaataaccatgccagttttggtcaattctctatgatttacttctctcattttgccacatttactttagtagatataatttcattaaaaacaaaaaagaaacaaggtttatattaaatggaaatccataaaccacaattaatcctattttgtcatgttagttttacagaacatcatgttacattgccgacgtactgttactatttaaaatgccatcttaaaacatgttgaatatttttattatatgtatggtttattaataccaaaaaatcttctgataatttttgatccaacataatttgattcattactatatgaacagaaaatgacttttgaaggttatacatgacaatacaaaatcaaattatatcacagcaataagttgtgattctattaaacatttttgaaacctttttgacacgtttattacttacataattaagttttgtagcaacccacctcatcaaaataattcttaaacctctctagagtaaatatatttatcttttgaacttagtaaagctatgggaagaaaaagaacctccaacacacacacacacacacacacacacgcacgtgcacacacactggaaacatatgcagtatttatatttgtaatgcccttttttctatctaaagtcagcttgttagcttaggaatatatgcatgtgtgtataattatagtttgaccaaaactttattatgtctaaaatatttacaaatgtgaaagctgaagattttgagatttttgttttttttttggtttgttttacacacacatcccacgcgccccaccctagaggtttaaatattcagaaactacaacatttttcccctgcatttttctagttctatttttatttttcttcagcagaactcttgtcatgtagtgtacatttgattaaaacccatagccatgta

SEQ ID NO: 296147 - protein, 227 aa, Artificial Sequence
  derived and/or modified sequence
MSSIKIECVLPENCRCGESPVWEEVSNSLLFVDIPAKKVCRWDSFTKQVQRVTMDAPVSSVALRQSGGYVATIGTKFCALNWKEQSAVVLATVDNDKKNNRFNDGKVDPAGRYFAANRRSVYKLEKEEQIPDGMCIDAEGKLWVACYNGGRVIRLDPVTGKRLQTVKLPVDKTTSCCFGGKNYSEMYVTCARDGMDPEGLLRQPEAGGIFKITGLGVKGIAPYSYAG

SEQ ID NO: 296148 - DNA, 684 bp, Artificial Sequence
  derived and/or modified sequence
atgagcagcatcaagatagagtgtgtgcttccagaaaactgtcggtgtggtgaatcgcccgtgtgggaagaagtttcaaattctttacttttcgtggacatacccgcaaaaaaagtttgccgttgggattctttcaccaaacaagtacagcgagtaaccatggacgcacccgtgtccagtgtggccctgcggcagagcggaggctacgttgccactatcgggaccaaattctgtgccttaaactggaaagagcaatctgccgtggtcctagccacagtggataacgacaaaaaaaataatagatttaacgatggcaaggtcgatccagcaggacgttattttgcagccaatagacgcagtgtttacaagctcgaaaaggaagagcagatcccagatggcatgtgcattgatgcagaaggaaaattgtgggtggcatgctataacggcggccgagttatcagactggacccggtgacaggaaagagactccagaccgtgaagttgccagtggataagaccaccagttgctgctttggcgggaaaaattatagtgagatgtacgtgacctgtgcccgcgacggcatggatcctgagggcctgctgaggcaacctgaagcaggcgggatctttaaaatcactggtttaggagttaaaggcatcgcaccttactcttacgccggatag

SEQ ID NO: 296149 - DNA, 684 bp, Artificial Sequence
  derived and/or modified sequence
atgagcagcatcaagattgaatgtgtgctgcctgagaactgccgctgtggggagagccctgtgtgggaggaggtgagcaacagcctgctgtttgtggacatcccagccaagaaggtgtgccgctgggacagcttcaccaagcaggtgcagagggtgaccatggatgcccctgtgtcctctgtggccctgcggcagagcggcggctacgtggccaccatcggcaccaagttctgtgccctgaactggaaggagcagagcgctgtggtgctggccaccgtggacaatgacaagaagaacaaccgcttcaatgatggcaaggtggaccctgctggccgctactttgctgccaacagaagatctgtgtacaagctggagaaggaggagcagatcccagatggcatgtgcattgatgctgagggcaagctgtgggtggcctgctacaacggcggccgggtcatccggctggaccctgtgacaggcaagaggctgcagacagtgaagctgcctgtggacaagaccaccagctgctgcttcggcggcaagaactacagcgagatgtatgtgacctgtgccagagatggcatggaccctgagggcctgctgcggcagcctgaggccggcggcatcttcaagatcaccggcctgggcgtgaagggcatcgccccctacagctatgccggctag

SEQ ID NO: 296150 - DNA, 684 bp, Artificial Sequence
  derived and/or modified sequence
atgagcagcatcaagatcgagtgcgtgctgcccgagaactgccggtgtggcgagtccccagtatgggaggaagtatccaattcgcttctcttcgttgatattcctgccaagaaggtttgccggtgggattctttcaccaaacaagttcagcgcgtgacaatggatgccccagtgtctagcgttgctctacgccagtccggcggctacgtagcaacaattgggaccaaattttgtgcgcttaactggaaggagcagtccgctgtcgtcctcgctaccgtagataacgacaaaaagaacaacaggtttaacgatggcaaggtcgatcctgccggacggtatttcgctgcgaaccgtaggtctgtgtacaaactggaaaaagaagagcagatacccgacggtatgtgtattgacgcggaaggcaagttatgggtggcttgctataatggaggccgtgtcatcaggctggaccccgttactggaaaaagactgcaaacggtgaagctccccgtggataaaacaacgtcctgttgcttcggcggaaagaattattccgagatgtacgtaacctgcgcacgtgatggtatggatccagaggggctgctgagacagccagaggcaggcggcatcttcaaaataactgggcttggcgtgaaaggaatcgccccctattcctatgcgggatag

SEQ ID NO: 296151 - DNA, 684 bp, Artificial Sequence
  derived and/or modified sequence
atgagctcgattaaaatagagtgcgtgcttcccgaaaattgcaggtgtggcgagagcccggtctgggaggaagtgtctaattctctactgttcgtggatatccctgccaaaaaggtttgtaggtgggacagcttcaccaaacaggtccaacgggtgactatggatgcgcctgtgtctagtgtggccctccgccagtccggcggttacgtggcaactatcggtaccaagttctgcgcactaaactggaaagaacagtcggccgtggtgctcgcaacagtcgacaacgacaaaaagaacaatcggttcaacgatggcaaggtggatccagccggtcggtacttcgccgcaaacagaagatctgtttacaagctggaaaaggaagaacagatccccgatggaatgtgtatcgacgccgaaggaaaactttgggtcgcatgttacaatggaggaagggttatcagactcgacccggtgactggcaagcgcctgcagaccgtgaaattgccggtcgacaagaccacaagctgttgctttggaggaaagaattactccgaaatgtatgtgacctgtgcaagagacggtatggatcctgagggcctactgaggcagccagaggctggcggtatttttaaaatcacagggttgggggtcaaaggcattgccccttactcttacgcgggatag

SEQ ID NO: 296152 - DNA, 2019 bp, Artificial Sequence
  derived and/or modified sequence
gtgcccgagccaggccggcctccccgccccctccctggaaaggaaaggccccggcgacaacagagccagacccgctcatcccgatctcccagaaggcgactgacagctgactgccagaaggagatcgcgccaggagactgactgctctgtgcccacccggggacccgggcccgttcagccgggctggctggtgcgccctctgcaaagcctgcgccagggaggaggcaggctcaaccttcagattcccagggcctctctgtcgctgtcgccgtcgccgtcgcccgaggtcccagcggctctaccagattgttgtggaggcctctcacccgcacagataatttttctctgtcttctcccagttcgctggtcatggtctctggcctaaagtcccagcatagactgttcctctcctgtggagtctaacactctttgccaaactggcacggtgtcttcctgggaagcaagaaatcactgagggcctgtcagttcctgccagggtggttcgatgctgtccttttctccactccttccatggtctgcgttggaaaatgtgtgttagttcgaattcagcgagttctcattggggtgaacatagtcctaaaaatgcagttcataaaaatcaaccacacagagaagaaaaataaataaatcagtaaagcagctcagaaaaatgcaggtgtggcgggccctggcctctgcaccctcatagaggggctcaacagcatcaacagaaggtgggggagcagaaggtgccctgcagacacccagaggggccaccaatgagcaaactgccagctccctgacccgccctggggcccagggtattgacataaaggacggccttgcactatttcaacagccagttctctgagggtcacaaacaccaaggagtggaggtcagagtgtcacttttttgttttctttttgaaagatcattcgagaaacacgtcactgatctcccctgcgaccatgtcttccattaagattgagtgtgttttgccagagaactgccggtgtggtgagtctccagtatgggaggaagtgtccaactctctgctctttgtagacattcctgcaaaaaaggtttgccggtgggattcattcaccaagcaagtacagcgagtgaccatggatgccccagtcagctccgtggctcttcgccagtcgggaggctatgttgccaccattggaacaaagttctgtgctttgaactggaaagaacaatcagcagttgtcttggccacggtggataacgacaagaaaaacaatcgcttcaatgatgggaaggtggatcccgccgggaggtactttgctgccaaccgcagaagtgtttacaagctagaaaaggaagaacaaatcccagatggaatgtgtattgatgctgaggggaagctctgggtggcctgttacaatggaggaagagtgattcgtttagatcctgtgacagggaaaagacttcaaactgtgaagttgcctgttgataaaacaacttcatgctgctttggagggaagaattactctgaaatgtatgtgacctgcgcccgggatgggatggaccccgagggtcttttgaggcaacctgaagctggtggaattttcaagataactggtctgggggtcaaaggaattgctccctactcctatgcgggatgaggacaggtcttctttcctgccagagggagctctgaagacaactagagaattctgggcctgaaatttcaatctagttagaaagaaaaatgaggcaatgattttattaacagcgttaagttttaatttacaacttttaaaaggcagagcatttttaacaaggggtgacaggtggttttgataacacacttataaggctttctgtaaaaggtactatagaagggcgaagaatcgttcaactgtcaatcagcctcttgattctttgtaaattgccagggtgggtgggtacatatctcttcttgattctgcatttcatacttaactatattaaagcttcaaggaacaataaatagtaacctggtaatgacc

SEQ ID NO: 296153 - DNA, 684 bp, Artificial Sequence
  derived and/or modified sequence
atgagcagcatcaagatcgagtgcgtgctgcccgagaactgcagatgcggcgagagccccgtgtgggaggaggtgagcaacagcctgctgttcgtggacatccccgccaagaaggtgtgcagatgggacagcttcaccaagcaggtgcagagagtgaccatggacgcccccgtgagcagcgtggccctgagacagagcggcggctacgtggccaccatcggcaccaagttctgcgccctgaactggaaggagcagagcgccgtggtgctggccaccgtggacaacgacaagaagaacaacagattcaacgacggcaaggtggaccccgccggcagatacttcgccgccaacagaagaagcgtgtacaagctggagaaggaggagcagatccccgacggcatgtgcatcgacgccgagggcaagctgtgggtggcctgctacaacggcggcagagtgatcagactggaccccgtgaccggcaagagactgcagaccgtgaagctgcccgtggacaagaccaccagctgctgcttcggcggcaagaactacagcgagatgtacgtgacctgcgccagagacggcatggaccccgagggcctgctgagacagcccgaggccggcggcatcttcaagatcaccggcctgggcgtgaagggcatcgccccctacagctacgccggctag

SEQ ID NO: 296154 - protein, 257 aa, Artificial Sequence
  derived and/or modified sequence
MVDMDKLINNLEVQLNSEGGSMQVFKQVTASVRNRDPPEIEYRSNMTSPTLLDANPMENPALFNDIKIEPPEELLASDFSLPQVEPVDLSFHKPKAPLQPASMLQAPIRPPKPQSSPQTLVVSTSTSDMSTSANIPTVLTPGSVLTSSQSTGSQQILHVIHTIPSVSLPNKMGGLKTIPVVVQSLPMVYTTLPADGGPAAITVPLIGGDGKNAGSVKVDPTSMSPLEIPSDSEESTIESGSSALQSLQGLQQEREAL

SEQ ID NO: 296155 - DNA, 774 bp, Artificial Sequence
  derived and/or modified sequence
atggtggacatggataagctgattaacaatttggaggtacagctaaattcggagggtgggagcatgcaggtgttcaagcaggtgacagcttcggtgcgtaaccgcgatcctccagagatagagtatcggtcaaacatgacaagccccaccctgttggacgcaaacccaatggaaaaccccgccctgtttaatgacataaagatcgagcctcctgaggaattgttagcctctgattttagcctgccacaggtggagcccgtagacttgtccttccataaacccaaagctcctctgcagcccgccagtatgttacaggcgcctattagacctcccaaaccccaaagcagtccgcagacgttagttgtcagtacctccaccagtgacatgagtacaagtgcgaatattcccaccgtcttgacaccaggctccgtgttgacaagttcgcagtcaactggcagtcagcagatcctccatgtgatccacaccattcctagcgtttctctgcccaacaagatgggagggttaaagaccattcccgtcgttgtgcagtctctgcccatggtgtataccacgctccctgccgacggcggccccgcggcaattactgtacccctgattgggggtgatggtaagaacgcggggtccgttaaagtggaccctacctcaatgagcccccttgagattccatctgatagtgaggaaagcaccattgaatctggtagctcagcactccagtccttgcaaggtctccagcaggagagagaggcactctag

SEQ ID NO: 296156 - DNA, 4821 bp, Artificial Sequence
  derived and/or modified sequence
tcctttgggcctagcagggccagagaaagacggaatcactctacccactcaggttgcccagagagcactttaggttctgactcgcgtggggcgcgaggtaccccgtggggcagctaggtgcctccaagaaaccccgccccagaggacccgcacgagttgctgccatttttcgctgaagcccctgccctggggctggtgttcttctctatgattctaccaatcgtcggcatttttttcctcccttctttctttttaggaaggcgctggggtgtgcggcggcaacggcggcggtgaagggatcctcttgtgcccggagaaataggggagtgggggcccaagaacgagaagacgagaacgcgtcgccctgcgctatgtcagaatggggcgggtgtgaggggaacagctctcttgcgatcagctcaggagtatgagcctcccggaggacggcatgagttctggacacttcaggagtcctcagctagtgacatggtcgatatggataaactcataaacaacttggaggtccaacttaattcagaaggtggctcaatgcaggtattcaagcaggtcactgcttctgttcggaacagagatccccctgagatagaatacagaagtaatatgacttctccaacactcctggatgccaaccccatggagaacccagcactgtttaatgacatcaagattgagcccccagaagaacttttggctagtgatttcagcctgccccaagtggaaccagttgacctctcctttcacaagcccaaggctcctctccagcctgctagcatgctacaagctccaatacgtccccccaagccacagtcttctccccagacccttgtggtgtccacgtcaacatctgacatgagcacttcagcaaacattcctactgttctgaccccaggctctgtcctgacctcctctcagagcactggtagccagcagatcttacatgtcattcacactatcccctcagtcagtctgccaaataagatgggtggcctgaagaccatcccagtggtagtgcagtctctgcccatggtgtatactactttgcctgcagatgggggccctgcagccattacagtcccactcattggaggagatggtaaaaatgctggatcagtgaaagttgaccccacctccatgtctccactggaaattccaagtgacagtgaggagagtacaattgagagtggatcctcagccttgcagagtctgcagggactacagcaagagagagaagccttataaatgcacctgggatggctgctcctggaaatttgctcgctcagatgagctcactcgccatttccgcaagcacacaggcatcaagccttttcggtgcacagactgcaaccgcagcttttctcgttctgaccacctgtccctgcatcgccgtcgccatgacaccatgtgagccgcacaggtcacactagagaagctgcgctggtatctttcctggtcgtgtgctgaggttgggacaattttttcctctttgacttcagcttgcatatggggttgaagcagcccactgagccaagttgaggagactggaggaaaagagagctggtctcccgtggggctcttcatattctaccttcacttctccactgtccagacccgtttttttcaacctccacatgggttgaattccagtgtggcacccatggctgccttcccatccccccctgctctgaaataggacatttttcctacagtaacaaaacaggaatcaaactcaaggctgtgaacaaacatacgctgctttattctttccaatttttctcttgttttctagaactcttatccatatgtttttaaaataagtacctaaaagtggtttgatagtgtcctaaacgacttttttaacttcctaaatggaaagagcataacaatgtagttgattggtaagatttacagggatttggtttctgagtttgaggcacattcccagtgaataagctgagtcccataccacactcaaaaggttttaataaatctaatcctatttcttcttaaagtttggttttcagacagtgctggtgcttctgcttcttaagttcatcaagggaatgaggagttcttgtccttctcctcctcttttttttcttttccactttctccttcaggattaaagattttgctgcacaattgttatttgttaggttaaatttggacaaatattcaaagcacacatagacatataagtaaggagaaaaatgttccaggagagtaggttgggcagtgacaggaacaaacagacctaggatgatcctgagaacaaatagaggggttcctttacttgtataggatatcaaaagtgctgttaatcacaaacctcattcaaatggcaggctgtcgagacagtgtcttgaggggctggctgtactgtttattttttcgtttacacaaagaagcaattgagtatattgcatgatgagaaatcacacactagggtcatgttatacagaagtaaggggttggaaaaatggaatgttgttcactccatggaattattggcattcattcctgtgtttcaaatgaaacatagatgcttttcatgaaaactgacctacaaaaagcaatttgatgttctgcaactgctatgaaaacctaagccatttattttagctgatagcagattgcataatatactcatttagctgcccaatcagattgttttataatattacctggggtacaaaatcctctgttcctggccctggaccacagatctacctccacatggcatatttcctttctggggtcaggggtaggggagggggctttgcatcacttgaatttagactcagcctctctttaaaagattgtctttatattgaacacctttttcttttcaaccctgcttgaatactttaggttactatttcctgaggctgtccattctcactatattgtagaattctagcaccaagaagggatcccgttaaccatctagtcctatccatccctcatattttacagatgagacaaatacgggtcagatttttttctccagatgtttctttgagcccttatacacctgcacgcttattctcctggggatcacataattttatttatttattttttgagagacggtttcactccatcacccaggctggagtgcagtggcgtaatcttggctcactgcaacctccgcctcctgggttcaagtgattctcctgcctcagcctcccaaatagcttggattacaggtgcgtgccaccacacctagctaagttttgtattattagtagagatggggtttcgccatgttggccaggctggtctcaaactcctgacctcaagtgatccccccacctcggcctcccaaagtgctgggatcacaggtgtgagtcaccacacctggccaggatcacattattaaaccaaattaaagtttatgtgattggttgcaatatttgtctaattttatatgttttcttcaggaaaactttagaactcaaaaatcatttacagctgattaaatagcaagtaaaatgtacttgtggtcattgccgtataacattaggcacacgcttctaacacttctataatatctagattttatttacctcattttaacttgcaatgtctgtctatctcatgaactctccataaatccaagaactgcctgtagttttcaaaatgacatgtgggtttttactgttatcattgttatttcgatagggctttttcctgattttgggtatacaagttccaaacttgcataataattgctaacgcactaggcgatatctagggccagtctgttaaaggggacctctaatgtagctataagacaggttggtaaagatgaactaacataagtttaagctaataattcagtagttgatgcagtatttcacagtagagcccgagcttactcatttttttcaaaatttggatcctgatactcctttttcagagttcagaactgaactgctcccctaagacctcagaatcttttgcattgagacatatgatctatttataaataaaggttatcaaatatcttgttgaactaattaggttgatcaaattaggatcccaaatattggggtccctgacatctgagcctttatctaaaaatgtttctgtaacataatgacagcctttatgtttgttaattgcctatagtaaagaagcaattttaagcctattctcatttccctctcccctacaaaaaatgataaaagctttccaattacttacatatgctctaacaagtgtctcaggattcattaacagaattttatagagtacagtaattcaaatatagcacagtacagagtttaccaaaaacacataaaactttgctagatagacagtgaggtggaaaggaactaaaatgtatctctcttgaatagcatttggggttcaattgaatttgttgtgtttacaacagcaaagcaccgttagcctggacagttgcttatggcatcgatagggttggataatattctgggatttgttgcagcagaattcctctatctgatgatcagcagttgaacataaacttcataattatagtaaaatttaggaaaaactatgagtgtgaagagtatgaactgattgggtagattaggcagagtgcattatgggcaagacaaaggttttcgatattaacttcttttaaaataaactttttattttcaaacagtttcagttttacagaaaaaatgtgaagctagtacagagaggtctcatttaccccacacccagtttctcctgttattagcatctcacattaatatgtggtatatttgttacaattaataaaacacattgatatgttaatattattaa

SEQ ID NO: 296157 - DNA, 774 bp, Artificial Sequence
  derived and/or modified sequence
atggtggacatggacaagctgatcaacaacctggaggtgcagctgaacagcgagggcggctccatgcaggtgttcaagcaggtgacagcctctgtgaggaacagagatcctcctgagattgagtaccgcagcaacatgaccagccccaccctgctggatgccaaccccatggagaacccagccctcttcaatgacatcaagattgagcccccagaggagctgctggccagtgacttcagcctgccccaggtggagcctgtggacctgtccttccacaagcccaaggcccccctgcagcctgcctccatgctgcaggcccccatccggccccccaagccccagagcagcccccagaccctggtggtgtccaccagcaccagtgacatgagcaccagcgccaacatccccaccgtgctgaccccaggctctgtgctgaccagcagccagagcacaggcagccagcagatcctgcacgtgatccacaccatccccagcgtgtccctgcccaacaagatgggcggcctgaagaccatccctgtggtggtgcagagcctgcccatggtgtacaccaccctgcctgcagatggcggccctgctgccatcaccgtgcccctgattggaggagatggcaagaatgccggctctgtgaaggtggaccccacctccatgagccccctggagatccccagcgacagcgaggagagcaccattgaaagtggcagcagcgccctgcagagcctgcagggcctgcagcaggagcgggaggccctgtag

SEQ ID NO: 296158 - DNA, 774 bp, Artificial Sequence
  derived and/or modified sequence
atggtggacatggacaagctgatcaacaacctggaggtgcagctgaactccgaaggtggctcaatgcaggtctttaagcaagtgaccgccagtgtgagaaatagggatccgcccgagatcgagtaccgctctaacatgacatctccaacactgcttgacgcaaaccctatggagaatccggctctgtttaacgacatcaagatcgagcctcctgaagagctcctcgcttcagatttcagcctcccgcaggtggagcccgtcgacctgtcttttcacaaacccaaagcccccttacagccggcttcaatgttacaggcgcccatccgaccccccaaaccacaatcctccccccaaactctcgtggtctccacatctacgagtgacatgagcacaagcgccaacattcctactgtcctgacaccagggagcgtgctgaccagctctcagtcaactggctctcagcaaatcctgcatgtaatccacactataccatctgtgtctttgcccaataagatgggcggtttaaagactatacccgtcgttgtccaatcactccctatggtctacactactctccccgctgatgggggccccgctgccatcaccgtgccactcataggaggcgatggcaagaacgcaggcagcgtcaaggtagaccccacgagcatgagccccctcgagattccttccgattcggaggagtcgactatcgagtcgggcagcagtgctctccagtccttacagggtttgcaacaggagagagaagctctgtag

SEQ ID NO: 296159 - DNA, 774 bp, Artificial Sequence
  derived and/or modified sequence
atggtcgacatggataaattgattaacaaccttgaagttcagctcaatagcgagggcggatctatgcaggtctttaagcaggtgacagcctctgtgcggaaccgcgatcctccagaaatcgaatatagatctaatatgacctccccaacactactggatgcaaatccaatggaaaatccggcactcttcaatgatatcaagatcgagccaccagaggagctattggcgtccgattttagcctgccccaggtcgaaccagtagacctcagctttcataagccgaaagcccctcttcagccggcatcaatgctgcaggctcccattaggccaccaaagccacagtcatctccccagaccctcgtggtttccacttccacatcagatatgagcacctccgcaaatatccctaccgtgctgaccccaggcagcgtactgacttcttcgcagtccacgggctcccagcagatcctacacgtgatacacacaatcccctccgttagcctgcccaacaagatgggcggactgaaaaccattcctgtggtcgttcagtctctgcctatggtatacaccactttaccggcagatggaggaccggctgcaatcacagtgcctctgatcggcggagatggtaagaacgctggttctgtgaaggtcgaccctacgagcatgtcacctctagaaatcccctcggacagcgaggagtcgaccatcgagtcaggttcctccgctttgcaatccctccaggggcttcaacaggaaagggaagctttgtag

SEQ ID NO: 296160 - DNA, 774 bp, Artificial Sequence
  derived and/or modified sequence
atggtggacatggacaagctgatcaacaacctggaggtgcagctgaacagcgagggcggcagcatgcaggtgttcaagcaggtgaccgccagcgtgagaaacagagacccccccgagatcgagtacagaagcaacatgaccagccccaccctgctggacgccaaccccatggagaaccccgccctgttcaacgacatcaagatcgagccccccgaggagctgctggccagcgacttcagcctgccccaggtggagcccgtggacctgagcttccacaagcccaaggcccccctgcagcccgccagcatgctgcaggcccccatcagaccccccaagccccagagcagcccccagaccctggtggtgagcaccagcaccagcgacatgagcaccagcgccaacatccccaccgtgctgacccccggcagcgtgctgaccagcagccagagcaccggcagccagcagatcctgcacgtgatccacaccatccccagcgtgagcctgcccaacaagatgggcggcctgaagaccatccccgtggtggtgcagagcctgcccatggtgtacaccaccctgcccgccgacggcggccccgccgccatcaccgtgcccctgatcggcggcgacggcaagaacgccggcagcgtgaaggtggaccccaccagcatgagccccctggagatccccagcgacagcgaggagagcaccatcgagagcggcagcagcgccctgcagagcctgcagggcctgcagcaggagagagaggccctgtag

SEQ ID NO: 296161 - protein, 1478 aa, Artificial Sequence
  derived and/or modified sequence
MEAGSGPPGGPGSESPNRAVEYLLELNNIIESQQQLLETQRRRIEELEGQLDQLTQENRDLREESQLHRGELHRDPHGARDSPGRESQYQNLRETQFHHRELRESQFHQAARDVGYPNREGAYQNREAVYRDKERDASYPLQDTTGYTARERDVAQCHLHHENPALGRERGGREAGPAHPGREKEAGYSAAVGVGPRPPRERGQLSRGASRSSSPGAGGGHSTSTSTSPATTLQRNVEGDAPGSDLSTAVDSPGSQPPYRLSQLPPSSSHMGGPPAGVGLPWAQRARLQPASVALRKQEEEEIKRSKALSDSYELSTDLQDKKVEMLERKYGGSFLSRRAARTIQTAFRQYRMNKNFERLRSSASESRMSRRIILSNMRMQFSFEEYEKAQNPAYFEGKPASLDEGAMAGARSHRLERGLPYGGSCGGGIDGGGSSVTTSGEFSNDITELEDSFSKQVKSLAESIDEALNCHPSGPMSEEPGSAQLEKRESKEQQEDSSATSFSDLPLYLDDTVPQQSPERLPSTEPPPQGRPEFWAPAPLPPVPPPVPSGTREDGSREEGTRRGPGCLECRDFRLRAAHLPLLTIEPPSDSSVDLSDRSDRGSVHRQLVYEADGCSPHGTLKHKGPPGRAPIPHRHYPAPEGPAPAPPGPLPPAPNSGTGPSGVAGGRRLGKCEAAGENSDGGDNESLESSSNSNETINCSSGSSSRDSLREPPATGLCKQTYQRETRHSWDSPAFNNDVVQRRHYRIGLNLFNKKPEKGIQYLIERGFLSDTPVGVAHFILERKGLSRQMIGEFLGNRQKQFNRDVLDCVVDEMDFSSMDLDDALRKFQSHIRVQGEAQKVERLIEAFSQRYCVCNPALVRQFRNPDTIFILAFAIILLNTDMYSPSVKAERKMKLDDFIKNLRGVDNGEDIPRDLLVGIYQRIQGRELRTNDDHVSQVQAVERMIVGKKPVLSLPHRRLVCCCQLYEVPDPNRPQRLGLHQREVFLFNDLLVVTKIFQKKKILVTYSFRQSFPLVEMHMQLFQNSYYQFGIKLLSAVPGGERKVLIIFNAPSLQDRLRFTSDLRESIAEVQEMEKYRVESELEKQKGMMRPNASQPGGAKDSVNGTMARSSLEDTYGAGDGLKRGALSSSLRDLSDAGKRGRRNSVGSLDSTIEGSVISSPRPHQRMPPPPPPPPPEEYKSQRPVSNSSSFLGSLFGSKRGKGPFQMPPPPTGQASASSSSASSTHHHHHHHHHGHSHGGLGVLPDGQSKLQALHAQYCQGPGPAPPPYLPPQQPSLPPPPQQPPPLPQLGSIPPPPASAPPVGPHRHFHAHGPVPGPQHYTLGRPGRAPRRGAGGHPQFAPHGRHPLHQPTSPLPLYSPAPQHPPAHKQGPKHFIFSHHPQMMPAAGAAGGPGSRPPGGSYSHPHHPQSPLSPHSPIPPHPSYPPLPPPSPHTPHSPLPPTSPHGPLHASGPPGTANPPSANPKAKPSRISTVV

SEQ ID NO: 296162 - DNA, 912 bp, Artificial Sequence
  derived and/or modified sequence
atggatacctatagccatcaggcactcaaaacaggttccttccagaaagccaaattcaacatcaccggggcatgcctgaatgattccgacgacgattctcctgacctcgacttagacgggaatgagagccctctggcactcctgatgagcaacggaagtaccaagcgtgttaagtcactgagcaaatccaggaggactaagatcgctaaaaaggttgataaggcgagattgatggctgaacaggtaatggaggacgagttcgacttggacagcgacgatgaactccaaatcgacgaacgtctagggaaagaaaaagctacattaattatccgaccaaagtttcccaggaagctcccgagggccagtctggctctcacacctactgaatttgttaaccaggagaagctgtcccttacgcttaggcgcacaattcagcaaatgagaacttggtggaaaggactgaaggcgtctctgggcatggtggtggccctggttgcattcctcatttgctcccggcctgctggacggtggggcgatttaaccatgctgccttctccccgcccccagctgctgccggcccttcgaaggccgagtcgcgcctgttgtgcttggcctacctgctcaccccacaggccgcacagattacccctggcatgtcgacccggcggtctgggagacaggattgaagcagtaggtgccccggcggtgggctgggctcagtgcctcaccgtcctgctcccatcagctcctcagggtagcggacctagttctgggcaacacaccggtgaaccaagggcccgtcgaaggcgccgaacacctgtttggatgaaccggacagcgtgggaacgggcatctcgaatgcaatccatttctattctccattggtccctgatgatgatgaccctgctctag

SEQ ID NO: 296163 - DNA, 447 bp, Artificial Sequence
  derived and/or modified sequence
atgaacaggtccagagcaattgtgcagcgagggcgggtgctgcccccacccgcaccacttgacactactaacttagcaggcaggcggacactgcaagggagggcaaagatggcctccgtgcccgtctactgcctctgtaggctgccatatgatgtcacgcgcttcatgatagaatgcgatatgtgtcaagattggtttcacggaagctgtgtgggagtcgaagaagagaaggcagctgatatcgacttgtatcactgccctaactgcgaggtcctgcacggaccatctattatgaagaaaaggcggggctccagtaaaggacacgatacccacaagggcaaacctgtaaagaccggctctcccaccttcgttcgggagctgcgttcaaggacattcgattcctctgacgaggtcatcctgaaaccgacaggaaaccaactcacgtag

SEQ ID NO: 296164 - DNA, 912 bp, Artificial Sequence
  derived and/or modified sequence
atggacacctacagccaccaggccctgaagacaggcagcttccagaaggccaagttcaacatcaccggggcctgcctgaatgacagtgatgatgacagcccagacctggacctggatggaaatgaaagccccctggccctgctgatgagcaatggcagcaccaagagggtgaagagcctgagcaagagcaggaggaccaagatcgccaagaaggtggacaaggcccggctgatggccgagcaggtgatggaggatgaatttgacctggacagtgatgatgagctgcagattgatgagcggctgggcaaggagaaggccaccctcatcatccggcccaagttccccaggaagctgccccgggccagcctggccctgacccccacagaatttgtgaaccaggagaagctgagcctgaccctgcggaggaccatccagcagatgaggacctggtggaagggcctgaaggccagcctgggcatggtggtggccctggtggccttcctgatctgcagcaggcctgctggccgctggggagacctgaccatgctgcccagcccccggccccagctgctgcctgccctgcggcggcccagccgggcctgctgtgcctggcccacctgcagcccccaccggccccaccggctgcccctggcctgcaggcctgggggcctgggggaccgcatcgaggccgtgggcgccccagctgtgggctgggcccagtgcctgactgtgctgctgcccagcgccccccagggcagcggccccagcagcggccagcacactggagagccccgggccaggagaagaagaaggacccctgtgtggatgaacagaacagcctgggagcgggccagcaggatgcagagcatcagcatcctgcactggagcctgatgatgatgaccctgctgtag

SEQ ID NO: 296165 - DNA, 447 bp, Artificial Sequence
  derived and/or modified sequence
atgaacagaagccgggccatcgtgcagaggggccgggtgctgcccccaccagcccccctggacaccaccaacctggccggccgccgcaccctgcagggccgggccaagatggcctctgtgcctgtgtactgcctgtgccgcctgccctatgatgtgacccgcttcatgattgaatgtgacatgtgccaggactggttccacggcagctgtgtgggcgtggaggaggagaaggctgctgacatcgacctgtaccactgccccaactgtgaggtgctgcacggccccagcatcatgaagaagagaagaggcagcagcaagggccatgacacccacaagggcaagcctgtgaagacaggcagccccacctttgtgcgggagctgcggagcaggacctttgacagcagtgatgaggtgatcctgaagcccactggaaaccagctgacctag

SEQ ID NO: 296166 - DNA, 447 bp, Artificial Sequence
  derived and/or modified sequence
atgaaccggagccgggccatcgtgcagcggggccgggtgctgcccccgcccgccccccttgacactacaaatctggcaggccggagaactctgcagggccgcgccaagatggccagcgtccccgtttattgtctctgtcggctgccttatgatgtcaccaggttcatgatcgagtgcgatatgtgccaggactggttccacggatcctgtgtcggggtggaggaagagaaggccgctgacatcgatttatatcattgccctaattgcgaagtgctgcacggccctagcatcatgaagaaacggagaggatcttctaagggacacgatactcacaagggtaaaccagtcaaaacgggctccccaacctttgtgagggaactccggagcaggacctttgatagcagtgatgaagtcatcctgaaacctactgggaaccagctgacttag

SEQ ID NO: 296167 - DNA, 687 bp, Artificial Sequence
  derived and/or modified sequence
gcgacccagcggggggctcgaggggaaggcgagcgaggttcccggcggtacggggactatcccagaattcgacgcgcgtcgccgtaggggccggaactaccggacgagcctccgctgaggcgcttcgcagtcccggagctagcccggctgccggcgtgtcgctggggctgagctccgcgggcgtggagtccttgcagcccaaagcatgaggaggtccctgtaggattctggactgaagacgttcttgtcagctatcgtccagagaggacgcgtgctgccgcctcccgcccctcttgacacgacgaacctggccggccgcagaacgctccagggccgagcgaagatggcctcggtgccggtgtattgcctctgccggctgccttacgatgtgacccgcttcatgatcgagtgtgacatgtgccaggactggtttcatggcagttgtgttggtgttgaagaggagaaggctgctgacattgacctctaccactgccccaactgtgaagtcttgcatgggccctccattatgaaaaaacgccgtggatcttcaaaggggcatgatacacacaaggggaaaccagtgaagaccgggagccctacgttcgtcagagagctccggagtaggacttttgacagctcagatgaagtgattctgaagcccactggaaatcaactgaccgtggaatt

SEQ ID NO: 296168 - DNA, 565 bp, Artificial Sequence
  derived and/or modified sequence
gaaagaaattctaagggccgggtggactttctctggttgccccctacagccgcaccagctgtgttgcatcccggcggcgtgttatttgtgcctagctatcgtccagagaggacgcgtgctgccgcctcccgcccctcttgacacgacgaacctggccggccgcagaacgctccagggccgagcgaagatggcctcggtgccggtgtattgcctctgccggctgccttacgatgtgacccgcttcatgatcgagtgtgacatgtgccaggactggtttcatggcagttgtgttggtgttgaagaggagaaggctgctgacattgacctctaccactgccccaactgtgaagtcttgcatgggccctccattatgaaaaaacgccgtggatcttcaaaggggcatgatacacacaaggggaaaccagtgaagaccgggagccctacgttcgtcagagagctccggagtaggacttttgacagctcagatgaagtgattctgaagcccactggaaatcaactgaccgtggaattcctggaagaaaatagcttcagtgtgcccatcctg

SEQ ID NO: 296169 - DNA, 555 bp, Artificial Sequence
  derived and/or modified sequence
gtgtgaaagaaattctaagggccgggtggactttctctggttgccccctacagccgcaccagctgtgttgcatcccggcggcggtaactctattggagaactgagggttggtgcaagggggtggggggcgggggctgattcactctgtaaaaagtgttatttgtgcctagctatcgtccagagaggacgcgtgctgccgcctcccgcccctcttgacacgacgaacctggccggccgcagaacgctccagggccgagcgaagatggcctcggtgccggtgtattgcctctgccggctgccttacgatgtgacccgcttcatgatcgagtgtgacatgtgccaggactggtttcatggcagttgtgttggtgttgaagaggagaaggctgctgacattgacctctaccactgccccaactgtgaagtcttgcatgggccctccattatgaaaaaacgccgtggatcttcaaaggggcatgatacacacaaggggaaaccagtgaagaccgggagccctacgttcgtcagagagctccggagtaggacttttgacag

SEQ ID NO: 296170 - DNA, 555 bp, Artificial Sequence
  derived and/or modified sequence
atatatgtagagaaatgaattggaaaagatcctgctgaggttccctctagagagggggaagaaccaacaacgcagagaccgtgggaaagagcccagcctatcgaaggtgctcaatgaacaggagccgcgagaggacgcgtgctgccgcctcccgcccctcttgacacgacgaacctggccggccgcagaacgctccagggccgagcgaagatggcctcggtgccggtgtattgcctctgccggctgccttacgatgtgacccgcttcatgatcgagtgtgacatgtgccaggactggtttcatggcagttgtgttggtgttgaagaggagaaggctgctgacattgacctctaccactgccccaactgtgaagtcttgcatgggccctccattatgaaaaaacgccgtggatcttcaaaggggcatgatacacacaaggggaaaccagtgaagaccgggagccctacgttcgtcagagagctccggagtaggacttttgacagctcagatgaagtgattctgaagcccactggaaatcaactgaccgtggaattc

SEQ ID NO: 296171 - DNA, 475 bp, Artificial Sequence
  derived and/or modified sequence
agtgagagatgaaagaagcttcccgaaaaggcttcaggtattttcttgaaacccggaaagaagttatcactgacaacggggccgaagaagctatcgtccagagaggacgcgtgctgccgcctcccgcccctcttgacacgacgaacctggccggccgcagaacgctccagggccgagcgaagatggcctcggtgccggtgtattgcctctgccggctgccttacgatgtgacccgcttcatgatcgagtgtgacatgtgccaggactggtttcatggcagttgtgttggtgttgaagaggagaaggctgctgacattgacctctaccactgccccaactgtgaagtcttgcatgggccctccattatgaaaaaacgccgtggatcttcaaaggggcatgatacacacaaggggaaaccagtgaagaccgggagccctacgttcgtcagagagctccggagtaggacttttgacag

SEQ ID NO: 296172 - DNA, 534 bp, Artificial Sequence
  derived and/or modified sequence
aaaagatcctgctgaggttccctctagagagggggaagaaccaacaacgcagagaccgtgggaaagagcccagcctatcgaaggtgctcaatgaacaggagccgcgctatcgtccagagaggacgcgtgctgccgcctcccgcccctcttgacacgacgaacctggccggccgcagaacgctccagggccgagcgaagatggcctcggtgccggtgtattgcctctgccggctgccttacgatgtgacccgcttcatgatcgagtgtgacatgtgccaggactggtttcatggcagttgtgttggtgttgaagaggagaaggctgctgacattgacctctaccactgccccaactgtgaagtcttgcatgggccctccattatgaaaaaacgccgtggatcttcaaaggggcatgatacacacaaggggaaaccagtgaagaccgggagccctacgttcgtcagagagctccggagtaggacttttgacagctcagatgaagtgattctgaagcccactggaaatcaactgacc

SEQ ID NO: 296173 - DNA, 2921 bp, Artificial Sequence
  derived and/or modified sequence
ataatagagggagccctgtgaaacaggggtcagctaggggagggttcagtgagagatgaaagaagcttcccgaaaaggcttcagctatcgtccagagaggacgcgtgctgccgcctcccgcccctcttgacacgacgaacctggccggccgcagaacgctccagggccgagcgaagatggcctcggtgccggtgtattgcctctgccggctgccttacgatgtgacccgcttcatgatcgagtgtgacatgtgccaggactggtttcatggcagttgtgttggtgttgaagaggagaaggctgctgacattgacctctaccactgccccaactgtgaagtcttgcatgggccctccattatgaaaaaacgccgtggatcttcaaaggggcatgatacacacaaggggaaaccagtgaagaccgggagccctacgttcgtcagagagctccggagtaggacttttgacagctcagatgaagtgattctgaagcccactggaaatcaactgaccgtggaattcctggaagaaaatagcttcagtgtgcccatcctggtcctgaagaaggatgggttgggcatgacgctgccctcgccatcattcactgtgagggatgttgaacactatgttggttctgacaaagagattgatgtgattgatgtgacccgccaggctgactgcaagatgaagcttggtgattttgtgaaatactattacagcgggaagagggagaaagtcctcaatgtcattagtttggaattctctgataccagactttctaaccttgtggagacaccgaagattgttcgaaagctgtcatgggtcgaaaacttgtggccagaggaatgtgtctttgagagacccaatgtacagaagtactgcctcatgagtgtgcgagatagctatacagactttcacattgactttggtggcacctctgtctggtaccatgtactcaagggtgaaaagatcttctacctgatccgcccaacaaatgccaatctgactctctttgagtgctggagcagttcctctaatcagaatgagatgttctttggggaccaggtggacaagtgctacaagtgttccgtgaagcaaggacagacacttttcattcccacagggtggatccatgctgtgctgacgcctgtggactgccttgcctttggagggaacttcttacacagccttaacatcgagatgcagctcaaagcctatgagattgagaagcggctgagcacagcagacctcttcagattccccaactttgagaccatctgttggtatgtgggaaagcacatcctggacatctttcgcggtttgcgagagaacaggagacaccctgcctcctacctggtccatggtggcaaagccttgaacttggcctttagagcctggacaaggaaagaagctctgccagaccatgaggatgagatcccggagacagtgcgaaccgtacagctcattaaagatctggccagggagatccgcctggtggaagacatcttccaacagaacgttgggaagacgagcaatatctttgggctgcagaggatcttcccagccggctccattcccctaaccaggccagcccattccacttcagtgtccatgtccaggctgtcactgccctccaaaaatggttcaaagaagaaaggcctgaagcccaaggaactcttcaagaaggcagagcgaaagggcaaggagagttcagccttggggcctgctggccagttgagctataatctcatggacacatacagtcatcaggcactgaagacaggctctttccagaaagcaaagttcaacatcactggtgcctgcttgaatgactcagatgacgactcaccagacttggaccttgatggaaatgagagcccattggccctattgatgtctaacggcagtacgaaaagggtgaagagtttatccaaatctcggcgaaccaagatagcaaagaaggtagacaaggctaggctgatggcagaacaggtgatggaagacgaatttgacttggattcagatgatgagctgcagattgacgagagattgggaaaggagaaggcgaccctgataataagaccaaaatttccccggaaattgccccgtgcgaagccttgctctgaccccaaccgagttcgtgaaccaggagaagttgagtttgacattgaggaggactatacaacagatgaggacatggtggaaggggttgaaggctatcagacagcaacccccgctcccgcccaaggtgccagcgaggccccagcttctcccagcactcaggaggccatccagggcatgctgtgcatggccaacctgcagtcctcatcgtcctcaccggctacctctagcctgcaggcctggtggactgggggacaggatcgaagcagtgggagctccagcagtgggctgggcacagtgtctaacagtcctgcttcccagcgcaccccagggaagcggcccatcaagcggccagcatactggagaaccgagagcgaggaggaggaggagaacgccagtctggatgaacaggacagcttgggagcgtgcttcaaggatgcagagtatatctatccttcactggagtctgatgatgatgaccctgctttgaaatctcgacccaagaaaaagaagaattcagatgatgctccatggagtcctaaagcccgcgtgaccccaactctgccgaagcaggaccgtcctgtgcgtgaggggacccgggtagcctctattgagacaggtttggctgcagcagctgcaaagctggcccagcaggtgaagaaaatgaagctctcattaactgactcaggataatacagccagtaaatggaggagacaactcaaactcatatcctctaacttcaaatttcatattactttctatttaaataaatgcttatgtagttcagtcattacatccta

SEQ ID NO: 296174 - DNA, 447 bp, Artificial Sequence
  derived and/or modified sequence
atgaaccggtcacgtgccattgtccagcgaggcagagtgctgcccccacccgcacctctggacactacgaacctggcaggccgtcgcactttacagggtagggcaaaaatggcatcagttcctgtatactgtctgtgccggctcccttatgacgtcacacggtttatgattgagtgcgatatgtgtcaggattggtttcacgggagctgcgtcggggtagaagaagagaaagcagccgacattgacctataccactgtcctaattgtgaggtcctgcacggaccatcgatcatgaagaagaggcgcggatcgtccaaagggcacgacacacataaagggaagccagtgaagactggctcgcctacattcgtgcgggagcttcgaagccggactttcgattcctctgacgaggtgatactgaagcctaccggcaaccaactgacatag

SEQ ID NO: 296175 - DNA, 912 bp, Artificial Sequence
  derived and/or modified sequence
atggacacctacagccaccaggccctgaagaccggcagcttccagaaggccaagttcaacatcaccggcgcctgcctgaacgacagcgacgacgacagccccgacctggacctggacggcaacgagagccccctggccctgctgatgagcaacggcagcaccaagagagtgaagagcctgagcaagagcagaagaaccaagatcgccaagaaggtggacaaggccagactgatggccgagcaggtgatggaggacgagttcgacctggacagcgacgacgagctgcagatcgacgagagactgggcaaggagaaggccaccctgatcatcagacccaagttccccagaaagctgcccagagccagcctggccctgacccccaccgagttcgtgaaccaggagaagctgagcctgaccctgagaagaaccatccagcagatgagaacctggtggaagggcctgaaggccagcctgggcatggtggtggccctggtggccttcctgatctgcagcagacccgccggcagatggggcgacctgaccatgctgcccagccccagaccccagctgctgcccgccctgagaagacccagcagagcctgctgcgcctggcccacctgcagcccccacagaccccacagactgcccctggcctgcagacccggcggcctgggcgacagaatcgaggccgtgggcgcccccgccgtgggctgggcccagtgcctgaccgtgctgctgcccagcgccccccagggcagcggccccagcagcggccagcacaccggcgagcccagagccagaagaagaagaagaacccccgtgtggatgaacagaaccgcctgggagagagccagcagaatgcagagcatcagcatcctgcactggagcctgatgatgatgaccctgctgtag

SEQ ID NO: 296176 - DNA, 447 bp, Artificial Sequence
  derived and/or modified sequence
atgaacagaagcagagccatcgtgcagagaggcagagtgctgcccccccccgcccccctggacaccaccaacctggccggcagaagaaccctgcagggcagagccaagatggccagcgtgcccgtgtactgcctgtgcagactgccctacgacgtgaccagattcatgatcgagtgcgacatgtgccaggactggttccacggcagctgcgtgggcgtggaggaggagaaggccgccgacatcgacctgtaccactgccccaactgcgaggtgctgcacggccccagcatcatgaagaagagaagaggcagcagcaagggccacgacacccacaagggcaagcccgtgaagaccggcagccccaccttcgtgagagagctgagaagcagaaccttcgacagcagcgacgaggtgatcctgaagcccaccggcaaccagctgacctag

SEQ ID NO: 296177 - protein, 1377 aa, Artificial Sequence
  derived and/or modified sequence
MHFPSEAFSLSWHSGCNTSDVCVQWCPLSRHCSTEKSSSIGSMESLEQPGQATYESHLLPIDQNMYPNQRDSAYSSFSASSNASDCALSLRPEEPASTDCIMQGPGPTKAPSGRPNVAETSGGSRRTNGGHLTPSSQMSSRPQEGYQSGPAKAVRGPPQPPVRRDSLQASRAQLLNGEQRRASEPVVPLPQKEKLSLEPVLPARNPNRFCCLSGHDQVTSEGHQNCEFSQPPESSQQGSEHLLMQASTKAVGSPKACDRASSVDSNPLNEASAELAKASFGRPPHLIGPTGHRHSAPEQLLASHLQHVHLDTRGSKGMELPPVQDGHQWTLSPLHSSHKGKKSPCPPTGGTHDQSSKERKTRQVDDRSLVLGHQSQSSPPHGEADGHPSEKGFLDPNRTSRAASELANQQPSASGSLVQQATDCSSTTKAASGTEAGEEGDSEPKECSRMGGRRSGGTRGRSIQNRRKSERFATNLRNEIQRRKAQLQKSKGPLSQLCDTKEPVEETQEPPESPPLTASNTSLLSSCKKPPSPRDKLFNKSMMLRARSSECLSQAPESHESRTGLEGRISPGQRPGQSSLGLNTWWKAPDPSSSDPEKAHAHCGVRGGHWRWSPEHNSQPLVAAAMEGPSNPGDNKELKASTAQAGEDAILLPFADRRKFFEESSKSLSTSHLPGLTTHSNKTFTQRPKPIDQNFQPMSSSCRELRRHPMDQSYHSADQPYHATDQSYHSMSPLQSETPTYSECFASKGLENSMCCKPLHCGDFDYHRTCSYSCSVQGALVHDPCIYCSGEICPALLKRNMMPNCYNCRCHHHQCIRCSVCYHNPQHSALEDSSLAPGNTWKPRKLTVQEFPGDKWNPITGNRKTSQSGREMAHSKTSFSWATPFHPCLENPALDLSSYRAISSLDLLGDFKHALKKSEETSVYEEGSSLASMPHPLRSRAFSESHISLAPQSTRAWGQHRRELFSKGDETQSDLLGARKKAFPPPRPPPPNWEKYRLFRAAQQQKQQQQQQKQQEEEEEEEEEEEEEEEEEEEEAEEEEEELPPQYFSSETSGSCALNPEEVLEQPQPLSFGHLEGSRQGSQSVPAEQESFALHSSDFLPPIRGHLGSQPEQAQPPCYYGIGGLWRTSGQEATESAKQEFQHFSPPSGAPGIPTSYSAYYNISVAKAELLNKLKDQPEMAEIGLGEEEVDHELAQKKIQLIESISRKLSVLREAQRGLLEDINANSALGEEVEANLKAVCKSNEFEKYHLFVGDLDKVVNLLLSLSGRLARVENALNSIDSEANQEKLVLIEKKQQLTGQLADAKELKEHVDRREKLVFGMVSRYLPQDQLQDYQHFVKMKSALIIEQRELEEKIKLGEEQLKCLRESLLLGPSNF

SEQ ID NO: 296178 - protein, 1743 aa, Artificial Sequence
  derived and/or modified sequence
MATDSGDPASTEDSEKPDGISFENRVPQVAATLTVEARLKEKNSTFSASGETVERKRFFRKSVEMTEDDKVAESSPKDERIKAAMNIPRVDKLPSNVLRGGQEVKYEQCSKSTSEISKDCFKEKNEKEMEEEAEMKAVATSPSGRFLKFDIELGRGAFKTVYKGLDTETWVEVAWCELQDRKLTKAEQQRFKEEAEMLKGLQHPNIVRFYDSWESILKGKKCIVLVTELMTSGTLKTYLKRFKVMKPKVLRSWCRQILKGLQFLHTRTPPIIHRDLKCDNIFITGPTGSVKIGDLGLATLMRTSFAKSVIGTPEFMAPEMYEEHYDESVDVYAFGMCMLEMATSEYPYSECQNAAQIYRKVTSGIKPASFNKVTDPEVKEIIEGCIRQNKSERLSIRDLLNHAFFAEDTGLRVELAEEDDCSNSSLALRLWVEDPKKLKGKHKDNEAIEFSFNLETDTPEEVAYEMVKSGFFHESDSKAVAKSIRDRVTPIKKTREKKPAGCLEERRDSQCKSMGNVFPQPQNTTLPLAPAQQTGAECEETEVDQHVRQQLLQRKPQQHCSSVTGDNLSEAGAASVIHSDTSSQPSVAYSSNQTMGSQMVSNIPQAEVNVPGQIYSSQQLVGHYQQVSGLQKHSKLTQPQILPLVQGQSTVLPVHVLGPTVVSQPQVSPLTVQKVPQIKPVSQPVGAEQQAALLKPDLVRSLNQDVATTKENVSSPDNPSGNGKQDRIKQRRASCPRPEKGTKFQLTVLQVSTSGDNMVECQLETHNNKMVTFKFDVDGDAPEDIADYMVEDNFVLESEKEKFVEELRAIVGQAQEILHVHFATERATGVDSITVDSNSSQTGSSEQVQINSTSTQTSNESAPQSSPVGRWRFCINQTIRNRETQSPPSLQHSMSAVPGRHPLPSPKNTSNKEISRDTLLTIENNPCHRALFTSKSEHKDVVDGKISECASVETKQPAILYQVEDNRQIMAPVTNSSSYSTTSVRAVPAECEGLTKQASIFIPVYPCHQTASQADALMSHPGESTQTSGNSLTTLAFDQKPQTLSVQQPAMDAEFISQEGETTVNTEASSPKTVIPTQTPGLEPTTLQPTTVLESDGERPPKLEFADNRIKTLDEKLRNLLYQEHSISSIYPESQKDTQSIDSPFSSSAEDTLSCPVTEVIAISHCGIKDSPVQSPNFQQTGSKLLSNVAASQPANISVFKRDLNVITSVPSELCLHEMSSDASLPGDPEAYPAAVSSGGAIHLQTGVETEEMRSAIAPDPIPLTRESTADTRALNRCKAMSGSFQRGRFQVITIPQQQSAKMTSFGIEHISVFSETNHSSEEAFIKTAKSQLVEIEPATQNPKTSFSYEKLQALQETCKENKGVPKQGDNFLSFSAACETDVSSVTPEKEFEETSATGSSMQSGSELLLKEREILTAGKQPSSDSEFSASLAGSGKSVAKTGPESNQCLPHHEEQAYAQTQSSLFYSPSSPMSSDDESEIEDEDLKVELQRLREKHIQEVVNLQTQQNKELQELYERLRSIKDSKTQSTEIPLPPASPRRPRSFKSKLRSRPQSLTHVDNGIVATDPLCVESNAASCQQSPASKKGMFTDDLHKLVDDWTKEAVGNSLIKPSLNQLKQSQHKLETENWNKVSENTPSTMGYTSTWISSLSQIRGAVPTSLPQGLSLPSFPGPLSSYGMPHVCQYNAVAGAGYPVQWVGISGTTQQSVVIPAQSGGPFQPGMNMQAFPTSSVQNPATIPPGPK

SEQ ID NO: 296179 - protein, 165 aa, Artificial Sequence
  derived and/or modified sequence
MATDSGDPASTEDSEKPDGISFENRVPQVAATLTVEARLKEKNSTFSASGETVERKRFFRKSVEMTEDDKVAESSPKDERIKAAMNIPRVDKLPSNVLRGGQEVKYEQCSKSTSEISKDCFKEKNEKEMEEEAEMKAVATSPSGRFLKFDIELGRGAFKTVYKGL

SEQ ID NO: 296180 - DNA, 5232 bp, Artificial Sequence
  derived and/or modified sequence
atggccaccgacagcggcgaccccgccagcaccgaggacagcgagaagcccgacggcatcagcttcgagaacagagtgccccaggtggccgccaccctgaccgtggaggccagactgaaggagaagaacagcaccttcagcgccagcggcgagaccgtggagagaaagagattcttcagaaagagcgtggagatgaccgaggacgacaaggtggccgagagcagccccaaggacgagagaatcaaggccgccatgaacatccccagagtggacaagctgcccagcaacgtgctgagaggcggccaggaggtgaagtacgagcagtgcagcaagagcaccagcgagatcagcaaggactgcttcaaggagaagaacgagaaggagatggaggaggaggccgagatgaaggccgtggccaccagccccagcggcagattcctgaagttcgacatcgagctgggcagaggcgccttcaagaccgtgtacaagggcctggacaccgagacctgggtggaggtggcctggtgcgagctgcaggacagaaagctgaccaaggccgagcagcagagattcaaggaggaggccgagatgctgaagggcctgcagcaccccaacatcgtgagattctacgacagctgggagagcatcctgaagggcaagaagtgcatcgtgctggtgaccgagctgatgaccagcggcaccctgaagacctacctgaagagattcaaggtgatgaagcccaaggtgctgagaagctggtgcagacagatcctgaagggcctgcagttcctgcacaccagaaccccccccatcatccacagagacctgaagtgcgacaacatcttcatcaccggccccaccggcagcgtgaagatcggcgacctgggcctggccaccctgatgagaaccagcttcgccaagagcgtgatcggcacccccgagttcatggcccccgagatgtacgaggagcactacgacgagagcgtggacgtgtacgccttcggcatgtgcatgctggagatggccaccagcgagtacccctacagcgagtgccagaacgccgcccagatctacagaaaggtgaccagcggcatcaagcccgccagcttcaacaaggtgaccgaccccgaggtgaaggagatcatcgagggctgcatcagacagaacaagagcgagagactgagcatcagagacctgctgaaccacgccttcttcgccgaggacaccggcctgagagtggagctggccgaggaggacgactgcagcaacagcagcctggccctgagactgtgggtggaggaccccaagaagctgaagggcaagcacaaggacaacgaggccatcgagttcagcttcaacctggagaccgacacccccgaggaggtggcctacgagatggtgaagagcggcttcttccacgagagcgacagcaaggccgtggccaagagcatcagagacagagtgacccccatcaagaagaccagagagaagaagcccgccggctgcctggaggagagaagagacagccagtgcaagagcatgggcaacgtgttcccccagccccagaacaccaccctgcccctggcccccgcccagcagaccggcgccgagtgcgaggagaccgaggtggaccagcacgtgagacagcagctgctgcagagaaagccccagcagcactgcagcagcgtgaccggcgacaacctgagcgaggccggcgccgccagcgtgatccacagcgacaccagcagccagcccagcgtggcctacagcagcaaccagaccatgggcagccagatggtgagcaacatcccccaggccgaggtgaacgtgcccggccagatctacagcagccagcagctggtgggccactaccagcaggtgagcggcctgcagaagcacagcaagctgacccagccccagatcctgcccctggtgcagggccagagcaccgtgctgcccgtgcacgtgctgggccccaccgtggtgagccagccccaggtgagccccctgaccgtgcagaaggtgccccagatcaagcccgtgagccagcccgtgggcgccgagcagcaggccgccctgctgaagcccgacctggtgagaagcctgaaccaggacgtggccaccaccaaggagaacgtgagcagccccgacaaccccagcggcaacggcaagcaggacagaatcaagcagagaagagccagctgccccagacccgagaagggcaccaagttccagctgaccgtgctgcaggtgagcaccagcggcgacaacatggtggagtgccagctggagacccacaacaacaagatggtgaccttcaagttcgacgtggacggcgacgcccccgaggacatcgccgactacatggtggaggacaacttcgtgctggagagcgagaaggagaagttcgtggaggagctgagagccatcgtgggccaggcccaggagatcctgcacgtgcacttcgccaccgagagagccaccggcgtggacagcatcaccgtggacagcaacagcagccagaccggcagcagcgagcaggtgcagatcaacagcaccagcacccagaccagcaacgagagcgccccccagagcagccccgtgggcagatggagattctgcatcaaccagaccatcagaaacagagagacccagagcccccccagcctgcagcacagcatgagcgccgtgcccggcagacaccccctgcccagccccaagaacaccagcaacaaggagatcagcagagacaccctgctgaccatcgagaacaacccctgccacagagccctgttcaccagcaagagcgagcacaaggacgtggtggacggcaagatcagcgagtgcgccagcgtggagaccaagcagcccgccatcctgtaccaggtggaggacaacagacagatcatggcccccgtgaccaacagcagcagctacagcaccaccagcgtgagagccgtgcccgccgagtgcgagggcctgaccaagcaggccagcatcttcatccccgtgtacccctgccaccagaccgccagccaggccgacgccctgatgagccaccccggcgagagcacccagaccagcggcaacagcctgaccaccctggccttcgaccagaagccccagaccctgagcgtgcagcagcccgccatggacgccgagttcatcagccaggagggcgagaccaccgtgaacaccgaggccagcagccccaagaccgtgatccccacccagacccccggcctggagcccaccaccctgcagcccaccaccgtgctggagagcgacggcgagagaccccccaagctggagttcgccgacaacagaatcaagaccctggacgagaagctgagaaacctgctgtaccaggagcacagcatcagcagcatctaccccgagagccagaaggacacccagagcatcgacagccccttcagcagcagcgccgaggacaccctgagctgccccgtgaccgaggtgatcgccatcagccactgcggcatcaaggacagccccgtgcagagccccaacttccagcagaccggcagcaagctgctgagcaacgtggccgccagccagcccgccaacatcagcgtgttcaagagagacctgaacgtgatcaccagcgtgcccagcgagctgtgcctgcacgagatgagcagcgacgccagcctgcccggcgaccccgaggcctaccccgccgccgtgagcagcggcggcgccatccacctgcagaccggcgtggagaccgaggagatgagaagcgccatcgcccccgaccccatccccctgaccagagagagcaccgccgacaccagagccctgaacagatgcaaggccatgagcggcagcttccagagaggcagattccaggtgatcaccatcccccagcagcagagcgccaagatgaccagcttcggcatcgagcacatcagcgtgttcagcgagaccaaccacagcagcgaggaggccttcatcaagaccgccaagagccagctggtggagatcgagcccgccacccagaaccccaagaccagcttcagctacgagaagctgcaggccctgcaggagacctgcaaggagaacaagggcgtgcccaagcagggcgacaacttcctgagcttcagcgccgcctgcgagaccgacgtgagcagcgtgacccccgagaaggagttcgaggagaccagcgccaccggcagcagcatgcagagcggcagcgagctgctgctgaaggagagagagatcctgaccgccggcaagcagcccagcagcgacagcgagttcagcgccagcctggccggcagcggcaagagcgtggccaagaccggccccgagagcaaccagtgcctgccccaccacgaggagcaggcctacgcccagacccagagcagcctgttctacagccccagcagccccatgagcagcgacgacgagagcgagatcgaggacgaggacctgaaggtggagctgcagagactgagagagaagcacatccaggaggtggtgaacctgcagacccagcagaacaaggagctgcaggagctgtacgagagactgagaagcatcaaggacagcaagacccagagcaccgagatccccctgccccccgccagccccagaagacccagaagcttcaagagcaagctgagaagcagaccccagagcctgacccacgtggacaacggcatcgtggccaccgaccccctgtgcgtggagagcaacgccgccagctgccagcagagccccgccagcaagaagggcatgttcaccgacgacctgcacaagctggtggacgactggaccaaggaggccgtgggcaacagcctgatcaagcccagcctgaaccagctgaagcagagccagcacaagctggagaccgagaactggaacaaggtgagcgagaacacccccagcaccatgggctacaccagcacctggatcagcagcctgagccagatcagaggcgccgtgcccaccagcctgccccagggcctgagcctgcccagcttccccggccccctgagcagctacggcatgccccacgtgtgccagtacaacgccgtggccggcgccggctaccccgtgcagtgggtgggcatcagcggcaccacccagcagagcgtggtgatccccgcccagagcggcggccccttccagcccggcatgaacatgcaggccttccccaccagcagcgtgcagaaccccgccaccatcccccccggccccaagtag

SEQ ID NO: 296181 - DNA, 5232 bp, Artificial Sequence
  derived and/or modified sequence
atggcgaccgattccggagaccccgcttccaccgaagattcagaaaagcccgatggaatttcttttgagaatcgagtccctcaggtggccgcgacattgacggtagaggctcgacttaaagaaaaaaactccactttctctgcttccggggaaactgttgaacggaaaaggttctttcgaaagagcgttgaaatgacggaggacgacaaagtggctgagagttctcccaaagatgaacggattaaagcagctatgaatattccgcgagtcgataagttacctagtaatgtcctcagaggggggcaggaggttaaatatgaacagtgtagcaagtccaccagcgaaatttcaaaggattgctttaaggagaaaaacgagaaggagatggaggaggaagccgaaatgaaggccgtggctacatccccttcaggacgcttcctgaaatttgacatcgagctgggacgtggggcttttaaaactgtctataaaggattggatacagaaacatgggtcgaggtcgcatggtgcgaactgcaggacaggaagctgaccaaggcggaacagcagcgcttcaaggaggaagcggagatgctcaaggggctgcagcatccaaatattgtgaggttctatgatagttgggagtccatactgaagggcaaaaagtgtatcgtcctggtaaccgagttaatgacatcaggtaccttaaagacttatctgaagagattcaaagttatgaagcctaaggttctgcggtcctggtgcagacagatactaaagggcctgcagtttctccatactagaactcctccaataatccacagggacctcaaatgtgataatatctttatcaccggtccgactggcagcgttaaaatcggagacttgggattggcaaccttaatgcggacttctttcgccaaaagcgtgattggcacgcccgagtttatggcccccgaaatgtatgaggagcactatgatgaaagcgtggatgtgtatgcctttgggatgtgtatgttagaaatggcgactagtgagtacccgtacagcgaatgtcagaacgccgcacagatttatcggaaggtcacttctggaataaagcctgctagtttcaacaaagttacagacccagaggtgaaagaaattattgagggctgtattagacaaaacaaaagcgaacgtctgagcatccgggatcttcttaaccatgctttcttcgcggaagacaccggactacgtgtcgagttagcagaagaggacgattgcagcaatagtagcctggccctgcggctgtgggtggaggaccccaagaagctgaaagggaagcacaaggacaacgaggcgatcgagttcagtttcaacctggaaactgatacgccagaagaggtggcctacgaaatggtgaaaagcgggtttttccacgagtctgatagtaaggctgtggcaaagagcatccgagatagagtgacacccataaaaaaaaccagagaaaaaaagccggctggctgcttggaagagaggcgtgattcgcagtgcaagtccatgggcaacgtcttcccacagccacaaaatactactctgcccttggcgcctgctcagcagaccggcgcagagtgcgaggagactgaggtcgaccaacacgtccggcagcaactcttacagcgaaaaccccagcaacattgtagctctgtcaccggcgacaacctgtcagaagctggggcggccagcgtgatacactcagacacgagctcacagccttctgtagcttatagttcaaaccaaactatgggtagtcagatggtctctaacattccacaagccgaggtgaacgtgccgggacaaatttactcctcacagcagctggtggggcactatcagcaggtctctgggctgcagaagcactccaaactcactcagccgcagatactgccattggtgcaggggcagtccactgttctcccggtccatgtgctgggacctaccgtggtgagtcagccccaggtatccccgctgactgtgcagaaagttccccagatcaagccagtgtctcagcccgtaggggccgagcaacaggcagccctgctgaaacctgatcttgtcagatcactgaatcaggacgtggctaccacaaaggaaaacgtaagcagtccagataacccgtccgggaacggtaagcaggatcggatcaaacagcgtcgggcttcatgtccccgacccgagaaaggcacaaagtttcagcttactgttctgcaggtgagcacgtctggggacaacatggtcgagtgtcaacttgagacccacaacaataaaatggttacatttaagttcgatgtcgatggcgacgcccccgaagacattgcggactatatggtggaggataactttgtgttagaaagcgagaaggagaagtttgtggaagaactacgggccattgtaggacaagcacaggagatccttcatgtgcacttcgccacggaaagggctactggtgtggacagcataaccgtcgattcgaactcaagccagacaggaagttccgagcaggtccaaattaacagcacgagcactcagactagcaacgagtccgctccccagagttctccagttgggcgctggagattctgcatcaaccagaccataaggaaccgagagacgcaatcccccccctccttacagcattcgatgtctgctgtgcctggaaggcatcctctgccgtcacctaagaacactagcaataaagagatctcccgagataccctgctcacaattgagaacaatccatgccatagagctctgtttacgagcaagtctgaacacaaagatgttgtggacgggaagatcagcgaatgtgcatccgtagagactaagcaaccagccatcctttaccaggtggaggacaatcgacagatcatggcacctgtgaccaactctagttcctactctactaccagcgtacgggccgttcccgcagagtgtgagggactgactaaacaggcatctatcttcataccagtctacccctgccatcagactgccagccaagcagatgcactcatgagccatcctggcgagtccacacagacctctgggaactcgctaacaaccttagcttttgaccagaaaccacagactctgagcgtgcaacagccagcaatggatgctgagtttatctcacaggagggagagaccacagtgaataccgaggcgtccagtccaaagacggtgatccccacccagacccctggcctggaaccaactaccctccaacctacaacggtactggagagtgatggtgaaagacccccaaagctagaatttgccgataaccggattaaaacactggacgagaaactacgtaacctcctctaccaggagcactccatttcatccatttatcctgagtcccagaaggatacgcaatcaatcgactccccttttagctcatctgccgaggatacgctcagctgccctgtgaccgaggtgattgccataagccactgcgggatcaaagacagcccggtgcagtctcccaacttccagcagaccgggagcaagttgctgtccaacgtcgcagcgagtcagccagccaatattagtgtgtttaaaagagatctcaacgtgattacatctgtgccaagcgagctttgtctacatgagatgtcgtcagatgcctccctccctggtgatccagaggcctatcctgcagccgtatcaagtggcggcgctatccacctccagactggagtggagacagaggaaatgcgctccgcaatagccccggacccgattccactgacacgagaatccactgctgatacacgggctcttaaccgttgtaaggcgatgtctgggtcttttcagcggggccgcttccaggtcattacaatcccacagcagcagagcgcgaaaatgacatccttcgggattgagcacatctcagtctttagcgagacaaatcactcttcggaagaagcctttattaagaccgccaaaagccagttggtggaaattgagcctgccacccagaatccgaaaacctctttcagctatgagaaattgcaggcactccaggagacatgcaaggaaaacaagggtgtccccaagcagggagacaattttctgtcgttttccgcagcatgtgaaactgatgtttcctcggtgactcccgaaaaagagttcgaggagacatccgccaccgggagtagcatgcaatccgggtcagagctgttgctgaaagaacgagaaatcctgacagccggtaagcagcctagctccgacagcgagttttcagcgtcgctggcgggttctgggaagagtgttgccaagaccggaccggaatccaatcagtgcctgcctcatcatgaggagcaggcgtatgctcagacccagtcttcactattctattctccttcaagcccaatgagttcagacgacgaatcagagatagaagacgaggatttgaaggttgagcttcagaggctcagagaaaaacatattcaggaggtggtaaacctccagacacagcaaaataaggagctccaggagctctacgaacgcctcagatctatcaaagactcaaagacgcagtcaactgagatacctcttccaccagccagtccccggaggccgcggtcatttaaatccaagctccgttctcgccctcagtctctgacccacgtggacaacgggatagtggctacagacccattgtgcgtcgagagcaatgcagctagctgtcagcagagccccgcaagcaaaaaagggatgttcaccgacgacctgcacaagctggtagacgattggacaaaagaagccgtagggaattctctgattaagccgtccctgaatcagttaaaacaatctcagcacaagttagagaccgaaaactggaataaggtctcagaaaataccccctcaaccatggggtatacttctacatggatatcttccttatcccagatccggggtgcagtgccaaccagcttgcctcagggtctctctctgccatccttcccaggaccactgtctagctacggaatgcctcacgtgtgccaatacaacgccgtagctggagccggctatccggttcagtgggtcggtatcagcggcacaacccaacaaagtgtcgtcatccccgcccaatcaggcggcccgttccagcccggaatgaacatgcaagcatttcccacttcctctgtacagaacccagctacaatacccccgggccctaagtag

SEQ ID NO: 296182 - DNA, 5232 bp, Artificial Sequence
  derived and/or modified sequence
atggccacagattctggggaccctgccagcacagaggacagcgagaagccagatggcatcagctttgaaaatagagtgccccaggtggccgccaccctgactgtggaggcccggctgaaggagaagaacagcaccttcagcgccagcggggagaccgtggagaggaagcgcttcttcaggaagtctgtggagatgacagaagatgacaaggtggccgagagcagccccaaggatgagcgcatcaaggccgccatgaacatcccccgggtggacaagctgcccagcaatgtgctgcggggcggccaggaggtgaagtatgagcagtgcagcaagagcaccagcgagatcagcaaggactgcttcaaggagaagaatgagaaggagatggaggaggaggccgagatgaaggctgtggccaccagccccagcggccgcttcctgaagtttgatattgagctgggccgcggggccttcaagacagtgtacaagggcctggacacagagacctgggtggaggtggcctggtgtgagctgcaggacaggaagctgaccaaggccgagcagcagcgcttcaaggaggaggccgagatgctgaagggcctgcagcaccccaacatcgtgcgcttctatgacagctgggagagcatcctgaagggcaagaagtgcatcgtgctggtgacagagctgatgaccagcggcaccctgaagacctacctgaagcgcttcaaggtgatgaagcccaaggtgctgcgctcctggtgccggcagatcctgaagggcctgcagttcctgcacaccaggaccccacccatcatccaccgggacctgaagtgtgacaacatcttcatcaccggccccactggatctgtgaagatcggggacctgggcctggccaccctgatgaggaccagctttgccaagagcgtcatcggcaccccagagttcatggcccctgagatgtatgaggagcactatgatgagagcgtggatgtgtatgccttcggcatgtgcatgctggagatggccaccagcgagtacccctacagcgagtgccagaatgctgcccagatctacaggaaggtgaccagcggcatcaagccagccagcttcaacaaggtgacagatcctgaggtgaaggagatcatcgagggctgcatccggcagaacaagtctgagcggctgagcatccgggacctgctgaaccacgccttctttgctgaggacaccggcctgcgggtggagctggccgaggaggatgactgcagcaacagcagcctggccctgcggctgtgggtggaggaccccaagaagctgaagggcaagcacaaggacaatgaggccatcgagttctccttcaacctggagacagacaccccagaggaggtggcctatgagatggtgaagagcggcttcttccatgaaagtgacagcaaggctgtggccaagagcatccgggacagagtgacccccatcaagaagacccgggagaagaagccagctggctgcctggaggagcggcgggacagccagtgcaagtccatgggaaatgtgttcccccagccccagaacaccaccctgcccctggccccagcccagcagacaggagcagaatgtgaggagacagaggtggaccagcacgtgcggcagcagctgctgcagaggaagccccagcagcactgcagctctgtgactggagacaacctgtctgaggccggggccgccagcgtcatccacagcgacaccagcagccagcccagcgtggcctacagcagcaaccagaccatgggcagccagatggtgagcaacatcccccaggccgaggtgaatgtgcccggccagatctacagcagccagcagctggtgggccactaccagcaggtgtctggcctgcagaagcacagcaagctgacccagccccagatcctgcccctggtgcagggccagagcacagtgctgcctgtgcacgtgctgggccccaccgtggtgtcccagccccaggtgagccccctgactgtgcagaaggtgccccagatcaagcctgtgtcccagcctgtgggcgctgagcagcaggccgccctgctgaagccagacctggtgcgcagcctgaaccaggatgtggccaccaccaaggaaaatgtgagcagcccagacaaccccagcggaaatggcaagcaggaccgcatcaagcagaggcgggccagctgccccaggcctgagaagggcaccaagttccagctgactgtgctgcaggtgtccaccagcggggacaacatggtggagtgccagctggagacccacaacaacaagatggtgaccttcaagtttgatgtggatggagatgccccagaagatattgctgactacatggtggaggacaactttgtgctggagagcgagaaggagaagtttgtggaggagctgcgggccatcgtgggccaggcccaggagatcctgcacgtgcactttgccacagagcgggccaccggggtggacagcatcaccgtggacagcaacagcagccagacaggcagcagcgagcaggtgcagatcaacagcaccagcacccagaccagcaatgaaagtgccccccagagcagccctgtgggccgctggaggttctgcatcaaccagaccatccggaaccgggagacccagagcccccccagcctgcagcacagcatgtctgctgtgcccggccgccaccccctgcccagccccaagaacaccagcaacaaggagatcagccgggacaccctgctgaccatcgagaacaacccctgccaccgggccctcttcaccagcaagtctgagcacaaggatgtggtggatggcaagatcagtgaatgtgcctctgtggagaccaagcagcctgccatcctgtaccaggtggaggacaaccggcagatcatggcccctgtgaccaacagcagcagctacagcaccacctctgtgcgggctgtgcctgcagaatgtgagggcctgaccaagcaggccagcatcttcatccctgtgtacccctgccaccagacagccagccaggctgatgccctgatgagccaccctggagagagcacccagaccagcggcaacagcctgaccaccctggcctttgaccagaagccccagaccctgtctgtgcagcagcctgccatggatgctgagttcatcagccaggagggggagaccaccgtgaacacagaggccagcagccccaagacagtcatccccacccagaccccaggcctggagcccaccaccctgcagcccaccaccgtgctggagagtgatggagagcggccccccaagctggagtttgctgacaaccgcatcaagaccctggatgagaagctgaggaacctgctgtaccaggagcacagcatcagcagcatctacccagagagccagaaggacacccagagcattgacagccccttcagcagcagcgctgaggacaccctgagctgccctgtgacagaggtgattgccatcagccactgcggcatcaaggacagccctgtgcagagccccaacttccagcagacaggcagcaagctgctgagcaatgtggccgccagccagcctgccaacatcagcgtcttcaagagggacctgaatgtcatcacctctgtgcccagcgagctgtgcctgcacgagatgagcagtgatgccagcctgcccggggaccctgaggcctacccagctgctgtgagcagcggcggggccatccacctgcagacaggagtggagacagaggagatgaggtctgccatcgccccagaccccatccccctgacccgggagagcacagctgacacccgggccctgaaccgctgcaaggccatgagcggcagcttccagaggggccgcttccaggtgatcaccatcccccagcagcagagcgccaagatgaccagctttggcatcgagcacatcagcgtcttcagcgagaccaaccacagcagcgaggaggccttcatcaagacagccaagagccagctggtggagattgagcccgccacccagaaccccaagaccagcttctcctatgagaagctgcaggccctgcaggagacctgcaaggaaaataaaggagtgcccaagcagggcgacaacttcctgtccttctctgctgcctgtgaaacagatgtgtcctctgtgaccccagagaaggagtttgaggagaccagcgccaccggcagctccatgcagagcggcagcgagctgctgctgaaggagcgggagatcctgacagctgggaagcagcccagcagtgacagcgagttcagcgccagcctggccggcagcggcaagtctgtggccaagacaggccctgagagcaaccagtgcctgccccaccacgaggagcaggcctatgcccagacccagagcagcctcttctacagccccagcagccccatgagcagtgatgatgaaagtgaaattgaagatgaggacctgaaggtggagctgcagaggctgcgggagaagcacatccaggaggtggtgaacctgcagacccagcagaacaaggagctgcaggagctgtatgaaaggctgcggagcatcaaggacagcaagacccagagcacagagatccccctgcccccagccagcccccggcggcccaggagcttcaagagcaagctgcggagccggccccagagcctgacccacgtggacaatggaattgtggccacagaccccctgtgtgtggagagcaatgctgccagctgccagcagagccctgccagcaagaagggcatgttcacagatgacctgcacaagctggtggatgactggaccaaggaggccgtgggcaacagcctcatcaagcccagcctgaaccagctgaagcagagccagcacaagctggagacagagaactggaacaaggtgtctgagaacacccccagcaccatgggctacaccagcacctggatcagcagcctgagccagatcagaggagctgtgcccaccagcctgccccagggcctgagcctgcccagcttccctggccccctgagcagctatggcatgcctcatgtgtgccagtacaatgctgtggccggggccggctaccctgtgcagtgggtgggcatcagcggcaccacccagcagagcgtggtgatcccagcccagagcggcggccccttccagcccggcatgaacatgcaggccttccccaccagctctgtgcagaacccagccaccatccccccaggccccaagtag

SEQ ID NO: 296183 - DNA, 5232 bp, Artificial Sequence
  derived and/or modified sequence
atggccaccgacagcggcgaccccgccagcaccgaggacagcgagaaacccgatggcatcagctttgagaaccgagtcccacaggttgctgctaccctgactgtcgaggccaggctaaaggaaaagaactcaactttcagcgcctccggagagacagtggaacggaagcgcttcttccgcaagagcgtggagatgaccgaggacgacaaggtcgcggagagttccccgaaggacgagcgcattaaagcagctatgaacattccccgtgtggataagctgccatccaatgtgctacggggtggccaagaagtgaagtacgagcagtgtagcaaatccacctctgaaattagcaaggactgtttcaaggagaaaaatgagaaggaaatggaagaggaagccgaaatgaaagctgtggcgacttcacccagcggtcgctttctgaagtttgatattgagctgggtcgcggcgcattcaaaaccgtgtataagggcctggataccgagacgtgggtagaggtggcctggtgcgagctccaggacaggaaactgaccaaggcagagcagcaacggtttaaggaagaagcggaaatgttaaaagggctgcaacaccccaatatcgtgcgcttctatgactcatgggaaagtattcttaaggggaaaaaatgcatagtacttgtgacggagctgatgactagcggtactctgaaaacctatcttaagcggtttaaggtcatgaaacccaaagttctccggagttggtgcagacagatcctcaagggtctgcaatttctccacacacgaacgcctccgatcattcatagggacctgaagtgtgacaatattttcataacagggcccaccggaagcgtcaaaatcggtgacctggggctcgcaacccttatgcggacaagctttgcaaagagtgtcattggaactcctgagttcatggctcccgagatgtatgaggaacactacgatgagtctgttgatgtgtacgcttttggtatgtgtatgctggaaatggccacatctgaatatccatattcggagtgccagaacgccgctcagatttatcgcaaagttaccagcggtataaaaccagctagctttaacaaggtgacggaccctgaagtgaaagagataattgagggatgtattcgacaaaataagtcagagcgcctctccattagggatctactgaatcacgcctttttcgctgaggacacgggactgcgcgtggaactggctgaggaagacgactgctctaactcctctctcgccctccgcttgtgggtcgaggatccgaaaaagctcaagggcaagcacaaggataatgaggccatcgaattctctttcaacctggagacagacacaccagaggaggtggcctatgagatggtcaaatcagggtttttccacgaatccgattccaaagccgtggccaaaagtatcagggatagggtgacacctatcaaaaagactcgggagaagaagcctgccggctgcctggaggagagaagagattcgcagtgtaaaagtatgggaaacgttttccctcagccgcaaaatacgacactgccactggcaccggctcagcagaccggcgcagaatgtgaggagaccgaagtggatcagcacgtgcggcagcaacttctccagagaaaaccacagcagcattgttccagcgtgacaggagataatctgtcagaggctggggcagcctccgttattcattcggacacttccagccagccatccgtggcttatagcagcaaccaaactatgggatctcagatggtgtctaatatcccccaagctgaggtgaatgtgcctggccagatctacagctcccagcagttagtgggacactatcagcaggtttccgggctgcagaaacattctaaactaactcagccccagattctgccactggtccagggccagtccacggtgctcccggtgcacgtgctgggacctaccgtcgtgagccagccacaggtttctccgctcacagtgcagaaggttccacagatcaaacccgtttcccagcctgtgggggcggagcagcaagccgccctactcaaacccgatctggttaggtccctgaatcaggatgtggctaccaccaaggagaacgtaagttctccagataaccccagtggtaacggaaaacaggataggatcaagcagcggagagccagctgtcctcgccctgagaaaggcacaaaatttcagctgaccgtgctgcaggtaagcaccagcggcgataacatggtcgagtgtcagctagagacacacaacaacaagatggtaacatttaagtttgacgtggatggcgacgccccggaagacatcgcagactatatggtggaagataacttcgtcctggagtctgagaaggaaaagtttgtcgaagaactgcgcgccattgtcggtcaggcacaggaaatactgcacgttcacttcgccaccgagagagcaaccggagttgacagcatcacggtcgactccaattccagtcagacaggctcatctgagcaggtgcagataaacagcaccagtacccagacaagcaacgagtctgccccccagtcatctcctgttggtaggtggcgcttctgcattaatcagaccatccgcaaccgagaaacacaaagccccccaagcctgcaacatagcatgtctgccgtgccaggacggcaccctctaccaagcccaaagaatacgagtaataaggaaatcagtcgggacacgcttctgactattgagaacaacccctgtcaccgagcgcttttcacatcgaaatctgaacataaagacgttgtggatggcaagatcagcgaatgtgcttccgtggaaactaaacagcctgctatactgtaccaagttgaagacaaccggcagattatggcacctgtgaccaactccagctcatactccactacttctgtgcgggcagtacccgccgagtgcgaaggtttaactaaacaggcctctatcttcattcccgtttatccttgccaccagactgcaagccaggcagatgctctcatgagccacccaggcgaaagtacccaaacctctggcaactctctaacaacattggccttcgatcagaagccccaaactctgagcgtccagcagcctgccatggatgccgagttcatttcccaggagggggagactaccgtgaacaccgaagcaagctctccgaagacagttattcccacgcagacgccaggactggagcctaccactctgcagcccaccaccgtgctggaaagtgacggcgagagaccccccaagctcgaatttgctgataacaggatcaaaactctcgacgaaaagttgcgaaatttgctgtatcaggagcactccatctcgtccatttaccctgaaagccagaaagacacccagtcgatcgacagccctttctccagcagcgccgaagacacactgagttgcccagtcaccgaggtaatcgccatctctcactgtggcataaaggactcaccagtgcaaagccctaattttcagcaaaccggttccaagctcttgtcgaacgtcgcagccagtcagcctgccaacatcagtgtcttcaaacgagatctgaacgtgatcacatcagttccgtctgagctttgtcttcacgagatgtcctcggatgcctccctgcctggggatcccgaagcctaccccgccgccgtgagtagcggcggcgcaattcatttgcaaaccggggtggagacagaggaaatgcgctcagcaatcgctcccgatcccatccctctgaccagagaatcaactgctgatactagggctctgaacagatgcaaagccatgtctgggagtttccaacgagggcgatttcaggttatcacaattccacaacagcagtcggcaaagatgacctccttcggaattgaacacatcagtgttttcagtgagacaaatcatagttcagaagaagcgtttatcaagacagctaaatcccagctggtcgaaatcgagccagcgacccagaacccaaagacctccttctcctatgagaaactgcaggctctccaggagacctgcaaggagaataaaggtgtcccgaagcagggcgacaattttctgtcttttagtgccgcttgtgagactgacgtgtctagcgttacaccagaaaaggagttcgaagagacttcagcaacaggcagttccatgcagagcggatctgagctcctgttgaaggagagggagatccttacggctggtaagcagccctcaagcgacagcgagttttctgcctcactcgccgggtccggcaaatctgtggctaaaaccggaccggagagcaatcaatgtctgcctcaccatgaagagcaggcctatgcccagactcagagctccttattttattccccttcctcccccatgagtagcgacgacgaaagtgagatagaggacgaagatctgaaggtggaactgcagaggctgagggaaaagcatattcaggaggtagtgaatctccagacacagcaaaacaaggaattacaggaactgtatgagcggctgcgcagtatcaaggatagtaaaacccagtctaccgagataccactgccacccgcaagccctagacggcctagaagtttcaaatcgaaacttcggtccagaccacagagtctgacccacgtggataatggcatcgttgccactgatccactgtgtgtcgagtctaatgcagctagctgccagcaatccccagcatctaagaaaggaatgtttaccgacgatttacacaaactcgtggacgattggaccaaggaggccgtggggaacagcttgattaagcccagtctgaatcagctgaagcagtcccagcacaaacttgagaccgagaattggaacaaagtttctgaaaatacaccttcaaccatgggatacacttccacctggatctccagcctcagtcagattcgcggagcggtgccgacgagtctcccgcaagggctctcattaccttcgtttcctggaccactgagttcatacgggatgccccatgtgtgtcaatacaatgccgtggcaggtgcaggctatccagtccaatgggtgggaatcagcgggacaacccagcagtcagtagtgatccctgcccagagcggaggaccctttcagcctgggatgaatatgcaggccttccccacaagttccgtgcaaaatcccgctactattccacccgggcctaagtag

SEQ ID NO: 296184 - DNA, 5231 bp, Artificial Sequence
  derived and/or modified sequence
atggccacagacagcggggaccccgcatctactgaggactctgaaaaacctgacggcatctccttcgagaatagagtgccccaagtggccgctacactaacagtcgaggcgcgactgaaagaaaaaaattcaacattctccgctagtggcgaaaccgtggagcgaaagcgattcttccgaaagagcgtggaaatgaccgaggacgacaaggtagcagaaagcagtcccaaagatgagcgtatcaaggccgctatgaatatccccagagtcgataagctgccatcgaacgtgttgcggggaggccaggaggtgaaatatgagcaatgttcgaaaagcacgtccgagatctcaaaggattgctttaaggagaaaaatgagaaagagatggaagaggaggctgagatgaaggccgtggctacgtctccgagtgggagattcctgaagtttgacatcgaactcggcagaggcgcttttaaaaccgtctacaaaggcttggacacagaaacatgggtcgaggtggcatggtgcgagttacaggatcggaagttgactaaggcggaacagcagagatttaaggaagaagctgaaatgctcaaaggactgcaacaccctaatatcgtgcgattttatgattcttgggagagcatactgaagggaaagaagtgcatcgtcctcgtgactgaactgatgacttctggtaccctcaagacctacctaaaacgcttcaaggtgatgaaaccgaaggtcttgagaagttggtgtaggcagatactaaaggggctacagtttcttcacacccgtacccccccaatcattcatcgggacttgaagtgtgacaacatatttattaccggcccaaccggtagtgtcaagattggagacctaggattggccaccctaatgaggacatcattcgccaagagtgtaataggcacacccgaatttatggccccagagatgtatgaggaacattatgacgaatctgttgatgtctatgcctttggcatgtgtatgctagagatggccaccagcgagtatccttactcagaatgccagaatgcggctcaaatttaccgaaaggtaacgtcaggcataaaaccagcttccttcaacaaagtgacagaccctgaagtgaaggagatcatagaaggatgtatccgtcaaaacaagagcgagagactgagcatccgtgatctcttgaatcacgccttttttgccgaagatactggactccgtgtcgagttggctgaggaggacgattgttcaaatagcagtttggcgctgcgcctctgggtggaagaccctaagaagcttaagggcaaacacaaagataacgaggcaatcgaattctctttcaaccttgagaccgacacgccggaagaagtggcctacgaaatggtgaagtctggctttttccatgagagtgattcaaaggctgttgccaaatctattcgcgaccgggttacacctatcaagaaaaccagggaaaagaagccggcaggttgcctcgaagaacggcgtgacagtcagtgcaagagcatgggcaacgtattcccacagccacaaaatactacactccctttagctcctgcccaacagacgggggcagagtgcgaggagaccgaggtcgaccagcacgtgcggcagcagctgctacaacgaaagcctcagcagcactgctccagcgtgacgggcgataacctttccgaagccggagcagcaagtgtcatccactccgacacgtctagccaaccatcagttgcatactcgagcaaccaaaccatgggctcacagatggtgagtaacataccacaggctgaggtaaacgtgccagggcagatttactccagtcagcagctggttgggcactaccagcaggtttccggtctccaaaaacactcaaaactgacacaaccccagatattgccacttgttcaagggcagagcactgttttgccagtgcacgttctcggcccaaccgtggtctctcagccacaagtgtcccccctgacagttcagaaagtgcctcagatcaaaccagtgagtcagccggtgggcgctgagcagcaggcagccctgctgaaaccagatctcgttcgttctctcaatcaggacgtagctacaactaaggaaaacgtgtccagtccagataatccaagtggtaatgggaaacaggaccgtattaaacagagacgggcatcctgtccacgacccgagaaggggaccaaattccagctgacagtcttacaggtgagcacaagtggtgataacatggtggaatgccagctcgagactcacaacaataaaatggtgacatttaaattcgacgtggacggtgatgcccctgaagacattgcagactacatggtggaggataattttgtcctcgagagcgagaaggaaaaatttgtcgaggaacttcgggcaatcgtcggacaggcccaggagatcctgcatgttcacttcgccaccgagcgggctacaggcgtcgactctatcacagtcgattcaaatagcagccagaccgggtccagcgagcaggtccaaattaattccacctcgacccagacctccaacgagagtgccccacagagctcccctgttggcagatggagattctgcattaaccaaacaattcggaaccgggaaacccagtcccccccttccctgcagcacagtatgtccgctgtacctggccgacaccctttaccatcaccaaaaaatacatccaataaggaaatctctagagataccctgctgacgattgagaacaatccctgtcatcgtgctctgttcacgtcaaagagtgagcataaggatgtggtggacgggaaaatcagcgagtgtgcatcagtcgagactaagcagcccgcaattttgtatcaggttgaggataaccgccagatcatggcacccgtgacaaatagtagctcttatagcacaacaagcgtgagggcagttcctgccgagtgtgagggactcacaaagcaagccagtatattcatccccgtgtatccctgtcaccagaccgcctctcaagccgacgccctcatgtcacacccaggcgagagcacacagacctccggcaattccctgaccactctggccttcgatcagaaacctcaaaccctctccgttcagcagccagcgatggacgccgagttcatcagtcaggagggagagaccactgtcaatactgaggcctctagcccaaagactgtgattcccacccagaccccaggacttgaacccaccacccttcagcctactacagtgttggaatctgatggcgagcggccaccaaaactggagttcgccgataataggatcaagacgctggatgaaaaactccggaacctcctgtatcaggagcattctatatcatctatctatcctgaatcacagaaggacactcagtccatcgatagccctttctcaagcagtgccgaggatactctgtcttgtcccgtcacagaggtgattgcaatctctcactgcgggataaaagattcgcccgtccagtccccaaacttccagcagactggctccaaattgttgtccaatgtggctgcctcacagcccgctaacatctccgtcttcaagcgcgatctgaacgtgattacttccgtacccagtgaactctgcctgcatgagatgtcaagtgacgccagccttccaggtgacccagaagcatacccagccgcagtctcatctgggggagcaatccacctgcagacaggcgtcgagacagaagaaatgaggtcagcaatcgctcccgacccaatacctctcaccagagaaagcaccgccgacacgcgcgctctgaatagatgcaaggccatgagcggtagctttcagcggggaagatttcaagttataaccattccccagcagcagagcgcaaaaatgactagcttcgggatcgaacacatttctgtctttagtgagacaaaccattcatccgaggaggcctttatcaagacggccaaatcccaactcgttgaaatcgagcccgcaactcagaatcccaagacatctttctcttacgaaaagcttcaggctttacaggagacttgcaaggagaacaagggggttcccaaacagggggacaacttcctttcattctcagccgcttgcgaaaccgacgtgagcagcgtcacccctgaaaaggaattcgaagagacatctgcaacaggatcctccatgcagtctggcagcgaactgttacttaaagaacgggagatcctgacggcaggaaagcagccatcttccgacagcgaatttagcgcttccttggccggttccggaaagtctgttgctaagacaggcccagaatctaaccagtgcctgccacatcatgaggaacaggcttacgcacaaacccagtcaagcctgttttacagcccatccagtcctatgagctcagatgatgagtctgaaatagaggatgaggatttgaaggtggagctgcagaggttgagagaaaagcacattcaagaagttgtgaaccttcaaacacagcagaataaggagctgcaggagctgtacgaacggctgcgatccatcaaggatagcaagacccagagtacagaaatccccctgcccccagcgtccccacgacgtccaagatcctttaagagcaagctgcgcagcagaccacaatccctgacgcatgtagataacggtatagtcgccaccgaccccctgtgtgtggagtccaacgccgcatcctgtcagcaatccccagcaagtaagaaaggaatgtttacggacgatttgcataaattagtggacgactggactaaggaggcagtgggaaactccctcataaagccgagtctcaatcagctcaagcagagccaacataagctcgagacagagaactggaataaagtcagcgaaaatactcccagcaccatgggctataccagcacctggatctcttcactctcacaaatcagaggcgctgtgcccactagcttaccccagggactgagtcttccttcctttcccggtcccctgagcagctatggcatgccacacgtatgtcagtacaatgccgtggctggagctggttaccctgtgcagtgggtgggaatctcaggtacaacccagcagtctgttgtgatacctgctcagtccggtgggccatttcaacccggtatgaatatgcaagccttccctacgagttccgtgcagaacccagccaccattccgccagggccaaaata

SEQ ID NO: 296185 - DNA, 11172 bp, Artificial Sequence
  derived and/or modified sequence
ctcagctccgggccgagcgcgagcttgggctcgtaccccgctcccctctctccgcccgctctttacctaccggccgtagctggcccggtgggctcgcggggagacgctcgcgcgcgcaagcgcacacgacgcggagcggagctcgagacatcgaggagaggagtaagaagcatcggaggaggcgatcgaggaggaggcggtgtgtgtgtatgtgtctattctacggtgtggctcgtcgtggggcgagaggaggctcgagagagggcgagggagaagcgaaaagagtaagagagtcttcctttgcgagagcctctaatctggttgctatggaaatacatgaccacgcaaaaggaagtccattctgataattctgatacctgagatgtaactggactgaagagtagaaacaggaaaaattttagtgccaactttaattacaatggccactgattcaggggatccagccagcacagaagattctgagaaacctgatggaatttcatttgaaaacagagttccccaggtcgctgcaactttgacagtagaagctagactaaaggagaaaaacagtaccttctctgcttctggggaaactgtagaaaggaagagatttttccgaaagagtgttgaaatgacggaagatgacaaagttgccgaatcatcccccaaagatgagagaattaaggctgcaatgaatattccaagagtagataagcttccttcaaatgtgttgagaggtggacaagaagttaaatatgaacagtgttcaaagtcaacctcagaaatctcaaaagattgtttcaaggagaaaaatgaaaaggaaatggaagaagaagcagaaatgaaggctgtagctacttctcctagtggcagattcctgaaatttgacatagaactaggaagaggagcatttaaaacagtatataaaggactggacactgaaacatgggttgaggttgcttggtgtgagctgcaggaccgaaagttaaccaaagctgagcagcaaagattcaaggaagaagcagagatgttgaagggtctccagcaccccaatatagttcgattttatgattcctgggaatctatattaaaaggaaagaaatgtattgtattagtgactgaactaatgacatctgggaccttaaagacgtacttaaaacgatttaaagtcatgaaaccaaaggtcttaaggagctggtgcaggcaaattttaaaggggttgcagttcttgcacactaggactcctcctattattcaccgggatctgaagtgtgacaatattttcatcacgggacccactggatctgtgaagattggtgatctaggattagccaccttaatgcgtacctcatttgctaagagtgtcattggaactcctgagtttatggctccagagatgtatgaagaacactatgatgaatccgtagatgtttatgcttttggaatgtgtatgctggaaatggccacatcggagtatccttattctgagtgtcagaatgcagctcaaatataccggaaagtaactagtggcataaaaccagccagcttcaataaagtcactgatcctgaagtcaaagaaatcattgaaggatgtattcgtcaaaacaaatctgaaaggttgtctatcagggacctattaaaccatgcattttttgctgaggatacaggactgagggtggagttagcagaagaagatgattgctcaaattcatcccttgctttaagactctgggttgaagaccctaaaaaattgaaaggcaaacacaaagacaatgaagctattgaatttagtttcaacttagaaacagatacacctgaggaagtagcatatgaaatggtcaagtctgggttcttccatgaaagtgattccaaagctgttgctaaatccattagagaccgggtgacgccaataaagaagacaagagagaagaagcctgctggctgtttggaagaacgcagggattctcagtgcaagtctatggggaatgtattccctcagccccagaatacaactttaccccttgctcccgctcagcaaactggggctgaatgtgaagaaactgaagttgatcaacatgttagacaacagcttctacaaagaaaaccacagcagcactgctcctctgttacaggtgacaatttgtctgaggcaggagctgcatcagttatacattcagatacttcaagtcagcccagtgtagcctattcctcaaatcaaacgatgggctctcaaatggtttctaatatcccgcaggctgaagtaaatgttccagggcaaatttattcatctcagcaactagtaggacattaccagcaagtttcagggttacagaagcattcaaagctgactcagccgcagattttgcctttggttcaaggtcagtccactgttttacctgtacatgtccttggaccgacagttgtttcacaaccccaggtttccccattaactgttcagaaggtcccacagataaagcctgtatcccaaccagttggagctgaacaacaagcagctcttctaaaaccagatttagttcgaagcttgaatcaagatgtggcaactacgaaggaaaacgtcagtagccctgataacccaagtggaaatggcaaacaggatcggatcaaacagagaagagcttcctgtccccgaccagagaaggggactaaatttcagcttaccgtccttcaggtatcaacctctggagataacatggtagagtgtcagctggagacacacaacaacaagatggtcaccttcaagtttgatgttgatggtgatgcgccagaggatattgcagactatatggttgaagataactttgtgctggaaagtgagaaagaaaaatttgtagaagaattgagagctattgtaggtcaagcccaggagatccttcatgtccactttgccacagaaagagccactggagttgattctattactgtggactccaacagtagccagacagggtcatctgaacaagtacagataaattctacatctactcaaaccagcaatgaatctgctcctcagtcatccccagttggtcggtggcgattctgtatcaatcagacgataagaaaccgtgagactcagtctcctccttctcttcagcattccatgtctgcggttcctggccgacatccacttcctagtccaaaaaacacaagtaataaggaaatatcacgggacacattgctcactatagaaaataatccatgccaccgtgcacttttcacctccaaatcagaacacaaggatgtggttgatggtaagatttctgaatgtgctagtgtagaaaccaagcagccagctatactttatcaagtggaagataacaggcagataatggcaccagttactaatagttccagttactctactacttcagttcgtgcagttccagctgaatgtgagggactcaccaaacaagcaagcatattcatacctgtgtatccatgtcaccaaactgccagtcaggctgatgcacttatgtcccatcctggcgaatcaactcagacttctggtaactctcttacaactctggcatttgatcaaaagcctcaaaccttatcagtacagcagccagctatggatgcagagtttatttctcaagaaggagaaactacagtgaacactgaagcaagttctcctaagacagtcattcccactcagacccctggccttgaaccaactacccttcaacccactactgtcctggaatcagatggagaaagacctccaaaactggagtttgcagacaaccgaattaaaactctggatgaaaaattaagaaacttgctctatcaggagcacagcatctctagcatctatcccgagagtcagaaggatacccaaagcatagactctccattttcttcctctgctgaagataccctctcctgtccagtgacagaagtcatagccatcagtcactgtggaattaaagatagccctgtacaatcccctaatttccaacagacaggctctaagcttctgtccaatgtggctgcaagtcagcctgctaatatatcagtgttcaaaagggacctgaatgtgataacttctgtacccagcgaattgtgtttacatgagatgtcctcagatgcttcacttccaggggatccagaggcctatcctgctgctgtgtcaagcggtggagccattcatctgcagacaggagtggaaacagaagagatgagatcagcaattgctcctgatcccattcctctgacacgggagtccacagctgatactagggctttgaatagatgtaaagcgatgagtggatcatttcagcggggtcggttccaggtgattacaattcctcagcagcagtcagcaaaaatgacatcttttggaatagaacacatatcagtgttcagtgagacaaaccattctagtgaagaagcctttattaaaacagcaaagtctcagttggtagaaatagaacctgccacacaaaatccaaaaacttcgttttcttatgagaagttacaagctcttcaggaaacctgtaaagaaaataaaggagttcccaaacaaggtgacaacttcttatctttcagcgcagcttgtgagactgatgtatcttcagtgaccccagaaaaggaatttgaagaaacttcagccacaggaagtagcatgcagtctggatctgaactgttgcttaaagagagagagatattgactgctgggaaacagcctagctctgatagtgaattttcagccagtcttgctggcagtggaaagtcagtggcaaagactggtccagagagtaatcagtgcttaccacaccacgaagaacaagcttatgctcaaacacagagttcactcttctattcgccatcttccccaatgagcagtgatgatgaatcagaaatagaggatgaggacttgaaggtggagcttcaaagattacgagaaaaacacattcaggaggtggtaaatcttcaaacccagcagaataaggagctgcaggagctctatgaacgccttcggtcaattaaagatagcaaaacccaatctactgagattcctttgccacctgcatcaccacgtcgaccaagatctttcaaaagcaaacttcgaagccgcccccagtccttgacacatgtggacaatggcatagttgctacagatccactgtgtgtggagagtaatgcagcatcatgccaacagtctccagccagtaaaaaagggatgttcacagatgacttacacaagctggtggatgactggacaaaggaagcagtaggaaattctcttattaagccaagtttaaaccaacttaaacaaagtcaacacaaactagagacagaaaactggaataaagtatctgaaaatactccgtctactatgggctacacatcaacatggatttcttctctgtcccaaatccgtggagctgtcccaacttccttgccacaaggactctcactcccttcatttcctgggccattatcatcatatggaatgcctcacgtttgtcagtataatgctgtggcgggggcggggtatccagtacagtgggtaggaatttcaggaacaacacaacaatctgtagtaattcccgcccaatctgggggaccattccagccagggatgaatatgcaggcatttccaacttcatcagtgcagaatcctgccacaatccctcctggtcctaaatgaatcagagtagatggtgataaaaagggaggttttttcagaattattttcaggacacccaagatattaaagtttcttcctcttgggttctgtcatattttccctcatttgagtttactttagactatatattttttgttccagtgtggtatttgatacagctcatcattctgtagaaatgtgcagtttgcagatagaacactgcacacagaaatgttttttcacttcaaattctatcctctttgatacttgattttttaaaaatactgttcagaatgctttaataagctcagcttgagcattaccatttccaggacactttccatgaattgttgagaagctccccatcccccgccttttttttttttttttttaactgctgctatctgcagctggatactcttctttaaaaatgtttaaaaattatttagattgattctccccaaatgtggatgaactgagaccctccatcagccagagtcttatgggatcttcacttcacatgtttgtcttaggtttacctttcacagaaggcagggtaacttgctgcaggaaacgttttggtgtataaaattagaatcacttttttttttttttttgagatggagtctctctctgtcacccaggttggagtgcagtggtgtgatcttggctcactgctgcaacctccccctcctgggttcaagcgattctcctgcctcagcctcctgagtagctgggactacaggcgccagccaccatgcctggctaatttttgtatttttagtagaggatggggtttcactatgttggccagactggtctcaaactcctaaccttgtgatccgccctccttagcccccccaaaaaattacaataattttgtcaaccaatacagaacatgagccctttttaaatgtgatttcccgtcatcacagcagtaggatgaagccttgttttgggtgagacagagggaaagggaaaaaacagaattgtaacagttccttgattctgcagatactgctgctgttttacgatttcagtaataattcaaagcagctgtctccttgtttctcacatgcatactacattggttttgagcatctgagaggcattggtttgtcttgcattcttttgcaaggcatatattgcagctgatatgaatctcgtttggggggaatccttgtattcctaacaagggggattaaagctacacctcaatccattcttctgaagtgaaatttacttgacacagtaggtttcgagacttacatatgaaacactggctttacagggttctcagagatgtggggtatacactgtcctgcagtgagatagtagaccctagaaggatactatttaagttgtccttagctctttttaattacaatttttagttgttagaatttctttttagtatctatagtatcttagatgattttagatcttaaatgagtttggcagcctctttagaatctgagagagatcactgtcaagttgcactttactgggttttatccagttttaggaggaggggaggcaatgtcaaaatgtacacctttggtttttaagaaggttaactataataatgttaaaggctagtcacagggttacctaatgctcagtctgtgaaacctaaatagaattcttaaaatgttatttaccaactaagtattcatgttcaaattacttaccttccactctgaagactttaaggtcatttctaatacacatttacctaattaggagttctgtctactagtaaacattccaaattgctacccaacattactgttaacagattttcctccgtattcttctaaaaattataccccatgggcttgccaggtaatgacgaaaacttaatgggtgtacttttttttttttttgcacagtctactttgtgacattaagtacctcttttccaaaaaaaaaaaaaaatgtgttttatgttgcttacctgaggatcacatccattatcaagaagattctgtcgctataatttgaggcatctagggcagcattttgagaattgctgttgataagatccactgtttcttttcatagaacatgatctgttttgtatgagtctttccaaatgttaagtacagattcttcaaatttcttgtacagtattggtttgcagtttaaagtgattttaggacattagtgtaatgcaaatgcttgcattgcactgttttccatatgtataaaaacaatgctcctaaaatccctaattctttaaaactgcctgtgtttcattataaaaagttggctttgtgtaattacaccgagccatacaacctataaagtgaaaatactgcagattttaggaccccttcttctctagtcacaatcattttaaacagtgtaccccaggatgaaaaaagctccatggctgacatgtacaattacatgtattaatgactgctctacatcctatgttctgcctttggccaccacctctattccacatataattcatcattcttgtttgcctgcagactcttgcagtgccttgtaatatttacaatcttttcaggtttttgctggaaagaaaagtagtcttctaaagtttgaagatggtgaatagtgtactgctgtctccatgctgactgcagtaaccgggttatcatatatgttatgtatacattatgtatatataacatgtgtacatttaaaaatacagaaaaaagtgagcttgtgcagaaatggagaaaacaatgttattctcatcactgtggggttttattaaaattattttttcccatgacttacatgtttggttcagattatagtcactttgactgtaaatactggctagttttctatccagggcttttgcattatttcataattttgctaaatcatataatagtgctattttcatccttgtctgaggtacttttcctccccagaaataattaacttgaggtaaagctcagaaattcccttcttaacaaagagcctactatataaaaagggccttcctttccaaaaaacacacaaacctgtccttttcattttccttcttgtagaggagaaaatggttgtacttaaccatcctgcttgtaaagtttattcagaggatagtctgtatgtccagccaccatgtttacttctcaaagtgcaagtctgatgaatagtactgtatctccatatgtggtaatgtgagcatttcatcatgaagtacctgctgctatgtctgtgaagttgggtgtaacatcataagaatatgaaaccagtattggtgtaaatctaatgaaaataaccctatgtatatttgtagcagtcttgaatctctatttaaggtaatttgctgtaatataacaaatattcattctgtttttcatcccttccttgccagttttatatcaagcatgaattccaatggtttgacagcaaaattatctgtgaaagtttaaaaggcacttttctgctgtgatttttggattgagtgtggagtgttatgtacagtttgatgggatatatcattttagaaccccagatttaattctagtccaattaattttgtttaactacctcgttttcagtgctgttttgggtgcacaagtaaacactacctgtgaaacttgcttttttgccttgattctcagtattctttcagattataaatctggtctgcctcttttttcccagtgctagccaacagtttgagatgagagggatcatcactctcatctgtgtttaagtggagagccatgtgcttctgtgaaatatgctttggggatttgggggtggagagcagaagaataattgaaattggtggcaatataggatttaggtgtaggagttagttataaaataaacaaatggtaagaaagtacctgaattagacaatccagtgcctataactttgcattttttattagagatgcatttctcgtctgtgtgcctaaagggcaatgggttgaaattgctttaactaccacagcgaaatatttgacaaatccttcagcaatggcctatcattcaacatatattagcacagtgctaggtatttgcagtggtattttgttaccttaaaacggccaaatgcatttagttgaaatgtagttgatagtaagggttttatataactttatccaatctctaaagtttatggaagcattgactttcttctttgctgtcttttctgagtgatgaaaatgatgcattccttttttttccttgaaaactcagcaaatgtttgtaaccagatgttccttgtttcacatgtttactgtgtaacactacagcatatttaatattggtaaatactgtatttcagtcattatgcataagtacattcctgaggtatatttgccatcattttgggattcagttattttatcttctgtttgggtcagaaaaacttgaactatctgaggtggtatgcaggccattttctagaagattgttttttgaatctgtagtttatcaaggacttgttccccccctccctttgtttagaagaggaatcagaaaaggggggtggtgtgtagaaaaggcctttgatttgataggtgtaatttctaagattgaaattttaaaaatgcagatcgtaagatagtaacactcaaacttgataaaatcctttgaattgaaattagtatgaaatttttatggaaccaaatgccttcaggtcaccctggaaatagtctttgtatgtgaaagatcaacacaaacattggtcaggaaccctgacagccaatatatgaaggagcctgggatagtaactaggttacactaaagttattttcaactaagatagctagacgagtgtacaaaccaatagctcctattctggaaggttttctttttattaaaaaaaattcaaacaaggttaaaagtcaagcaagaagggaagagagaaactgggttctgagaaaaaaatgtgccagtataaaataaactcctaaatgcgtgcttgtcatcctctagtttttttttaagttgaatttcttttccactgtaacttaagatttgagattgaggtttgcggtccagaacataccctcagcagatacagtgactaactggaaagtgcagttgttcaaggtctgtcatgctcaatcacctaaagctataatttgtttgatatattaagcatgtagacctagtgcagcatgggagccactcaggaagtttatgcaattaataaactttcagcataatttactatgaagtatgcagaatttcaccctcttctccacacttaacatttagttgtatatgtgaactctcctttcttaattggggaatgtagcattatatagaatgttgttaaagttaattttaatcctttttgacattaacctttttttttttttggtaaaccaagtgatctgcctttcagcaactgtcttattttggttctttgaaactgtgatttttatttcatttgtacccaaccattgtaagtattttgttttgtttcctggaaattctgttttgaaacagaaaataaaggctgtgttaaatgagtatgttatcttattaaaatgctgccatagtcactgcaa

SEQ ID NO: 296186 - protein, 121 aa, Artificial Sequence
  derived and/or modified sequence
MHTLLAATKDSLAMDPPVVNRPKKSKTKKAPIKTITKAAPAAPPVPAANEIATNKPKITWQALNLPVITQISQALPTTEVTNTQASSVTAQPKKANKMKRVTAKAAQGSQSPTGHEGGTIQ

SEQ ID NO: 296187 - protein, 176 aa, Artificial Sequence
  derived and/or modified sequence
MDRRNDYGYRVPLFQGPLPPPGSLGLPFPPDIQTETTEEDSVLLMHTLLAATKDSLAMDPPVVNRPKKSKTKKAPIKTITKAAPAAPPVPAANEIATNKPKITWQALNLPVITQISQALPTTEVTNTQASSVTAQPKKANKMKRVTAKAAQGSQSPTGHEGGTIQLKSPLQVLKLP

SEQ ID NO: 296188 - protein, 681 aa, Artificial Sequence
  derived and/or modified sequence
MDRRNDYGYRVPLFQGPLPPPGSLGLPFPPDIQTETTEEDSVLLMHTLLAATKDSLAMDPPVVNRPKKSKTKKAPIKTITKAAPAAPPVPAANEIATNKPKITWQALNLPVITQISQALPTTEVTNTQASSVTAQPKKANKMKRVTAKAAQGSQSPTGHEGGTIQLKSPLQVLKLPVISQNIHAPIANESASSQALITSIKPKKASKAKKAANKAIASATEVSLAATATHTATTQGQITNETASIHTTAASIRTKKASKARKTIAKVINTDTEHIEALNVTDAATRQIEASVVAIRPKKSKGKKAASRGPNSVSEISEAPLATQIVTNQALAATLRVKRGSRARKAATKARATESQTPNADQGAQAKIASAQTNVSALETQVAAAVQALADDYLAQLSLEPTTRTRGKRNRKSKHLNGDERSGSNYRRIPWGRRPAPPRDVAILQERANKLVKYLLVKDQTKIPIKRSDMLRDVIQEYDEYFPEIIERASYTLEKMFRVNLKEIDKQSSLYILISTQESSAGILGTTKDTPKLGLLMVILSVIFMNGNKASEAVIWEVLRKLGLRPGVRHSLFGEVRKLITDEFVKQKYLEYKRVPNSRPPEYEFFWGLRSYHETSKMKVLKFACRVQKKDPKDWAVQYREAVEMEVQAAAVAVAEAEARAEWFQHQHWLYWRTQHQHGLQ

SEQ ID NO: 296189 - protein, 123 aa, Artificial Sequence
  derived and/or modified sequence
MHTLLAATKDSLAMDPPVVNRPKKSKTKKAPIKTITKAAPAAPPVPAANEIATNKPKITWQALNLPVITQISQALPTTEVTNTQASSVTAQPKKANKMKRVTAKAAQGSQSPTGHEGGTIQLK

SEQ ID NO: 296190 - DNA, 693 bp, Artificial Sequence
  derived and/or modified sequence
atgcacaccctgctggccgccaccaaggacagcctggccatggacccccccgtggtgaacagacccaagaagagcaagaccaagaaggcccccatcaagaccatcaccaaggccgcccccgccgccccccccgtgcccgccgccaacgagatcgccaccaacaagcccaagatcacctggcaggccctgaacctgcccgtgatcacccagatcagccaggccctgcccaccaccgaggtgaccaacacccaggccagcagcgtgaccgcccagcccaagaaggccaacaagatgaagagagtgaccgccaaggccgcccagggcagccagagccccaccggccacgagggcggcaccatccagctgaagagccccctgcaggtgctgaagctgcccgtgatcagccagaacatccacgcccccatcgccaacgagagcgccagcagccaggccctgatcaccagcatcaagcccaagaaggccagcaaggccaagaaggccgccaacaaggccatcgccagcgccaccgaggtgagcctggccgccaccgccacccacaccgccaccacccagggccagatcaccaacgagaccgccagcatccacaccaccgccgccagcatcagaaccaagaaggccagcaaggccagaaagaccatcgccaaggtgatcaacaccgacaccgagcactag

SEQ ID NO: 296191 - DNA, 510 bp, Artificial Sequence
  derived and/or modified sequence
atggacagaagaaacgactacggctacagagtgcccctgttccagggccccctgcccccccccggcagcctgggcctgcccttcccccccgacatccagaccgagaccaccgaggaggacagcgtgctgctgatgcacaccctgctggccgccaccaaggacagcctggccatggacccccccgtggtgaacagacccaagaagagcaagaccaagaaggcccccatcaagaccatcaccaaggccgcccccgccgccccccccgtgcccgccgccaacgagatcgccaccaacaagcccaagatcacctggcaggccctgaacctgcccgtgatcacccagatcagccaggccctgcccaccaccgaggtgaccaacacccaggccagcagcgtgaccgcccagcccaagaaggccaacaagatgaagagagtgaccgccaaggccgcccagggcagccagagccccaccggccacgagggcggcaccatccagctgaagagcccctag

SEQ ID NO: 296192 - DNA, 366 bp, Artificial Sequence
  derived and/or modified sequence
atgcacaccctgctggccgccaccaaggacagcctggccatggacccccccgtggtgaacagacccaagaagagcaagaccaagaaggcccccatcaagaccatcaccaaggccgcccccgccgccccccccgtgcccgccgccaacgagatcgccaccaacaagcccaagatcacctggcaggccctgaacctgcccgtgatcacccagatcagccaggccctgcccaccaccgaggtgaccaacacccaggccagcagcgtgaccgcccagcccaagaaggccaacaagatgaagagagtgaccgccaaggccgcccagggcagccagagccccaccggccacgagggcggcaccatccagtag

SEQ ID NO: 296193 - DNA, 579 bp, Artificial Sequence
  derived and/or modified sequence
atgcacaccctgctggccgccaccaaggacagcctggccatggacccccccgtggtgaacagacccaagaagagcaagaccaagaaggcccccatcaagaccatcaccaaggccgcccccgccgccccccccgtgcccgccgccaacgagatcgccaccaacaagcccaagatcacctggcaggccctgaacctgcccgtgatcacccagatcagccaggccctgcccaccaccgaggtgaccaacacccaggccagcagcgtgaccgcccagcccaagaaggccaacaagatgaagagagtgaccgccaaggccgcccagggcagccagagccccaccggccacgagggcggcaccatccagctgaagagccccctgcaggtgctgaagctgcccgtgatcagccagaacatccacgcccccatcgccaacgagagcgccagcagccaggccctgatcaccagcatcaagcccaagaaggccagcaaggccaagaaggccgccaacaaggccatcgccagcgccaccgaggtgagcctggccgccaccgccacccacaccgccaccacccagggctag

SEQ ID NO: 296194 - DNA, 531 bp, Artificial Sequence
  derived and/or modified sequence
atggacagaagaaacgactacggctacagagtgcccctgttccagggccccctgcccccccccggcagcctgggcctgcccttcccccccgacatccagaccgagaccaccgaggaggacagcgtgctgctgatgcacaccctgctggccgccaccaaggacagcctggccatggacccccccgtggtgaacagacccaagaagagcaagaccaagaaggcccccatcaagaccatcaccaaggccgcccccgccgccccccccgtgcccgccgccaacgagatcgccaccaacaagcccaagatcacctggcaggccctgaacctgcccgtgatcacccagatcagccaggccctgcccaccaccgaggtgaccaacacccaggccagcagcgtgaccgcccagcccaagaaggccaacaagatgaagagagtgaccgccaaggccgcccagggcagccagagccccaccggccacgagggcggcaccatccagctgaagagccccctgcaggtgctgaagctgccctag

SEQ ID NO: 296195 - DNA, 507 bp, Artificial Sequence
  derived and/or modified sequence
atggacagaagaaacgactacggctacagagtgcccctgttccagggccccctgcccccccccggcagcctgggcctgcccttcccccccgacatccagaccgagaccaccgaggaggacagcgtgctgctgatgcacaccctgctggccgccaccaaggacagcctggccatggacccccccgtggtgaacagacccaagaagagcaagaccaagaaggcccccatcaagaccatcaccaaggccgcccccgccgccccccccgtgcccgccgccaacgagatcgccaccaacaagcccaagatcacctggcaggccctgaacctgcccgtgatcacccagatcagccaggccctgcccaccaccgaggtgaccaacacccaggccagcagcgtgaccgcccagcccaagaaggccaacaagatgaagagagtgaccgccaaggccgcccagggcagccagagccccaccggccacgagggcggcaccatccagctgaagagctag

SEQ ID NO: 296196 - DNA, 2046 bp, Artificial Sequence
  derived and/or modified sequence
atggacagaagaaacgactacggctacagagtgcccctgttccagggccccctgcccccccccggcagcctgggcctgcccttcccccccgacatccagaccgagaccaccgaggaggacagcgtgctgctgatgcacaccctgctggccgccaccaaggacagcctggccatggacccccccgtggtgaacagacccaagaagagcaagaccaagaaggcccccatcaagaccatcaccaaggccgcccccgccgccccccccgtgcccgccgccaacgagatcgccaccaacaagcccaagatcacctggcaggccctgaacctgcccgtgatcacccagatcagccaggccctgcccaccaccgaggtgaccaacacccaggccagcagcgtgaccgcccagcccaagaaggccaacaagatgaagagagtgaccgccaaggccgcccagggcagccagagccccaccggccacgagggcggcaccatccagctgaagagccccctgcaggtgctgaagctgcccgtgatcagccagaacatccacgcccccatcgccaacgagagcgccagcagccaggccctgatcaccagcatcaagcccaagaaggccagcaaggccaagaaggccgccaacaaggccatcgccagcgccaccgaggtgagcctggccgccaccgccacccacaccgccaccacccagggccagatcaccaacgagaccgccagcatccacaccaccgccgccagcatcagaaccaagaaggccagcaaggccagaaagaccatcgccaaggtgatcaacaccgacaccgagcacatcgaggccctgaacgtgaccgacgccgccaccagacagatcgaggccagcgtggtggccatcagacccaagaagagcaagggcaagaaggccgccagcagaggccccaacagcgtgagcgagatcagcgaggcccccctggccacccagatcgtgaccaaccaggccctggccgccaccctgagagtgaagagaggcagcagagccagaaaggccgccaccaaggccagagccaccgagagccagacccccaacgccgaccagggcgcccaggccaagatcgccagcgcccagaccaacgtgagcgccctggagacccaggtggccgccgccgtgcaggccctggccgacgactacctggcccagctgagcctggagcccaccaccagaaccagaggcaagagaaacagaaagagcaagcacctgaacggcgacgagagaagcggcagcaactacagaagaatcccctggggcagaagacccgccccccccagagacgtggccatcctgcaggagagagccaacaagctggtgaagtacctgctggtgaaggaccagaccaagatccccatcaagagaagcgacatgctgagagacgtgatccaggagtacgacgagtacttccccgagatcatcgagagagccagctacaccctggagaagatgttcagagtgaacctgaaggagatcgacaagcagagcagcctgtacatcctgatcagcacccaggagagcagcgccggcatcctgggcaccaccaaggacacccccaagctgggcctgctgatggtgatcctgagcgtgatcttcatgaacggcaacaaggccagcgaggccgtgatctgggaggtgctgagaaagctgggcctgagacccggcgtgagacacagcctgttcggcgaggtgagaaagctgatcaccgacgagttcgtgaagcagaagtacctggagtacaagagagtgcccaacagcagaccccccgagtacgagttcttctggggcctgagaagctaccacgagaccagcaagatgaaggtgctgaagttcgcctgcagagtgcagaagaaggaccccaaggactgggccgtgcagtacagagaggccgtggagatggaggtgcaggccgccgccgtggccgtggccgaggccgaggccagagccgagtggttccagcaccagcactggctgtactggagaacccagcaccagcacggcctgcagtag

SEQ ID NO: 296197 - DNA, 372 bp, Artificial Sequence
  derived and/or modified sequence
atgcacaccctgctggccgccaccaaggacagcctggccatggacccccccgtggtgaacagacccaagaagagcaagaccaagaaggcccccatcaagaccatcaccaaggccgcccccgccgccccccccgtgcccgccgccaacgagatcgccaccaacaagcccaagatcacctggcaggccctgaacctgcccgtgatcacccagatcagccaggccctgcccaccaccgaggtgaccaacacccaggccagcagcgtgaccgcccagcccaagaaggccaacaagatgaagagagtgaccgccaaggccgcccagggcagccagagccccaccggccacgagggcggcaccatccagctgaagtag

SEQ ID NO: 296198 - DNA, 216 bp, Artificial Sequence
  derived and/or modified sequence
atgcacaccctgctggccgccaccaaggacagcctggccatggacccccccgtggtgaacagacccaagaagagcaagaccaagaaggcccccatcaagaccatcaccaaggccgcccccgccgccccccccgtgcccgccgccaacgagatcgccaccaacaagcccaagatcacctggcaggccctgaacctgcccgtgatcacccagatctag

SEQ ID NO: 296199 - DNA, 195 bp, Artificial Sequence
  derived and/or modified sequence
atgcacaccctgctggccgccaccaaggacagcctggccatggacccccccgtggtgaacagacccaagaagagcaagaccaagaaggcccccatcaagaccatcaccaaggccgcccccgccgccccccccgtgcccgccgccaacgagatcgccaccaacaagcccaagatcacctggcaggccctgaactag

SEQ ID NO: 296200 - DNA, 693 bp, Artificial Sequence
  derived and/or modified sequence
atgcacactttgctggctgccacaaaagactcactggcaatggatcctcctgttgtgaaccgtcccaaaaaatccaaaacaaaaaaagcccccatcaagacaatcactaaggccgccccagctgccccccctgtgccggccgctaacgagatcgccacaaataagccaaagattacctggcaagccctcaatttgcccgttatcacccaaattagccaagctctccccaccaccgaggtcactaatactcaggcctccagcgtgactgcccaaccaaaaaaagcaaacaaaatgaagcgggtcacggccaaggccgcacagggaagtcaaagccctacagggcacgagggaggtacaatacaactcaagtctcccttgcaggtgctgaagttacctgtcatcagtcagaacatacacgcaccgatcgctaatgagagtgctagttcgcaggccttgattacttcaattaagcccaagaaggcatcaaaggccaaaaaagctgcaaataaggccattgcctccgccacggaggtgtcacttgcagcaaccgccacccacactgccacaacgcagggacagattaccaacgagacagcttcaattcacacaaccgccgcttcaataaggaccaagaaggcgtcgaaagctcgtaagaccatcgctaaagtaatcaacaccgacaccgagcactag

SEQ ID NO: 296201 - DNA, 510 bp, Artificial Sequence
  derived and/or modified sequence
atggatagaaggaacgactatgggtatcgggtcccgttgtttcagggcccacttccaccccccggatccttaggactgcccttcccgcctgacatccaaactgagaccaccgaagaggacagcgtcctgcttatgcataccttactggctgcgacgaaggattccctcgcaatggaccccccagtggtgaaccgacctaaaaaatccaaaaccaaaaaagcccctattaagacgatcaccaaggccgcccctgccgccccccccgtaccggccgctaacgagatcgccacaaataagcctaagattacatggcaggccctaaatctccccgtgatcacccagattagccaggccttgcccactactgaggtcacaaacacccaagccagcagcgtaaccgcccagcctaaaaaagcgaacaagatgaagcgtgttaccgccaaggcagctcagggcagccagtctcctacagggcacgagggcggaactatccaactcaagtccccctag

SEQ ID NO: 296202 - DNA, 366 bp, Artificial Sequence
  derived and/or modified sequence
atgcacaccttgctggccgcaaccaaagatagccttgcaatggaccctccggttgtgaaccgaccgaagaagtctaaaactaaaaaggcacccattaagactatcaccaaagccgctccagcagctcccccagtgccggctgccaacgaaatcgccacaaataaacctaaaataacctggcaggccctgaacctccccgttatcactcagatctcacaggccctaccgactaccgaggtgacaaatacacaagcatccagtgtgacggcgcagccaaaaaaagccaataagatgaagagagtgactgcgaaggctgcgcaggggagccagagtccgaccgggcacgaggggggcaccattcagtag

SEQ ID NO: 296203 - DNA, 579 bp, Artificial Sequence
  derived and/or modified sequence
atgcacactttgctagcggctaccaaagatagccttgctatggatccccccgtcgtgaacagacctaagaagagcaaaaccaaaaaagcccccattaagaccatcacaaaggctgcccccgccgctccgcctgtgcctgccgccaatgagatcgctaccaataagccgaaaatcacatggcaggctctaaatttgcccgtcattacgcagatcagtcaggccttgccgaccacggaggtgaccaacactcaagcgtcgagcgtaaccgcccagcctaagaaagcaaataagatgaagcgcgtgaccgcaaaagccgcccaaggcagccagtcacccaccggccacgagggcggtacaattcaattgaaatcccctctccaggtgctgaaactacctgtaatctcccaaaatattcacgccccgatcgccaacgaaagtgcaagttctcaggcacttataactagcattaagcctaaaaaggccagcaaggcaaaaaaggctgccaataaggctatcgcatcagctactgaagtcagcttggcagcaacagcgacccacacagccactacacagggatag

SEQ ID NO: 296204 - DNA, 531 bp, Artificial Sequence
  derived and/or modified sequence
atggatcggcgcaatgattatggctatagggttcctctcttccaggggcccctgcctcctccggggagcctggggctgccgtttcctcctgatatacagactgaaacgaccgaagaagattctgtgttactcatgcacacccttctggctgctaccaaggactcactggcaatggatccacccgtagttaatcgcccaaaaaagtctaagactaaaaaggcccctattaagaccattacaaaggccgcaccggcagcccctccagtgccagctgccaacgaaatcgcaacaaacaagcccaagataacttggcaggccctcaacctccccgtgatcactcagatctctcaggccctccccacaacagaggtgacaaacacccaagcatctagcgttacggcccagcccaaaaaggctaataagatgaagagagtcacggccaaggccgctcagggctcccagtcccctacaggccatgaagggggcactattcagcttaagtcacccctgcaggtgttaaagctgccctag

SEQ ID NO: 296205 - DNA, 507 bp, Artificial Sequence
  derived and/or modified sequence
atggatagacgtaatgactacggttaccgcgtgccgctatttcaagggcccctcccacccccagggtccctgggacttccttttcctccagacatccagactgaaacaacagaggaggactccgtcctgctgatgcatacactcctggccgcaacgaaagatagcctggccatggatcctcctgtggtgaatcgaccaaagaagagcaagactaaaaaggccccaattaagacgattaccaaagccgctcccgctgcccccccggtgccagctgctaatgagatcgcgactaacaaacctaagataacgtggcaagcgctcaacctaccagtcattacccagatctcccaagccctccccaccacagaggttacaaacacccaggcaagttccgtcaccgcccagcctaaaaaagccaataagatgaaaagagttactgccaaggccgcccagggctcacagtcccccacggggcacgaggggggaactatccaactgaagagctag

SEQ ID NO: 296206 - DNA, 2046 bp, Artificial Sequence
  derived and/or modified sequence
atggaccgacggaacgattatggataccgcgtgcctctgttccagggacccctgccccctcccggatcactgggcctcccttttcctccagacatccagaccgaaacaacagaagaggacagcgtgctgctgatgcataccctgctggcagcaactaaagacagcttggctatggatccccctgtcgtgaatcgaccgaagaagagcaagacgaaaaaagcacctataaaaactataacaaaggcggcaccggcagcccctcccgtgcccgcagcaaatgagatcgctaccaacaagcctaaaatcacttggcaggctctcaacttgccagtcattacccagatatcacaggccttacctacaactgaggtaaccaatacccaggcctcgagcgtcacagctcaaccaaaaaaggccaacaagatgaagcgagtaaccgcaaaagccgcccagggctcgcagagccccaccggacacgagggcgggaccatacagctcaagagcccactccaggtactgaagctccccgtgatttcacagaatatccacgccccaattgccaacgagtccgcctctagccaggccttgattacatccattaagccaaagaaagccagcaaggcgaaaaaagcagctaacaaagctatcgcatctgccacagaggtcagtctggctgctactgcaactcacacagcaacaacccagggacagatcaccaatgaaactgcctctatccacacaaccgctgcttcaataaggacaaagaaagcttccaaagccagaaaaaccatagcaaaggtgattaacacagatacggagcacatagaggctttgaacgtgacagatgcagccacccgccaaattgaagccagcgtggtggcgataaggccaaaaaagtcaaagggcaaaaaggcggcgtccaggggtcccaatagcgtgtccgaaattagcgaagctcccctggccacccagatcgttacaaatcaggccctagctgccaccctgagggtgaaaagaggctcacgggcccgaaaagcggctactaaagcccgcgctacagaatctcagacccctaacgccgatcagggagctcaagccaaaatagcttcagcccaaacgaacgtatccgctttggagacccaagtggccgccgcagttcaggcactggccgatgactacctagcacagctgtccttggagcctacaacccgaacccgcggaaaaagaaaccgcaaaagcaaacacctgaacggggatgagagaagtggctccaattatcgccgaataccgtggggacgtcgaccagcccctccaagggatgttgctattttgcaagagcgtgccaataagctggtaaaatatctgctcgtcaaagaccagacaaagattcctatcaagagatccgacatgcttagggacgtcatacaagagtacgacgaatacttcccagaaatcatcgaaagggcaagctacaccctcgagaaaatgttccgggtgaacctaaaagagattgataagcagtccagcttatatatcctgattagtacccaagagtcctctgcaggaattctcggcaccactaaggacacccccaagcttggcttgttgatggttattttgagtgtgatctttatgaacggtaataaagcgagcgaggcggttatttgggaagttctccgcaaactaggccttcggcctggggttcggcattcactgttcggggaggttagaaagctgatcactgacgagtttgttaagcagaaatatctggaatacaagagagtgcctaacagcagaccccccgaatatgagtttttttggggattgaggtcctatcacgaaacttcaaagatgaaagtgttgaagttcgcatgccgggtacagaaaaaggaccctaaagactgggccgtgcagtaccgcgaagcagtggagatggaggtccaagcagcagctgtagcagttgctgaggccgaggctagagctgagtggtttcagcaccagcactggctatactggagaacacagcaccaacacggcttgcagtag

SEQ ID NO: 296207 - DNA, 372 bp, Artificial Sequence
  derived and/or modified sequence
atgcacaccctgcttgctgctaccaaagattccctggccatggatccgccagtcgtgaatcgcccgaaaaaaagcaagactaagaaggcccccattaaaactatcaccaaggctgcgcccgccgctccgcctgtgcccgccgctaatgaaatagcaacaaacaagcccaaaatcacatggcaagcactaaatttgcctgtgatcacccagatcagccaggcactgccgacgactgaggtgactaacacccaagctagctcagttaccgcacagccgaagaaagcgaacaagatgaagcgcgttactgccaaggcggcccagggatcccagtcacccaccggtcatgagggcggcacgatccagcttaagtag

SEQ ID NO: 296208 - DNA, 216 bp, Artificial Sequence
  derived and/or modified sequence
atgcatactctccttgccgccaccaaggactcactcgccatggaccctcctgtcgtaaatcggccaaagaaatctaaaacaaagaaagcccccattaagaccatcaccaaagccgcaccagccgcaccacctgttcccgccgcgaatgagatagcgacgaacaagcccaagattacctggcaggcccttaaccttccagtgatcacccagatttag

SEQ ID NO: 296209 - DNA, 195 bp, Artificial Sequence
  derived and/or modified sequence
atgcatacgctactggctgccaccaaggacagccttgctatggatccacccgtggtcaacagaccaaagaagtctaagactaaaaaagctcccatcaaaacaataaccaaggcagcacctgctgcccctccggtccccgccgcaaatgagatcgcaactaataagcctaagattacttggcaagccctgaactag

SEQ ID NO: 296210 - DNA, 693 bp, Artificial Sequence
  derived and/or modified sequence
atgcacaccctgctggccgccaccaaggacagcctggccatggacccccctgtggtgaaccggcccaagaagagcaagaccaagaaggcccccatcaagaccatcaccaaggccgccccagctgcccctcctgtgcctgctgccaatgaaattgccaccaacaagcccaagatcacctggcaggccctgaacctgcccgtcatcacccagatcagccaggccctgcccaccacagaggtgaccaacacccaggccagctctgtgacagcccagcccaagaaggccaacaagatgaagagggtgacagccaaggccgcccagggcagccagagccccactggacatgaaggaggcaccatccagctgaagagccccctgcaggtgctgaagctgcccgtcatcagccagaacatccacgcccccatcgccaatgaaagtgccagcagccaggccctgatcaccagcatcaagcccaagaaggccagcaaggccaagaaggccgccaacaaggccatcgccagcgccacagaggtgtccctggccgccacagccacccacacagccaccacccagggccagatcaccaatgaaacagccagcatccacaccacagctgccagcatccgcaccaagaaggccagcaaggccaggaagaccatcgccaaggtgatcaacacagacacagagcactag

SEQ ID NO: 296211 - DNA, 510 bp, Artificial Sequence
  derived and/or modified sequence
atggacagaagaaatgactatggctacagagtgcccctcttccagggccccctgcccccacctggcagcctgggcctgcccttccccccagacatccagacagagaccacagaagaagattctgtgctgctgatgcacaccctgctggccgccaccaaggacagcctggccatggacccccctgtggtgaaccggcccaagaagagcaagaccaagaaggcccccatcaagaccatcaccaaggccgccccagctgcccctcctgtgcctgctgccaatgaaattgccaccaacaagcccaagatcacctggcaggccctgaacctgcccgtcatcacccagatcagccaggccctgcccaccacagaggtgaccaacacccaggccagctctgtgacagcccagcccaagaaggccaacaagatgaagagggtgacagccaaggccgcccagggcagccagagccccactggacatgaaggaggcaccatccagctgaagagcccctag

SEQ ID NO: 296212 - DNA, 366 bp, Artificial Sequence
  derived and/or modified sequence
atgcacaccctgctggccgccaccaaggacagcctggccatggacccccctgtggtgaaccggcccaagaagagcaagaccaagaaggcccccatcaagaccatcaccaaggccgccccagctgcccctcctgtgcctgctgccaatgaaattgccaccaacaagcccaagatcacctggcaggccctgaacctgcccgtcatcacccagatcagccaggccctgcccaccacagaggtgaccaacacccaggccagctctgtgacagcccagcccaagaaggccaacaagatgaagagggtgacagccaaggccgcccagggcagccagagccccactggacatgaaggaggcaccatccagtag

SEQ ID NO: 296213 - DNA, 579 bp, Artificial Sequence
  derived and/or modified sequence
atgcacaccctgctggccgccaccaaggacagcctggccatggacccccctgtggtgaaccggcccaagaagagcaagaccaagaaggcccccatcaagaccatcaccaaggccgccccagctgcccctcctgtgcctgctgccaatgaaattgccaccaacaagcccaagatcacctggcaggccctgaacctgcccgtcatcacccagatcagccaggccctgcccaccacagaggtgaccaacacccaggccagctctgtgacagcccagcccaagaaggccaacaagatgaagagggtgacagccaaggccgcccagggcagccagagccccactggacatgaaggaggcaccatccagctgaagagccccctgcaggtgctgaagctgcccgtcatcagccagaacatccacgcccccatcgccaatgaaagtgccagcagccaggccctgatcaccagcatcaagcccaagaaggccagcaaggccaagaaggccgccaacaaggccatcgccagcgccacagaggtgtccctggccgccacagccacccacacagccaccacccagggctag

SEQ ID NO: 296214 - DNA, 531 bp, Artificial Sequence
  derived and/or modified sequence
atggacagaagaaatgactatggctacagagtgcccctcttccagggccccctgcccccacctggcagcctgggcctgcccttccccccagacatccagacagagaccacagaagaagattctgtgctgctgatgcacaccctgctggccgccaccaaggacagcctggccatggacccccctgtggtgaaccggcccaagaagagcaagaccaagaaggcccccatcaagaccatcaccaaggccgccccagctgcccctcctgtgcctgctgccaatgaaattgccaccaacaagcccaagatcacctggcaggccctgaacctgcccgtcatcacccagatcagccaggccctgcccaccacagaggtgaccaacacccaggccagctctgtgacagcccagcccaagaaggccaacaagatgaagagggtgacagccaaggccgcccagggcagccagagccccactggacatgaaggaggcaccatccagctgaagagccccctgcaggtgctgaagctgccctag

SEQ ID NO: 296215 - DNA, 507 bp, Artificial Sequence
  derived and/or modified sequence
atggacagaagaaatgactatggctacagagtgcccctcttccagggccccctgcccccacctggcagcctgggcctgcccttccccccagacatccagacagagaccacagaagaagattctgtgctgctgatgcacaccctgctggccgccaccaaggacagcctggccatggacccccctgtggtgaaccggcccaagaagagcaagaccaagaaggcccccatcaagaccatcaccaaggccgccccagctgcccctcctgtgcctgctgccaatgaaattgccaccaacaagcccaagatcacctggcaggccctgaacctgcccgtcatcacccagatcagccaggccctgcccaccacagaggtgaccaacacccaggccagctctgtgacagcccagcccaagaaggccaacaagatgaagagggtgacagccaaggccgcccagggcagccagagccccactggacatgaaggaggcaccatccagctgaagagctag

SEQ ID NO: 296216 - DNA, 2046 bp, Artificial Sequence
  derived and/or modified sequence
atggacagaagaaatgactatggctacagagtgcccctcttccagggccccctgcccccacctggcagcctgggcctgcccttccccccagacatccagacagagaccacagaagaagattctgtgctgctgatgcacaccctgctggccgccaccaaggacagcctggccatggacccccctgtggtgaaccggcccaagaagagcaagaccaagaaggcccccatcaagaccatcaccaaggccgccccagctgcccctcctgtgcctgctgccaatgaaattgccaccaacaagcccaagatcacctggcaggccctgaacctgcccgtcatcacccagatcagccaggccctgcccaccacagaggtgaccaacacccaggccagctctgtgacagcccagcccaagaaggccaacaagatgaagagggtgacagccaaggccgcccagggcagccagagccccactggacatgaaggaggcaccatccagctgaagagccccctgcaggtgctgaagctgcccgtcatcagccagaacatccacgcccccatcgccaatgaaagtgccagcagccaggccctgatcaccagcatcaagcccaagaaggccagcaaggccaagaaggccgccaacaaggccatcgccagcgccacagaggtgtccctggccgccacagccacccacacagccaccacccagggccagatcaccaatgaaacagccagcatccacaccacagctgccagcatccgcaccaagaaggccagcaaggccaggaagaccatcgccaaggtgatcaacacagacacagagcacatcgaggccctgaatgtgacagatgctgccacccggcagatcgaggcctctgtggtggccatccggcccaagaagagcaagggcaagaaggccgccagccggggccccaacagcgtgtctgagatcagcgaggcccccctggccacccagatcgtgaccaaccaggccctggccgccaccctgcgggtgaagaggggcagccgggccaggaaggccgccaccaaggcccgggccacagagagccagaccccaaatgctgaccagggcgcccaggccaagatcgccagcgcccagaccaacgtgtctgccctggagacccaggtggccgctgctgtgcaggccctggctgatgactacctggcccagctgagcctggagcccaccaccaggacccggggcaagaggaacaggaagagcaagcacctgaatggagatgagaggagcggcagcaactaccgccgcatcccctggggcagaagacctgcccccccaagagatgtggccatcctgcaggagcgggccaacaagctggtgaagtacctgctggtgaaggaccagaccaagatccccatcaagagaagtgacatgctgagagatgtgatccaggagtatgatgagtacttccctgagatcatcgagcgggccagctacaccctggagaagatgttccgggtgaacctgaaggagattgacaagcagagcagcctgtacatcctgatcagcacccaggagagcagcgctggcatcctgggcaccaccaaggacacccccaagctgggcctgctgatggtgatcctgagcgtcatcttcatgaatggaaacaaggccagcgaggccgtcatctgggaggtgctgaggaagctgggcctgcggcctggggtgcgccacagcctgtttggagaggtgaggaagctgatcacagatgaatttgtgaagcagaagtacctggagtacaagagggtgcccaacagccggcccccagaatatgagttcttctggggcctgcggagctaccacgagaccagcaagatgaaggtgctgaagtttgcctgccgggtgcagaagaaggaccccaaggactgggccgtgcagtaccgggaggccgtggagatggaggtgcaggccgctgctgtggccgtggccgaggccgaggcccgggcagagtggttccagcaccagcactggctgtactggaggacccagcaccagcacggcctgcagtag

SEQ ID NO: 296217 - DNA, 372 bp, Artificial Sequence
  derived and/or modified sequence
atgcacaccctgctggccgccaccaaggacagcctggccatggacccccctgtggtgaaccggcccaagaagagcaagaccaagaaggcccccatcaagaccatcaccaaggccgccccagctgcccctcctgtgcctgctgccaatgaaattgccaccaacaagcccaagatcacctggcaggccctgaacctgcccgtcatcacccagatcagccaggccctgcccaccacagaggtgaccaacacccaggccagctctgtgacagcccagcccaagaaggccaacaagatgaagagggtgacagccaaggccgcccagggcagccagagccccactggacatgaaggaggcaccatccagctgaagtag

SEQ ID NO: 296218 - DNA, 216 bp, Artificial Sequence
  derived and/or modified sequence
atgcacaccctgctggccgccaccaaggacagcctggccatggacccccctgtggtgaaccggcccaagaagagcaagaccaagaaggcccccatcaagaccatcaccaaggccgccccagctgcccctcctgtgcctgctgccaatgaaattgccaccaacaagcccaagatcacctggcaggccctgaacctgcccgtcatcacccagatctag

SEQ ID NO: 296219 - DNA, 195 bp, Artificial Sequence
  derived and/or modified sequence
atgcacaccctgctggccgccaccaaggacagcctggccatggacccccctgtggtgaaccggcccaagaagagcaagaccaagaaggcccccatcaagaccatcaccaaggccgccccagctgcccctcctgtgcctgctgccaatgaaattgccaccaacaagcccaagatcacctggcaggccctgaactag

SEQ ID NO: 296220 - DNA, 693 bp, Artificial Sequence
  derived and/or modified sequence
atgcacaccctgctggccgccaccaaggacagcctggccatggaccccccagtcgtcaacaggcccaagaaaagcaagaccaagaaggcccctatcaagacaatcacgaaagctgccccggccgcccctccagttcctgcagctaacgagatcgccactaacaagcccaaaatcacgtggcaggcgctcaacctacccgtgatcacgcagatctcccaagctctgcccaccaccgaggttaccaatacacaggcgtcgtcagtgaccgcccagcctaagaaggcgaacaagatgaagcgtgtgacagcgaaggcagctcaggggtcccagtctcccacgggccacgaaggagggacgatccaactgaagtcacccctccaggttctgaaactgcctgttatctctcagaatatacatgctccaattgcaaatgaaagcgccagttcccaggccttaatcacatccatcaagcctaaaaaggcctctaaagccaagaaggctgccaataaggccatcgccagcgctacggaagtgtcgttggcagctaccgctactcacacagccacaacccaggggcaaatcaccaatgagacagccagtatccataccaccgctgcctctattagaacaaagaaagcatccaaagcgcgtaaaacgatcgcaaaagtcattaacacagataccgagcactag

SEQ ID NO: 296221 - DNA, 510 bp, Artificial Sequence
  derived and/or modified sequence
atggaccggcggaacgactacggctaccgggtgcccctgttccagggacccttgccccccccaggtagcctcggcttgcccttcccacccgatattcagacagaaacaacagaggaagatagcgttctgctcatgcataccctgttggcggcaacgaaagatagcctcgcaatggatccacctgtcgtgaatcgccctaagaagagtaaaacaaagaaagcccctatcaaaacaattacaaaggctgctcctgccgcccctccggtgcccgccgccaatgaaatcgcgaccaacaaaccaaagatcacttggcaggccctgaatctccctgtgataacacagataagtcaggccttacccaccaccgaggttacaaacactcaagctagttccgttactgcacagcccaagaaggcgaataagatgaaaagggttacagcgaaggcagcccagggctctcagagccccaccggacatgagggtggtactatccagctgaagtccccttag

SEQ ID NO: 296222 - DNA, 366 bp, Artificial Sequence
  derived and/or modified sequence
atgcacaccctgctggccgccaccaaggacagcctggccatggacccgccagtcgtcaatcgccccaaaaaatccaaaaccaagaaagcccccatcaagactatcacaaaagccgctcctgcagcaccacccgtgcctgccgcaaacgaaattgcaacaaacaagcccaagattacatggcaggcacttaatctgcccgttataacacagatctctcaagccctccctaccaccgaggtgaccaatacacaggcatccagtgttacggctcaacccaaaaaggctaataagatgaaacgagtgaccgcaaaggcggctcagggctctcagagcccaactggacacgaaggcggaacaatccagtag

SEQ ID NO: 296223 - DNA, 579 bp, Artificial Sequence
  derived and/or modified sequence
atgcacaccctgctggccgccaccaaggacagcctggccatggaccctcccgtcgtgaacaggcctaaaaagagcaagaccaagaaggcacctatcaaaacgattaccaaagcagctcccgccgctcctccagtgccggcagccaacgagattgcaaccaataagccgaagattacttggcaggctctgaatctcccggttatcacacagattagccaagccctcccgaccacagaagtgactaatacacaggcatcctcagtgaccgctcagccgaaaaaagccaacaaaatgaagcgtgtcacagctaaggcagcccaaggaagccaaagccctaccggccacgagggaggaacaatacaattgaagtccccccttcaggtgctcaaactgcccgtcataagccaaaatatccacgcacctatcgccaacgaatcagccagcagccaagctttgatcacatcgattaagcccaaaaaagccagcaaagccaagaaggctgccaacaaagcaattgcatccgcaaccgaggtgtccttggccgcaaccgctacacacaccgccaccactcaaggatag

SEQ ID NO: 296224 - DNA, 531 bp, Artificial Sequence
  derived and/or modified sequence
atggaccggcggaacgactacggctaccgggtgcccctgttccagggcccacttcctccacctgggtcactgggactgccatttccaccggacatccagactgagacaactgaggaggacagtgtacttttgatgcataccctgttggcagcaacaaaagattcactcgctatggaccctccggtggtaaacagaccgaagaagtctaagacaaagaaggcacctattaagaccattaccaaggccgcacccgcggctccccctgttccagctgctaacgagatagcaacaaataagccgaagatcacatggcaggcactcaacctcccagtaattacacagatcagccaggccctgcctaccacggaagtgacaaatacacaggcaagctctgtgactgcccagccgaagaaggccaacaaaatgaagagggttaccgcaaaagctgcccagggatcacagtctcccacgggccatgaggggggtactatccagttgaagtcgcctcttcaggtgcttaaactaccttag

SEQ ID NO: 296225 - DNA, 507 bp, Artificial Sequence
  derived and/or modified sequence
atggaccggcggaacgactacggctaccgggtgcccctgttccagggacctctaccgcctccagggtccctcggactgcccttcccgcccgacattcagactgaaaccacagaggaggattccgtcctactgatgcacactctgctcgccgctactaaggatagcctggccatggatcctcccgttgttaatcggcccaagaagtcaaaaactaagaaagctcctattaagactatcaccaaggcagccccggctgccccgccagtccccgcggccaacgagatagccactaataaaccaaagattacatggcaagctctgaatctgcccgtaatcactcagatctcccaggccctccccaccaccgaagtgaccaatacccaggcgagctcagtcacagcccagcctaaaaaggccaataaaatgaaaagggtgaccgcaaaggcagctcagggttcccagtctcccacgggtcacgagggcggaacaatccagcttaagtcttag

SEQ ID NO: 296226 - DNA, 2046 bp, Artificial Sequence
  derived and/or modified sequence
atggaccggcggaacgactacggctaccgggtgcccctgttccagggtcctctccccccacccgggtctctggggttgccattccctcctgacatccaaactgagacgacagaggaggacagcgtgcttctgatgcacactctgctcgccgctaccaaggactcactggcgatggaccctcccgtggtcaataggcccaagaaatccaagaccaagaaagcacccataaagaccattacaaaagccgccccggccgcccccccggttcccgccgccaacgaaattgcgacaaataaacctaagataacctggcaggcgttgaaccttcccgtcataacccagatctcccaggcgctgccaacaaccgaggttacaaatactcaggcctcatcagtgacagcgcagcccaaaaaggccaataagatgaagcgcgtgaccgccaaagcggcacagggctcccagtcccccacaggccatgaaggtggcaccatccaactcaagtcccccctgcaggtgctgaagctccccgttatctcccagaacattcatgccccaatcgcaaacgagagtgcaagctcccaggccttgatcacgtccatcaagccaaaaaaagcctctaaagccaaaaaagctgcaaacaaagcgatcgcgagcgccaccgaagtgtctttggcagccactgccactcacaccgccacaacacagggacagatcactaatgagaccgctagcatccatactactgcggccagtatacggactaagaaggcctcaaaagcaaggaaaaccatagccaaggtgataaatactgatactgaacacatagaagctctgaatgttacagacgccgccacccgccagatcgaggcgtccgtcgtcgccatacgccccaagaagtctaagggaaagaaggcggcttcccgtgggccaaactctgtttctgaaatctcagaggctcctctcgctacccagatagttaccaaccaggccctggcagccacgttaagagtcaaacggggctcacgggcccggaaggccgccacaaaagccagggccacagaaagtcaaacaccaaatgcagatcagggtgcgcaggccaagattgcttccgctcaaacgaatgtgagtgccctagagacccaggtcgcagcagccgttcaagcactggccgacgattacctggcccagctctcacttgagcccaccacccgcaccagggggaagcggaaccgaaagtctaagcatctcaacggcgatgagagaagcgggtccaactatagaaggatcccgtggggaaggcgaccagctccgccccgggatgtggcaattctgcaggagcgtgccaacaaactggtaaaatatctattggtaaaagaccagacgaagatcccaatcaagcggtcagatatgctacgagatgtgattcaagaatatgatgaatatttccccgaaataatcgaacgcgcctcctacacgctggagaagatgtttcgtgtaaacttgaaggagatcgataagcagtcttccctctacattctcatcagtactcaggagagttcagccggtatcttaggaaccacaaaggatactcctaagctgggtttactaatggtcattttgagtgtcattttcatgaatggcaataaggcttcggaagctgttatctgggaggtattacgaaagctgggcttgcggccaggggttcgacacagcctctttggagaggttcgcaaactgatcacagatgagttcgtaaagcagaagtacctcgagtataagcgagtaccaaacagccgacctcccgagtatgaatttttttgggggctccgttcttaccatgagacatctaaaatgaaggtgttgaagttcgcgtgtcgggttcaaaagaaggatcctaaggactgggccgtacagtatcgggaggccgttgagatggaggtccaagccgcagcggtggccgtggccgaggccgaagctagagcggaatggttccaacatcagcattggctgtattggcggacccagcatcaacatgggctccagtag

SEQ ID NO: 296227 - DNA, 372 bp, Artificial Sequence
  derived and/or modified sequence
atgcacaccctgctggccgccaccaaggacagcctggccatggacccccccgttgtgaataggcccaaaaaatcaaagacaaaaaaggcacccattaagacaataaccaaggccgctccagccgctccccctgtgccggctgcaaacgaaattgctaccaacaaacctaagataacctggcaagctctcaacttaccagtcattacacagatctctcaagccttaccaaccaccgaagtcacgaatactcaggcatcttccgttacagcacagccaaagaaggctaataagatgaaacgcgtgacggctaaggctgcccaagggagccagtcccctacggggcacgagggagggacaattcaattgaaatag

SEQ ID NO: 296228 - DNA, 216 bp, Artificial Sequence
  derived and/or modified sequence
atgcacaccctgctggccgccaccaaggacagcctggccatggacccgcccgtggttaatcggccaaaaaaaagtaagacaaagaaagctccgattaagacgatcaccaaggctgcgccagctgcccctcccgtgccggcggccaacgagattgcaacgaacaagccaaagatcacctggcaagcattaaatctgccagtaataacacaaatttag

SEQ ID NO: 296229 - DNA, 195 bp, Artificial Sequence
  derived and/or modified sequence
atgcacaccctgctggccgccaccaaggacagcctggccatggacccccccgtcgttaatagaccaaaaaaaagcaagactaaaaaagctcccatcaaaaccattaccaaagccgctcccgctgcaccgcccgtgcccgccgcaaacgagattgccaccaataagcctaaaattacttggcaggcactcaattag

SEQ ID NO: 296230 - DNA, 693 bp, Artificial Sequence
  derived and/or modified sequence
atgcacaccctcttagctgcaacaaaggacagcctggctatggatcccccagtggtcaataggcccaagaagtccaagacaaagaaagctccaataaagacaattaccaaggcggctcctgccgctcctcctgtccctgcagccaatgagatcgctactaacaaaccaaaaatcacctggcaggcgctcaacctgcccgttatcactcagatttctcaagccttgccgaccacagaagttacgaacacacaggcgtctagcgtcaccgctcaacccaagaaggccaacaagatgaagcgagtgaccgctaaagccgcacagggatcgcagagcccaactgggcacgaaggaggtaccattcagctcaagtcacctttgcaggtactcaagcttcctgtcatctcccaaaatatacatgctcctatcgccaacgaatcagcatccagccaggctctcatcactagcatcaaacctaagaaagcatctaaggccaaaaaagccgctaataaggccatcgcctccgctaccgaggtgtctctcgccgcaactgcaacccacacggcaacaacgcagggccaaataaccaacgagaccgcaagcattcacaccacggctgccagtatccgcaccaagaaggcttctaaggcaaggaagaccatcgcaaaggtgattaataccgacaccgaacactag

SEQ ID NO: 296231 - DNA, 510 bp, Artificial Sequence
  derived and/or modified sequence
atggaccgcaggaatgattacggatatagggttcctcttttccaaggacctctccccccacccggtagccttggtttaccgttccctccggacatacagactgaaaccaccgaagaggactctgttcttttgatgcacaccctgctggctgccactaaggactctttggccatggaccccccagtcgttaacaggccaaagaagtcaaagaccaagaaagcaccaattaaaaccatcactaaagcggcacctgcagcccctcccgttcctgcagccaatgaaattgccacaaataaaccaaaaattacttggcaggctttgaacctgcctgttattactcagatttcgcaggcattacccacaaccgaggtcacgaatacccaggcctcgagcgtcaccgcccagccaaagaaggcaaacaaaatgaagagggtgaccgccaaagccgcacaagggtctcagtcaccgaccggtcatgaagggggtactatccagctcaaaagtccttag

SEQ ID NO: 296232 - DNA, 366 bp, Artificial Sequence
  derived and/or modified sequence
atgcacacccttctggcagccaccaaggattcactcgctatggacccacccgtggtgaaccgacctaaaaagagcaagactaagaaagcacccatcaagactattacgaaagcggcacccgctgcccctcctgttccagctgctaacgagattgcgactaacaagcccaagatcacatggcaggccttaaaccttcccgtaattacccagatctcccaagcattgccgacaactgaggttacgaatacgcaagcatcctctgtcaccgcccagcccaagaaggccaataaaatgaaaagggtgacagcaaaggccgcacagggctcacagtcccccaccggccacgagggcggtaccatccagtag

SEQ ID NO: 296233 - DNA, 579 bp, Artificial Sequence
  derived and/or modified sequence
atgcacacactactggctgcaaccaaagactcactcgccatggatccccctgtggtgaataggcccaagaaaagcaaaaccaagaaagcacctatcaagaccatcacaaaagcagccccagccgcaccacccgtgccggctgccaacgagatagcgacaaataaacccaagatcacctggcaggccctgaatctccctgttattacacaaatctcccaggccctccccaccacggaggtcaccaacacgcaggcctcatcagtaacagcccagcccaagaaagccaataaaatgaaaagagtgacggctaaggcagcgcagggaagccagagtcctaccggtcatgagggaggcacaatccagttaaaaagccccctgcaggtgctaaagctgcctgttatctctcaaaacattcacgccccaatcgcaaacgaatctgctagctctcaggccctgatcacatcaattaaacccaagaaggcaagcaaagcaaaaaaagctgccaataaagcaatcgcatccgctacagaggtgagtctggctgctactgctacacataccgccaccacgcagggctag

SEQ ID NO: 296234 - DNA, 531 bp, Artificial Sequence
  derived and/or modified sequence
atggaccgtagaaacgactacggctatagggtgcctctgttccagggaccactacccccacctggttccctcggtctccctttcccgcctgatattcagactgagaccaccgaggaggattccgtcctgctgatgcatacccttctggctgcgacaaaggactctctggcgatggatccgcctgtggtaaatcggcctaaaaagtccaagaccaagaaagcaccaataaagaccataacaaaggccgcacccgctgcccctcctgtgcccgcagccaatgaaattgccacaaataagccaaaaatcacctggcaggcactcaacctgcctgtgattactcagatcagtcaggccctccccaccacggaagtaactaatacacaagcctcttctgtcactgctcagcctaaaaaagccaacaaaatgaagagggtgacagccaaggccgctcagggttctcagtcaccaaccggccatgaaggagggaccattcagctgaaatcccctttacaagtgctgaaacttccttag

SEQ ID NO: 296235 - DNA, 507 bp, Artificial Sequence
  derived and/or modified sequence
atggatagacgcaatgattacggttaccgagtgccactatttcagggcccattgccgcctcccggttctttggggctcccctttcccccagatatacaaacagaaacaacagaagaggactctgtcctgctcatgcacactctcttggccgctaccaaggatagtttagctatggaccctccagttgtaaacagacctaaaaaatcaaaaactaaaaaagctcctattaaaaccataacaaaggccgctcccgctgcccctcctgttcctgctgccaacgaaattgcaactaacaaacctaaaatcacttggcaggcccttaacctccctgtgatcacacaaatctcacaagcactgcctactacagaggtgacgaacacacaggcaagctccgtgaccgctcagcccaaaaaagctaacaaaatgaagagagttacagccaaagctgcacaaggaagccagtcgccaacaggccacgaagggggtacaatccaattgaaatcatag

SEQ ID NO: 296236 - DNA, 2046 bp, Artificial Sequence
  derived and/or modified sequence
atggacaggcgcaatgactatgggtatagagttcctctgtttcaaggcccactgcctccccctggttcactcggcttgccatttcctccagatattcagacagagactacagaggaagattccgtgctcctgatgcatacgctgctcgccgcaaccaaggactcccttgctatggatcctcctgtggtgaacagaccaaaaaaaagcaagaccaaaaaggccccaattaagaccataacgaaggcagccccagcagctcccccagtgccagctgccaacgaaattgccaccaacaagcccaaaatcacatggcaggccttgaatcttcccgtcatcacacaaatctcccaggcactccccactacagaagtgaccaacactcaggccagtagcgtcaccgctcaacccaaaaaagccaataaaatgaagagagtgactgcaaaggctgcacaagggtctcagagccccacagggcatgagggaggtacaatccagttgaagtcaccactccaggtgctgaagctcccagtcatatcccaaaatatacatgctccaatcgcaaacgaatctgccagctcacaggctctgattaccagtattaagccaaagaaagcctctaaggcaaagaaggcagctaacaaggcgatcgccagtgctaccgaggtgagcctggccgcaacagcgacacacacagccacgactcagggtcagatcactaatgaaacagcctcaattcatacaacggcagcgagcatcaggacaaaaaaggcatccaaagcgaggaagacgattgctaaggtgattaacacggacacggagcatatcgaggcgctcaacgtgacggacgccgctaccaggcagatcgaggcctctgtggttgccataagacccaaaaagtcaaagggaaaaaaggcagctagcagaggtccgaactctgtgagtgagatttctgaggctcctctggcaacgcagatcgttacaaatcaggctctggcagccactttacgagtcaaaagaggcagcagggctaggaaggccgctacaaaagcacgcgcaactgagagtcagactccaaatgcggaccagggggctcaggctaagatcgcctctgcacagactaacgtgagcgccctggaaactcaggtggcagctgccgtgcaggcgttggccgatgactatcttgcacagctgagccttgaaccaactacacggactaggggaaagaggaatcggaaaagcaagcatctcaatggtgacgaacgaagcggctccaactacagacgtatcccatggggcaggaggcccgcaccgccacgagacgtggccatcctccaggagcgcgcaaacaagttggtgaagtatctgctggtgaaagatcagacaaaaattccgattaaacggtccgatatgctcagggatgtgattcaagagtatgacgaatacttcccagagatcattgagcgcgctagctacacactggaaaagatgtttcgcgtaaaccttaaggaaattgacaagcagagctccttgtatatcctcatatccacacaggagtccagtgcgggaatcctgggcacaactaaagatactccaaagctgggtctgctgatggtgattctgagtgtcatattcatgaatggtaataaagcttccgaggcggttatctgggaagtattaaggaagctcggattgcgccctggagttagacacagcctgtttggcgaggtccgaaagcttatcaccgacgagtttgtgaagcagaagtacttggagtacaagcgcgtgcccaattcaaggcctcccgaatacgagttcttctgggggctgcggagttatcacgagacttcaaagatgaaagtgcttaagtttgcctgcagggtccagaagaaagaccctaaggattgggctgtgcagtaccgggaagcggttgagatggaggtacaggcagcggcagtcgctgtggcagaagcagaagctcgcgcagaatggttccaacaccaacattggctctactggcggacgcagcatcagcacggtttacagtag

SEQ ID NO: 296237 - DNA, 372 bp, Artificial Sequence
  derived and/or modified sequence
atgcacaccttgctggctgctactaaggacagcctggctatggatcccccagtggtcaacagaccaaagaaatcaaaaactaagaaagccccaatcaagactatcactaaggcagcacccgcagcgcctcccgtgccagcagctaatgagatagcaacaaataagccaaaaatcacgtggcaagccctaaacctgcctgttattactcagatatctcaggctctgcctacaacagaggtgactaacacacaagcttctagtgttacagcacagcctaagaaagctaacaagatgaagcgcgtgacggctaaggccgctcagggaagccagtcccccaccggccacgagggcggtactattcagctgaagtag

SEQ ID NO: 296238 - DNA, 216 bp, Artificial Sequence
  derived and/or modified sequence
atgcacaccctgttggctgctaccaaagacagcctggctatggacccccctgttgtgaaccgacctaagaagagtaagacaaaaaaggcacccattaaaacaatcacgaaggccgctcccgctgccccaccagtccccgctgcaaacgaaatcgctacaaataagccaaagatcacttggcaggcccttaatctgcctgtgatcactcaaatttag

SEQ ID NO: 296239 - DNA, 195 bp, Artificial Sequence
  derived and/or modified sequence
atgcatacacttcttgctgccactaaagactctctggcaatggatcctccagtggtcaatcgccctaagaagagcaaaacaaaaaaggcccctatcaaaactatcactaaagcagcccctgcagcccctcccgtgccggcagctaatgaaatcgcaaccaacaagcccaagattacctggcaggcactgaattag

SEQ ID NO: 296240 - DNA, 1196 bp, Artificial Sequence
  derived and/or modified sequence
agagcagctctagggaagagagacatagacacaaggtataacaacactatgtaaatagtgttgggatagagggtctgtaggaagggttggtgtgggagttcagagaactacattcctcctaggggaaacaggagaatcaaataggaacggagatacagagtggggaatagagaagtcaaatggagaataagagggagtgataactgaataggggtagtaagaagaaaaagggagctacattgaggagaatggaaagttgaaagtaggtatggaggggaggagactgacaggcaggaacggagacccccctctggaggcggaaagaggcaggaccacttccggccagggagggggataggctcagacacaaggagaggcttggagagagcagacgccttctggattcaagaagacgagggccctctgcctcccccggggagcctggggcttcccttccctccagatatacagactgagaccacagaagaggacagtgtcctgctgatgcataccctgttggcggcaaccaaggactccctggccatggacccaccagttgtcaaccggcctaagaaaagcaagaccaagaaggcccctataaagactattactaaggctgcacctgctgcccctccagtcccagctgccaatgagattgccaccaacaagcccaaaataacttggcaggctttaaacctgccagtcattacccagatcagccaggctttacctaccactgaggtaaccaatactcaggcttcttcagtcactgctcagcctaagaaagccaacaagatgaagagagttactgccaaggcagcccaaggctcccaatccccaactggccatgagggtggcactatacagctgaagtcacccttgcaggtcctaaagctaccagtcatctcacagaatattcacgctccaattgccaatgagtcagccagttcccaagccttgataacctctatcaagcctaagaaagcttccaaggctaagaaggctgcaaataaggccatagctagtgccaccgaggtctcgctggctgcaactgccacccatacagctaccacccaaggccaaattaccaatgagacagccagtatccacaccacagcagcctccatccgaaccaagaaagcctccaaagccaggaagacaattgctaaggtcataaatactgacactgagcatat

SEQ ID NO: 296241 - DNA, 594 bp, Artificial Sequence
  derived and/or modified sequence
ccggtttgaaagggaagagacaggacctggtagggtttgagaacaggaatacacagaaggctcacctgttactcggcctcccagaaagatggataggagaaatgactacggatatagggtgcctctatttcagggccctctgcctcccccggggagcctggggcttcccttccctccagatatacagactgagaccacagaagaggacagtgtcctgctgatgcataccctgttggcggcaaccaaggactccctggccatggacccaccagttgtcaaccggcctaagaaaagcaagaccaagaaggcccctataaagactattactaaggctgcacctgctgcccctccagtcccagctgccaatgagattgccaccaacaagcccaaaataacttggcaggctttaaacctgccagtcattacccagatcagccaggctttacctaccactgaggtaaccaatactcaggcttcttcagtcactgctcagcctaagaaagccaacaagatgaagagagttactgccaaggcagcccaaggctcccaatccccaactggccatgagggtggcactatacagctgaagtcacc

SEQ ID NO: 296242 - DNA, 562 bp, Artificial Sequence
  derived and/or modified sequence
gcgcactatcgagttgcggagggggcgtgtaaaggggtggggtcgtagaactgactctctcggaggcaaaaggagctgggccttggaaaccagatggcctgggttttttagggccctctgcctcccccggggagcctggggcttcccttccctccagatatacagactgagaccacagaagaggacagtgtcctgctgatgcataccctgttggcggcaaccaaggactccctggccatggacccaccagttgtcaaccggcctaagaaaagcaagaccaagaaggcccctataaagactattactaaggctgcacctgctgcccctccagtcccagctgccaatgagattgccaccaacaagcccaaaataacttggcaggctttaaacctgccagtcattacccagatcagccaggctttacctaccactgaggtaaccaatactcaggcttcttcagtcactgctcagcctaagaaagccaacaagatgaagagagttactgccaaggcagcccaaggctcccaatccccaactggccatgagggtggcactatacagc

SEQ ID NO: 296243 - DNA, 868 bp, Artificial Sequence
  derived and/or modified sequence
acttccggccagggagggggataggctcagacacaaggagaggcttggagagagcagacgccttctggattcaagaagacgaggtttgaagaaaacctgctggaggtttgggacctaaccgcatcaaagtcgcctttagcggtgcctggacccagttcgcacgggaggaagtaggaggctcacctgttactcggcctcccagaaagatggataggagaaatgactacggatatagggtgcctctatttcagatatacagactgagaccacagaagaggacagtgtcctgctgatgcataccctgttggcggcaaccaaggactccctggccatggacccaccagttgtcaaccggcctaagaaaagcaagaccaagaaggcccctataaagactattactaaggctgcacctgctgcccctccagtcccagctgccaatgagattgccaccaacaagcccaaaataacttggcaggctttaaacctgccagtcattacccagatcagccaggctttacctaccactgaggtaaccaatactcaggcttcttcagtcactgctcagcctaagaaagccaacaagatgaagagagttactgccaaggcagcccaaggctcccaatccccaactggccatgagggtggcactatacagctgaagtcacccttgcaggtcctaaagctaccagtcatctcacagaatattcacgctccaattgccaatgagtcagccagttcccaagccttgataacctctatcaagcctaagaaagcttccaaggctaagaaggctgcaaataaggccatagctagtgccaccgaggtctcgctggctgcaactgccacccatacagctaccacccaaggc

SEQ ID NO: 296244 - DNA, 672 bp, Artificial Sequence
  derived and/or modified sequence
agacgccttctggattcaagaagacgaggtgagctgaggtacctggctttagtgaagaccctgtgggggcttcctggctgcggcttcgacgtgcctgactccacacgcccctaaggctcacctgttactcggcctcccagaaagatggataggagaaatgactacggatatagggtgcctctatttcagggccctctgcctcccccggggagcctggggcttcccttccctccagatatacagactgagaccacagaagaggacagtgtcctgctgatgcataccctgttggcggcaaccaaggactccctggccatggacccaccagttgtcaaccggcctaagaaaagcaagaccaagaaggcccctataaagactattactaaggctgcacctgctgcccctccagtcccagctgccaatgagattgccaccaacaagcccaaaataacttggcaggctttaaacctgccagtcattacccagatcagccaggctttacctaccactgaggtaaccaatactcaggcttcttcagtcactgctcagcctaagaaagccaacaagatgaagagagttactgccaaggcagcccaaggctcccaatccccaactggccatgagggtggcactatacagctgaagtcacccttgcaggtcctaaagctacca

SEQ ID NO: 296245 - DNA, 626 bp, Artificial Sequence
  derived and/or modified sequence
acttccggccagggagggggataggctcagacacaaggagaggcttggagagagcagacgccttctggattcaagaagacgaggtgagctgaggctcacctgttactcggcctcccagaaagatggataggagaaatgactacggatatagggtgcctctatttcagggccctctgcctcccccggggagcctggggcttcccttccctccagatatacagactgagaccacagaagaggacagtgtcctgctgatgcataccctgttggcggcaaccaaggactccctggccatggacccaccagttgtcaaccggcctaagaaaagcaagaccaagaaggcccctataaagactattactaaggctgcacctgctgcccctccagtcccagctgccaatgagattgccaccaacaagcccaaaataacttggcaggctttaaacctgccagtcattacccagatcagccaggctttacctaccactgaggtaaccaatactcaggcttcttcagtcactgctcagcctaagaaagccaacaagatgaagagagttactgccaaggcagcccaaggctcccaatccccaactggccatgagggtggcactatacagctgaagtca

SEQ ID NO: 296246 - DNA, 2597 bp, Artificial Sequence
  derived and/or modified sequence
ataggctcagacacaaggagaggcttggagagagcagacgccttctggattcaagaagacgaggctcacctgttactcggcctcccagaaagatggataggagaaatgactacggatatagggtgcctctatttcagggccctctgcctcccccggggagcctggggcttcccttccctccagatatacagactgagaccacagaagaggacagtgtcctgctgatgcataccctgttggcggcaaccaaggactccctggccatggacccaccagttgtcaaccggcctaagaaaagcaagaccaagaaggcccctataaagactattactaaggctgcacctgctgcccctccagtcccagctgccaatgagattgccaccaacaagcccaaaataacttggcaggctttaaacctgccagtcattacccagatcagccaggctttacctaccactgaggtaaccaatactcaggcttcttcagtcactgctcagcctaagaaagccaacaagatgaagagagttactgccaaggcagcccaaggctcccaatccccaactggccatgagggtggcactatacagctgaagtcacccttgcaggtcctaaagctaccagtcatctcacagaatattcacgctccaattgccaatgagtcagccagttcccaagccttgataacctctatcaagcctaagaaagcttccaaggctaagaaggctgcaaataaggccatagctagtgccaccgaggtctcgctggctgcaactgccacccatacagctaccacccaaggccaaattaccaatgagacagccagtatccacaccacagcagcctccatccgaaccaagaaagcctccaaagccaggaagacaattgctaaggtcataaatactgacactgagcatatagaggctctaaatgtcactgacgcagctaccaggcagattgaggcctcagtagtggctatcaggcccaaaaaatccaagggcaagaaggctgccagcaggggcccaaattctgtctctgagatctctgaggccccacttgccactcagatagtcacaaaccaagccctggcagccaccctgcgggtcaagagagggtctagggctcggaaggctgccactaaggctcgggcaactgaaagccagactccaaatgctgaccaaggggcccaggccaagatagcctctgctcagaccaacgtaagtgcccttgagactcaggttgctgctgctgtccaggccctggcagatgactatctggctcagttgagcctggagcccacaaccaggacccggggcaaaagaaaccgaaagtccaagcatctgaatggggatgagagaagtggcagtaattacaggcggatcccatggggccggaggcctgcaccaccgcgagatgtggccattttacaagaaagggctaataagttggtgaaatacctgttggttaaggaccagacaaagatccccatcaaacgctcagacatgctgagggatgtcatccaagaatatgatgaatatttcccagaaatcattgaacgagcaagctacactctggagaagatgtttcgagtcaatctgaaagaaattgataagcaaagtagcttgtatattctcatcagcactcaggaatcctctgcaggcatactgggaacgaccaaggacacacccaagctgggtctcctcatggtgattctgagtgtcatttttatgaatggcaacaaggccagtgaggctgtcatctgggaggtgctgcgcaagttggggctgcgccctggggtgaggcattcactctttggggaagtgaggaagctcatcacagacgagtttgtgaagcagaagtacctggagtacaagagggtccctaacagcagaccacctgaatatgagttcttctggggcttgcgctcctaccacgagactagcaagatgaaagtcctcaagtttgcatgcagggtgcagaagaaagaccccaaggactgggctgtgcagtaccgcgaggcagtggagatggaagtccaagctgcagctgtggctgtggctgaggctgaagccagggctgagtggttccaacaccagcactggctttactggcgaacccagcaccagcacgggcttcagtagtggacccagttctattgttggcttcagcggtggaccaagcactggtgttggcttctgcagtggaccaagcaccagtggcttcagcggtggaccgagcacaggagctggcttcggcggtggaccaaacactggtgctggctttggtggtggaccgagcaccagtgctggctttggcagtggagccgccagtcttggtgcctgtggcttctcgtatggctagtgaggtttcagatttattccccatgtttacagataccgctaataaattgcagtagtccttcccatggagccaaagtacatccttggaatctttgtccacacagcagtcaaggcagttatggccaatcagctgagggtgtcatgtgatggaaaaatctgtttgctgttcctgctttattgtttgctttctgtgtgctgtcatattttggtatcagagttacattaaatttgcaaaatgaa

SEQ ID NO: 296247 - DNA, 578 bp, Artificial Sequence
  derived and/or modified sequence
aagtaacgatctggactcggttcgggccgtgaaagggagggatgcagacctagttgggaccgcagaaaggaaggatcgagaaatccttcagacggctcacctgttactcggcctcccagaaagatggataggagaaatgactacggatatagggtgcctctatttcagatatacagactgagaccacagaagaggacagtgtcctgctgatgcataccctgttggcggcaaccaaggactccctggccatggacccaccagttgtcaaccggcctaagaaaagcaagaccaagaaggcccctataaagactattactaaggctgcacctgctgcccctccagtcccagctgccaatgagattgccaccaacaagcccaaaataacttggcaggctttaaacctgccagtcattacccagatcagccaggctttacctaccactgaggtaaccaatactcaggcttcttcagtcactgctcagcctaagaaagccaacaagatgaagagagttactgccaaggcagcccaaggctcccaatccccaactggccatgagggtggcactatacagctgaag

SEQ ID NO: 296248 - DNA, 976 bp, Artificial Sequence
  derived and/or modified sequence
agagaactacattcctcctaggggaaacaggagaatcaaataggaacggagatacagagtggggaatagagaagtcaaatggagaataagagggagtgataactgaataggggtagtaagaagaaaaagggagctacattgaggagaatggaaagttgaaagtaggtatggaggggaggagactgacaggcaggaacggagacccccctctggaggcggaaagaggcaggaccacttccggccagggagggggataggctcagacacaaggagaggcttggagagagcagacgccttctggattcaagaagacgaggctcacctgttactcggcctcccagaaagatggataggagaaatgactacggatatagggtgcctctatttcaggtgaggcctctctgcattctctctaggccatctgccccatcctgagttcacttactgctcttcagaccccttccaccgtgtagtttcataattccctgcctaactcgtctcagtcctcccttacatggtgaaggagaggagaggaaaacctgcctgactctattccttccttgctccctaccccattttaattaaccactgctcagaggaagggaaggcctttgtggaaagggatgggctttagcgaggccaaatggcccagaggatggtaatcctaagtgtgtagggccctctgcctcccccggggagcctggggcttcccttccctccagatatacagactgagaccacagaagaggacagtgtcctgctgatgcataccctgttggcggcaaccaaggactccctggccatggacccaccagttgtcaaccggcctaagaaaagcaagaccaagaaggcccctataaagactattactaaggctgcacctgctgcccctccagtcccagctgccaatgagattgccaccaacaagcccaaaataacttggcaggctttaaacctgccagtcattacccagatc

SEQ ID NO: 296249 - DNA, 722 bp, Artificial Sequence
  derived and/or modified sequence
gggggataggctcagacacaaggagaggcttggagagagcagacgccttctggattcaagaagacgaggcccattcccctcaggctcacctgttactcggcctcccagaaagatggataggagaaatgactacggatatagggtgcctctatttcaggtgaggcctctctgcattctctctaggccatctgccccatcctgagttcacttactgctcttcagaccccttccaccgtgtagtttcataattccctgcctaactcgtctcagtcctcccttacatggtgaaggagaggagaggaaaacctgcctgactctattccttccttgctccctaccccattttaattaaccactgctcagaggaagggaaggcctttgtggaaagggatgggctttagcgaggccaaatggcccagaggatggtaatcctaagtgtgtagggccctctgcctcccccggggagcctggggcttcccttccctccagatatacagactgagaccacagaagaggacagtgtcctgctgatgcataccctgttggcggcaaccaaggactccctggccatggacccaccagttgtcaaccggcctaagaaaagcaagaccaagaaggcccctataaagactattactaaggctgcacctgctgcccctccagtcccagctgccaatgagattgccaccaacaagcccaaaataacttggcaggctttaaac

SEQ ID NO: 296250 - DNA, 2000 bp, Artificial Sequence
  derived and/or modified sequence
aagatggcggatactctcccttcggagtttgatgtgatcgtaatagggacggtcaggatttgcatgaagatgtcgaagaagctggtgcactgcagaaaaatcatgctcttgtgacatctgcaaactccacagaagctgcagattctgccttcctgcctacggaggatgagtcattaagcactatgagctgtgaaatgctcacagaacaaactccaagcagcgatccagagaatgcgctagaagtaaatggtgctgaagtgacaggggaaaaagaaaaccattgtgatgataaaacttgtgtgccatcaacttcagcagaagacatgagtgaaaatgtgcctatagcagaagataccacagagcaaccaaagaaaaacagaattacttactcacaaattattaaagaaggcaggagatttaatattgatttagtatcaaagctgctgtattctcgaggattactaattgatcttctaatcaaatctaatgttagtcgatatgcagagtttaaaaatattaccaggattcttgcatttcgagaaggacgagtggaacaggttccgtgttccagagcagatgtctttaatagcaaacaacttactatggtagaaaagcgaatgctaatgaaatttcttacattttgtatggaatatgagaaatatcctgatgaatataaaggatatgaagagatcacattttatgaatatttaaagactcaaaaattaacccccaacctccaatatattgtcatgcattcaattgcaatgacatcagagacagccagcagcaccatagatggtctcaaagctaccaaaaactttcttcactgtcttgggcggtatggcaacactccatttttgtttcctttatatggccaaggagaactcccccagtgtttctgcaggatgtgtgctgtgtttggtggaatttattgtcttcgccattcagtacagtgccttgtagtggacaaagaatccagaaaatgtaaagcaattatagatcagtttggtcagagaataatctctgagcatttcctcgtggaggacagttactttcctgagaacatgtgctcacgtgtgcaatacaggcagatctccagggcagtgctgattacagatagatctgtcctaaaaacagattcagatcaacagatttccattttgacagtgccagcagaggaaccaggaacttttgctgttcgggtcattgagttatgttcttcaacgatgacatgcatgaaaggcacctatttggttcatttgacttgcacatcttctaaaacagcaagagaagatttagaatcagttgtgcagaaattgtttgttccatatactgaaatggagatagaaaatgaacaagtagaaaagccaagaattctgtgggctctttacttcaatatgagagattcgtcagacatcagcaggagctgttataatgatttaccatccaacgtttatgtctgctctggcccagattgtggtttaggaaatgataatgcagtcaaacaggctgaaacacttttccaggaaatctgccccaatgaagatttctgtccccctccaccaaatcctgaagacattatccttgatggagacagtttacagccagaggcttcagaatccagtgccataccagaggctaactcggagactttcaaggaaagcacaaaccttggaaacctagaggagtcctctgaataatggatatacaccaaactggatacccaactttggaaattctgactggtctcagagtctacttgatagaaggactgtttgagaaatgttagaaagcagcagcaattataaggcaaaataggtaatagaaatccaaaaggggattttccttatagaggacattccaagaacacacaacacttataaagcacattgacttgctcattttaaataccaaacttgtgtgactagcagatgaaaattataaatcaattgattctcaggaatgtaactgtggatatgaaagtgatcctatgcattgtt

SEQ ID NO: 296251 - protein, 1691 aa, Artificial Sequence
  derived and/or modified sequence
MKLRGVSLAAGLFLLALSLWGQPAEAAACYGCSPGSKCDCSGIKGEKGERGFPGLEGHPGLPGFPGPEGPPGPRGQKGDDGIPGPPGPKGIRGPPGLPGFPGTPGLPGMPGHDGAPGPQGIPGCNGTKGERGFPGSPGFPGLQGPPGPPGIPGMKGEPGSIIMSSLPGPKGNPGYPGPPGIQGLPGPTGIPGPIGPPGPPGLMGPPGPPGLPGPKGNMGLNFQGPKGEKGEQGLQGPPGPPGQISEQKRPIDVEFQKGDQGLPGDRGPPGPPGIRGPPGPPGGEKGEKGEQGEPGKRGKPGKDGENGQPGIPGLPGDPGYPGEPGRDGEKGQKGDTGPPGPPGLVIPRPGTGITIGEKGNIGLPGLPGEKGERGFPGIQGPPGLPGPPGAAVMGPPGPPGFPGERGQKGDEGPPGISIPGPPGLDGQPGAPGLPGPPGPAGPHIPPSDEICEPGPPGPPGSPGDKGLQGEQGVKGDKGDTCFNCIGTGISGPPGQPGLPGLPGPPGSLGFPGQKGEKGQAGATGPKGLPGIPGAPGAPGFPGSKGEPGDILTFPGMKGDKGELGSPGAPGLPGLPGTPGQDGLPGLPGPKGEPGGITFKGERGPPGNPGLPGLPGNIGPMGPPGFGPPGPVGEKGIQGVAGNPGQPGIPGPKGDPGQTITQPGKPGLPGNPGRDGDVGLPGDPGLPGQPGLPGIPGSKGEPGIPGIGLPGPPGPKGFPGIPGPPGAPGTPGRIGLEGPPGPPGFPGPKGEPGFALPGPPGPPGLPGFKGALGPKGDRGFPGPPGPPGRTGLDGLPGPKGDVGPNGQPGPMGPPGLPGIGVQGPPGPPGIPGPIGQPGLHGIPGEKGDPGPPGLDVPGPPGERGSPGIPGAPGPIGPPGSPGLPGKAGASGFPGTKGEMGMMGPPGPPGPLGIPGRSGVPGLKGDDGLQGQPGLPGPTGEKGSKGEPGLPGPPGPMDPNLLGSKGEKGEPGLPGIPGVSGPKGYQGLPGDPGQPGLSGQPGLPGPPGPKGNPGLPGQPGLIGPPGLKGTIGDMGFPGPQGVEGPPGPSGVPGQPGSPGLPGQKGDKGDPGISSIGLPGLPGPKGEPGLPGYPGNPGIKGSVGDPGLPGLPGTPGAKGQPGLPGFPGTPGPPGPKGISGPPGNPGLPGEPGPVGGGGHPGQPGPPGEKGKPGQDGIPGPAGQKGEPGQPGFGNPGPPGLPGLSGQKGDGGLPGIPGNPGLPGPKGEPGFHGFPGVQGPPGPPGSPGPALEGPKGNPGPQGPPGRPGPTGFQGLPGPEGPPGLPGNGGIKGEKGNPGQPGLPGLPGLKGDQGPPGLQGNPGRPGLNGMKGDPGLPGVPGFPGMKGPSGVPGSAGPEGEPGLIGPPGPPGLPGPSGQSIIIKGDAGPPGIPGQPGLKGLPGPQGPQGLPGPTGPPGDPGRNGLPGFDGAGGRKGDPGLPGQPGTRGLDGPPGPDGLQGPPGPPGTSSVAHGFLITRHSQTTDAPQCPQGTLQVYEGFSLLYVQGNKRAHGQDLGTAGSCLRRFSTMPFMFCNINNVCNFASRNDYSYWLSTPEPMPMSMQPLKGQSIQPFISRCAVCEAPAVVIAVHSQTIQIPHCPQGWDSLWIGYSFMMHTSAGAEGSGQALASPGSCLEEFRSAPFIECHGRGTCNYYANSYSFWLATVDVSDMFSKPQSETLKAGDLRTRISRCQVCMKRT

SEQ ID NO: 296252 - protein, 1691 aa, Artificial Sequence
  derived and/or modified sequence
MKLRGVSLAAGLFLLALSLWGQPAEAAACYGCSPGSKCDCSGIKGEKGERGFPGLEGHPGLPGFPGPEGPPGPRGQKGDDGIPGPPGPKGIRGPPGLPGFPGTPGLPGMPGHDGAPGPQGIPGCNGTKGERGFPGSPGFPGLQGPPGPPGIPGMKGEPGSIIMSSLPGPKGNPGYPGPPGIQGLPGPTGIPGPIGPPGPPGLMGPPGPPGLPGPKGNMGLNFQGPKGEKGEQGLQGPPGPPGQISEQKRPIDVEFQKGDQGLPGDRGPPGPPGIRGPPGPPGGEKGEKGEQGEPGKRGKPGKDGENGQPGIPGLPGDPGYPGEPGRDGEKGQKGDTGPPGPPGLVIPRPGTGITIGEKGNIGLPGLPGEKGERGFPGIQGPPGLPGPPGAAVMGPPGPPGFPGERGQKGDEGPPGISIPGPPGLDGQPGAPGLPGPPGPAGPHIPPSDEICEPGPPGPPGSPGDKGLQGEQGVKGDKGDTCFNCIGTGISGPPGQPGLPGLPGPPGSLGFPGQKGEKGQAGATGPKGLPGIPGAPGAPGFPGSKGEPGDILTFPGMKGDKGELGSPGAPGLPGLPGTPGQDGLPGLPGPKGEPGGITFKGERGPPGNPGLPGLPGNIGPMGPPGFGPPGPVGEKGIQGVAGNPGQPGIPGPKGDPGQTITQPGKPGLPGNPGRDGDVGLPGDPGLPGQPGLPGIPGSKGEPGIPGIGLPGPPGPKGFPGIPGPPGAPGTPGRIGLEGPPGPPGFPGPKGEPGFALPGPPGPPGLPGFKGALGPKGDRGFPGPPGPPGRTGLDGLPGPKGDVGPNGQPGPMGPPGLPGIGVQGPPGPPGIPGPIGQPGLHGIPGEKGDPGPPGLDVPGPPGERGSPGIPGAPGPIGPPGSPGLPGKAGASGFPGTKGEMGMMGPPGPPGPLGIPGRSGVPGLKGDDGLQGQPGLPGPTGEKGSKGEPGLPGPPGPMDPNLLGSKGEKGEPGLPGIPGVSGPKGYQGLPGDPGQPGLSGQPGLPGPPGPKGNPGLPGQPGLIGPPGLKGTIGDMGFPGPQGVEGPPGPSGVPGQPGSPGLPGQKGDKGDPGISSIGLPGLPGPKGEPGLPGYPGNPGIKGSVGDPGLPGLPGTPGAKGQPGLPGFPGTPGPPGPKGISGPPGNPGLPGEPGPVGGGGHPGQPGPPGEKGKPGQDGIPGPAGQKGEPGQPGFGNPGPPGLPGLSGQKGDGGLPGIPGNPGLPGPKGEPGFHGFPGVQGPPGPPGSPGPALEGPKGNPGPQGPPGRPGPTGFQSLPGPEGPPGLPGNGGIKGEKGNPGQPGLPGLPGLKGDQGPPGLQGNPGRPGLNGMKGDPGLPGVPGFPGMKGPSGVPGSAGPEGEPGLIGPPGPPGLPGPSGQSIIIKGDAGPPGIPGQPGLKGLPGPQGPQGLPGPTGPPGDPGRNGLPGFDGAGGRKGDPGLPGQPGTRGLDGPPGPDGLQGPPGPPGTSSVAHGFLITRHSQTTDAPQCPQGTLQVYEGFSLLYVQGNKRAHGQDLGTAGSCLRRFSTMPFMFCNINNVCNFASRNDYSYWLSTPEPMPMSMQPLKGQSIQPFISRCAVCEAPAVVIAVHSQTIQIPHCPQGWDSLWIGYSFMMHTSAGAEGSGQALASPGSCLEEFRSAPFIECHGRGTCNYYANSYSFWLATVDVSDMFSKPQSETLKAGDLRTRISRCQVCMKRT

SEQ ID NO: 296253 - DNA, 480 bp, Artificial Sequence
  derived and/or modified sequence
atgtgctggaccaggacagccacctgccctgtgtggaggagcggccagaggcccaccagcggccgcaccatgaggggcagcggctttggaggccgccgccacccctacggcaaggacagccctgcccctcctggcagcgctgagctgcccggcctgcagggctctgtgcccccccactggggcggcgtggccggcaacagcgctggccaccggggcccccgggcccgctgcccccggggcggggccggcggctgtgcccaccaccaccctggccccccccagctgctgcgggacagccggccctgcaggacaggctggcaggagagcgctggagctgaggcccggggccagggccgggaggtgttcttccccccagccaggagagctgctggcaccaggcaccctggctgtgtgtgtgctgtgggcgccgccggggctgctgctgagggccctgctgcccctgggggcggcggcggctag

SEQ ID NO: 296254 - protein, 849 aa, Artificial Sequence
  derived and/or modified sequence
MHKHQHCCKCPECYEVTRLAALRRLEPPGYGDWQVPDPYGPGGGNGASAGYGGYSSQTLPSQAGATPTPRTKAKLIPTGRDVGPVPPKPVPGKSTPKLNGSGPSWWPECTCTNRDWYEQARPAPLLVNPETLKHSLSVNGSDGMFKYEEIVLERGNSGLGFSIAGGIDNPHVPDDPGIFITKIIPGGAAAMDGRLGVNDCVLRVNEVDVSEVVHSRAVEALKEAGPVVRLVVRRRQPPPETIMEVNLLKGPKGLGFSIAGGIGNQHIPGDNSIYITKIIEGGAAQKDGRLQIGDRLLAVNNTNLQDVRHEEAVASLKNTSDMVYLKVAKPGSLHLNDMYAPPDYASTFTALADNHISHNSSLGYLGAVESKVSYPAPPQVPPTRYSPIPRHMLAEEDFTREPRKIILHKGSTGLGFNIVGGEDGEGIFVSFILAGGPADLSGELRRGDRILSVNGVNLRNATHEQAAAALKRAGQSVTIVAQYRPEEYSRFESKIHDLREQMMNSSMSSGSGSLRTSEKRSLYVRALFDYDRTRDSCLPSQGLSFSYGDILHVINASDDEWWQARLVTPHGESEQIGVIPSKKRVEKKERARLKTVKFHARTGMIESNRDFPGLSDDYYGAKNLKGVTSNTSDSESSSKGQEDAILSYEPVTRQEIHYARPVIILGPMKDRVNDDLISEFPHKFGSCVPHTTRPRRDNEVDGQDYHFVVSREQMEKDIQDNKFIEAGQFNDNLYGTSIQSVRAVAERGKHCILDVSGNAIKRLQQAQLYPIAIFIKPKSIEALMEMNRRQTYEQANKIYDKAMKLEQEFGEYFTAIVQGDSLEEIYNKIKQIIEDQSGHYIWVPSPEKL

SEQ ID NO: 296255 - DNA, 2550 bp, Artificial Sequence
  derived and/or modified sequence
atgcacaaacatcagcactgttgcaagtgtcctgagtgttacgaggtgacccgtctcgcagccctacgccggctggagcctcctggctacggggattggcaggtgcctgacccatacggaccaggagggggaaacggtgccagcgctggatacggtgggtattcgagtcaaaccttaccgagccaggcaggagccactcccaccccccgcacaaaggccaagctcatcccaacagggcgggatgtggggcctgtgcctcccaaacctgttcctggaaaatctacacccaagctaaatggcagcgggccgtcatggtggcccgagtgtacctgcactaacagagattggtacgagcaagccaggcctgccccgcttctggtcaaccctgaaactctcaagcactcattatccgtgaatgggtccgatgggatgtttaagtatgaagagattgtgctggagagaggtaatagtggccttggttttagcatcgcaggagggatagacaatccccacgtgccagatgaccccggaatctttataactaagattatccctggcggcgccgcagcgatggacgggagactaggtgttaatgattgcgtgcttcgagtcaatgaggtcgacgtgtcagaagtcgttcattctagggccgtagaggccctgaaagaggctgggcccgtagtgcgtctggtggtgaggaggcgtcagcctccccccgaaaccatcatggaagtaaatcttctaaaaggacccaaaggccttggtttcagcatcgctggcggcatcgggaatcaacatatccctggcgacaatagcatatacatcaccaaaattattgaagggggggcagcccaaaaagatggaagactgcagatcggagacagactattggctgtgaataacacgaatcttcaggatgttcgtcatgaggaagccgtggctagcctgaagaacacctctgacatggtctatctcaaagttgcaaaacctggctcacttcaccttaacgacatgtatgcgccacctgattatgcttcaacatttactgccctggcagacaatcatattagtcacaattcttcactgggctacctgggagcagtcgagagtaaagtgagttatcccgctccccctcaggttccaccaaccagatatagcccaatacctcgacacatgcttgccgaggaggattttactcgagagccccggaagatcatcttacacaaggggtcgactggattgggtttcaacattgtggggggtgaggatggcgaaggtatttttgtttcattcatcctggctgggggcccagctgatctctctggagagttgaggcgaggcgatcgcatactgtcagtgaatggagtcaatttgaggaacgccactcatgagcaagccgccgctgcgttgaagcgggcagggcagagcgtgactattgttgcccagtatcgccccgaagaatactcccggtttgaaagtaaaattcacgacctacgagagcagatgatgaattcaagcatgtctagtggcagcgggagcttgcggacaagcgagaagagatcactctatgtgcgagctctcttcgattacgatcgcaccagagactcttgcctcccatcccagggccttagcttttcatatggcgatatccttcatgtgattaatgcaagtgatgatgaatggtggcaggcaagactcgtgactccccacggtgaatccgaacagataggcgtgataccatccaagaaacgggtggagaagaaagaacgggcaaggttgaagaccgtgaagtttcatgccagaacaggtatgattgagtctaatagggattttcccggcctttccgacgactattacggagccaagaatctcaaaggcgtgacctccaacaccagcgactccgagtctagcagtaaagggcaggaggatgcaattttatcttacgagccagtgacaaggcaggaaatccattatgcaagaccagtgattatactgggccccatgaaggaccgagtgaacgatgatctcattagtgaatttccacacaaatttgggagctgtgtgcctcacacaacacgcccgcgaagggataacgaagtggacggacaagactaccactttgtggtgtcaagagaacagatggaaaaggacattcaggataacaaatttattgaggcgggtcaatttaatgacaacctttatggtacctccattcagtccgtacgtgccgtggctgaaaggggaaagcactgtattctggatgtgtccggaaatgccattaagcgactgcaacaggcccagctctaccccattgctatatttattaagcctaaaagtattgaggcactgatggagatgaaccgcagacagacatatgagcaggccaataaaatctacgataaggcaatgaagttggaacaggagttcggcgagtactttacagccattgtgcagggagactccctcgaagaaatatacaacaagataaagcaaatcatcgaagatcaatctgggcattatatctgggtgcccagtcctgaaaagctctag

SEQ ID NO: 296256 - DNA, 2550 bp, Artificial Sequence
  derived and/or modified sequence
atgcacaagcaccagcactgctgcaagtgcccagagtgctatgaggtgacccggctggccgccctgcggcggctggagcccccaggctacggggactggcaggtgcctgacccctacggccctgggggcggcaatggagccagcgctggctatggaggctacagcagccagaccctgcccagccaggccggggccacccccacccccaggaccaaggccaagctgatccccaccggcagagatgtgggccctgtgccccccaagcctgtgcctgggaagagcacccccaagctgaatggaagtggccccagctggtggccagagtgcacctgcaccaacagagactggtatgagcaggcccggcctgcccccctgctggtgaaccctgagaccctgaagcacagcctgtctgtgaatggaagtgatggcatgttcaagtatgaggagatcgtgctggagcggggcaacagcggcctgggcttcagcattgctgggggcatcgacaacccccacgtgcctgatgaccccggcatcttcatcaccaagatcatccctggaggagctgctgccatggatggccgcctgggcgtgaatgactgtgtgctgcgggtgaatgaggtggatgtgtctgaggtggtgcacagcagagctgtggaggccctgaaggaggccggccctgtggtgcggctggtggtgagaagacggcagcccccacctgagaccatcatggaggtgaacctgctgaagggccccaagggcctgggcttcagcattgctgggggcatcggcaaccagcacatccctggggacaacagcatctacatcaccaagatcattgaaggaggagctgcccagaaggatggccgcctgcagatcggggaccggctgctggccgtgaacaacaccaacctgcaggatgtgagacatgaggaggccgtggccagcctgaagaacaccagtgacatggtgtacctgaaggtggccaagccaggcagcctgcacctgaatgacatgtatgcccccccagactatgccagcaccttcaccgccctggccgacaaccacatcagccacaacagcagcctgggctacctgggcgctgtggagagcaaggtgtcctacccagccccaccccaggtgccccccacccgctacagccccatccccaggcacatgctggccgaggaggacttcacccgggagcccaggaagatcatcctgcacaagggcagcacaggcctgggcttcaacatcgtgggcggggaggatggagagggcatctttgtgtccttcatcctggccggcggccctgctgacctgtctggagagctgcggcggggggaccgcatcctgtctgtgaatggagtgaacctgagaaatgccacccatgagcaggccgccgccgccctgaagagagctggccagagcgtgaccatcgtggcccagtacagacctgaggagtacagcagatttgagagcaagatccatgacctgcgggagcagatgatgaacagctccatgagcagcggcagcggcagcctgcggaccagcgagaagaggagcctgtatgtgcgggccctgtttgattatgacaggacccgggacagctgcctgcccagccagggcctgtccttctcctatggagacatcctgcacgtgatcaatgccagtgatgatgagtggtggcaggcccggctggtgaccccccacggggagagcgagcagatcggggtcatccccagcaagaagagggtggagaagaaggagcgggcccggctgaagacagtgaagttccacgccaggacaggcatgattgagagcaacagagacttccctggcctgagtgatgactactatggagccaagaacctgaagggcgtgaccagcaacaccagtgacagcgagagcagcagcaagggccaggaggatgccatcctgtcctatgagcctgtgacccggcaggagatccactacgcccggcctgtgatcatcctgggccccatgaaggacagagtgaatgatgacctgatcagcgagttcccccacaagtttggcagctgtgtgccccacaccacccggccccggcgggacaatgaggtggatggccaggactaccactttgtggtgtcccgggagcagatggagaaggacatccaggacaacaagttcatcgaggccggccagttcaatgacaacctgtatggcaccagcatccagagcgtgcgggctgtggccgagcggggcaagcactgcatcctggatgtgtctggaaatgccatcaagaggctgcagcaggcccagctgtaccccatcgccatcttcatcaagcccaagagcattgaggccctgatggagatgaacagacggcagacctatgagcaggccaacaagatctatgacaaggccatgaagctggagcaggagtttggagagtacttcaccgccatcgtgcagggcgacagcctggaggagatctacaacaagatcaagcagatcatcgaggaccagagcggccactacatctgggtgcccagccctgagaagctgtag

SEQ ID NO: 296257 - DNA, 2550 bp, Artificial Sequence
  derived and/or modified sequence
atgcacaagcaccagcactgctgcaagtgccccgagtgctacgaggtcacgaggctggcagccctgagacgtctggagccgcctggatatggcgattggcaggtgcctgacccttacgggcctggaggcggcaatggcgcttccgccggctatggtggctactccagtcaaaccctcccgagccaggcaggcgccacacccaccccccggaccaaggctaaactcatccccaccggtcgcgacgtcggcccggtccctccaaagccagtgcccggcaaaagcacgcctaaactcaacggaagtggaccgtcctggtggcctgaatgcacgtgcacaaatagggattggtacgaacaggctagaccagctccgttgctggtcaaccctgagactctaaaacattcacttagcgtgaatggttcggacggcatgtttaagtatgaagagatcgttctcgaacggggaaacagcggacttggattctcgatcgctggtggcatagacaatccacatgttcctgacgatcccggaattttcataacaaaaattatccctggcggtgctgccgcgatggatggaagacttggagtcaacgactgtgttctgcgtgttaacgaggttgacgtgtccgaagtcgtccactcccgcgcggtagaggcgcttaaggaggccggtcctgttgtaaggttggtggtgagacgaaggcagcccccgcctgagaccatcatggaggtcaacctcttgaaaggcccaaagggccttggcttctcaatagctggcggtatagggaaccagcacatccctggggacaacagtatttacatcacaaagataatagaagggggagcggcccagaaggacggccgactgcagataggcgaccggctgctagcagttaataacaccaacctccaagacgtgagacatgaggaggcagtcgcatccttaaagaatacttccgatatggtttatctaaaggttgccaagcccggctcgttgcatcttaatgacatgtatgcaccaccggattatgcgtctacgttcaccgcattggccgacaatcacatctcccacaactctagcttaggctacctcggcgctgtggagtcaaaagtcagctatccagcaccgcctcaggtgcctcctacccgatacagcccaattccacgccacatgttagcagaggaggacttcaccagagagccccggaaaatcattctacacaaaggtagtaccggcctaggcttcaatatcgtaggcggtgaagatggtgagggtatcttcgtctctttcattttggccggcggccccgccgacctgagcggcgagctgcgtcgcggtgaccgtattctgtccgttaatggtgtgaatttgcggaacgccacccatgaacaggccgctgccgctttgaaaagagcaggacagtctgtcacaatcgtggctcagtaccgccccgaggaatactcaaggttcgagtcgaagattcacgacctgcgcgagcaaatgatgaactccagcatgagttccgggtccggctcacttagaacaagcgaaaagcggagtttatacgttcgtgcacttttcgattacgacaggacccgcgattcttgtctgccgtctcaggggctgtcattttcctatggggacatactccatgtgataaatgcctctgatgatgaatggtggcaggcccgactggtgaccccacatggtgaaagtgagcagattggcgtgattcctagcaagaagcgagtagagaagaaagagagagcgcgcttaaagactgtcaaatttcacgccagaaccggaatgatcgagtccaatcgggacttccccggcctctccgacgactactacggtgcaaagaaccttaagggagtgacttctaacacctctgatagcgagtctagttctaagggtcaggaagacgcaatcctctcctacgaacccgtaactagacaggagatccactacgccagaccagtcatcatcctcggacctatgaaagatagggtcaacgatgatttgatcagtgagttcccacacaagtttgggtcttgcgtccctcacacaacacggccaaggagggataacgaagtggatgggcaggattatcattttgttgtatccagagagcagatggagaaggacattcaagacaataaatttattgaggcagggcaatttaacgataacctatacggcacatcaatccagtctgtacgagcggtcgccgagcggggaaaacactgcattctggacgtgtctgggaatgctattaaaaggcttcagcaggctcagctgtaccccattgctatctttataaagcctaagtccattgaagcccttatggagatgaatcgtcgccaaacctacgagcaagctaacaaaatttatgataaagcaatgaaactagaacaagagttcggggagtacttcactgccatagtgcagggagattccctggaagaaatttataacaaaattaagcagatcatagaggaccagtccggccactatatatgggtaccatcccctgagaagttatag

SEQ ID NO: 296258 - DNA, 2550 bp, Artificial Sequence
  derived and/or modified sequence
atgcataaacaccaacattgttgtaaatgccccgagtgttacgaagtaacaagattggccgcactcagaagactagaaccaccgggatatggagactggcaggtcccagacccatacgggcctgggggagggaacggagcctctgccggatatggaggttactccagtcagacactcccgtcccaagcgggtgctactcctaccccgagaaccaaagccaagctgattccaaccggacgtgatgttggaccggtgccccctaagcctgtccctggtaaaagcaccccgaaattaaatgggtccgggccttcatggtggccagaatgtacgtgtactaacagagactggtatgagcaggcacggcctgcacctcttctcgttaatcccgagacactgaaacacagtctgtcagttaacggctccgatgggatgtttaagtatgaggagatagtcctcgagcgcggaaacagcggcctcggattctcaatcgccggaggaatcgacaatcctcatgtgccagacgatcccggaatcttcattaccaagatcataccagggggtgcggcagccatggatggtaggttgggagtaaacgattgcgtgctgagagtgaacgaggtcgatgtgtctgaagtcgttcactcccgggcagtggaggccttaaaggaggcaggcccagtcgtcagactcgtggtgcgaagacggcaaccccctcccgaaacaattatggaagtcaacctgctcaaaggccctaagggactgggcttctcaatagccggtggtattggaaatcagcacatacctggagacaacagcatttacatcactaagattatcgaggggggagcggcacagaaagatgggcgacttcagatcggcgacagactgctcgccgtgaacaacacaaacttacaagacgtgcgacacgaagaggccgtggcctcccttaagaacactagcgatatggtttacctgaaggttgcgaagcctggtagcctgcacctgaatgatatgtacgctccacctgactatgccagcacctttacggctcttgccgacaatcatattagccacaactcatccttgggatatctgggcgcagtggagagcaaagtttcatacccggctccaccacaggtccctccaacccggtactcgcctattccccgtcatatgcttgccgaggaagactttaccagggaacccaggaagattattcttcataagggcagtactgggctgggatttaatattgtggggggagaggacggggagggaatctttgtgtcttttattctggctggtggtcctgcggatttgtcaggtgaattgcgtaggggcgatcggatcctgagcgtgaacggcgtcaatctgagaaacgcgacacatgaacaggccgctgccgcactcaaacgcgcaggacagtctgtcaccattgttgcgcagtatcgacccgaggagtatagtcgctttgagtctaaaatccacgacctgcgggagcagatgatgaattcctcaatgtcatcagggtcgggcagcctgcggacttccgagaaacgatctctgtatgtgagggccttatttgattacgatcgtacccgagattcttgcctgccgtctcagggcctttcttttagttacggagatatcttgcacgtcatcaatgcgtcagacgacgagtggtggcaagcccgattggttaccccccacggggagtcagaacagattggtgtgatcccctccaagaagagggtggagaagaaggagcgggctcggctgaagactgtgaagtttcacgctagaaccgggatgatcgagtctaaccgggatttccctggactatccgacgactattacggggctaaaaatctaaaaggcgtgacttctaacacctctgattccgagagttcctccaaggggcaagaagacgccattctgagctatgaaccagtgacccgccaagaaattcactacgccagaccggtgataatattagggccaatgaaggatagggtgaatgacgacctaatctctgagtttccacacaagttcggctcatgtgtgccacacacaacaaggccgaggagagataacgaagttgatggtcaggattatcactttgtagtgtctcgcgaacagatggagaaagacattcaggataataaatttattgaggcaggccagttcaacgacaacctatacgggaccagcatccaaagtgtacgggctgtggccgaacggggaaaacattgcatactcgacgtcagtggaaacgccattaagcgtttgcagcaggcacagctgtacccaattgccatttttatcaagcccaagtccatcgaggcattgatggagatgaaccggcgtcagacttacgaacaagctaacaaaatttacgacaaggccatgaaactggaacaagagttcggtgagtactttaccgcgattgtccagggggacagtctggaggaaatctataacaagattaaacaaatcattgaagaccagtcaggacattatatttgggttcctagccctgagaagctgtag

SEQ ID NO: 296259 - DNA, 2550 bp, Artificial Sequence
  derived and/or modified sequence
atgcacaagcaccagcactgctgcaagtgccccgagtgctacgaggtgaccagactggccgccctgagaagactggagccccccggctacggcgactggcaggtgcccgacccctacggccccggcggcggcaacggcgccagcgccggctacggcggctacagcagccagaccctgcccagccaggccggcgccacccccacccccagaaccaaggccaagctgatccccaccggcagagacgtgggccccgtgccccccaagcccgtgcccggcaagagcacccccaagctgaacggcagcggccccagctggtggcccgagtgcacctgcaccaacagagactggtacgagcaggccagacccgcccccctgctggtgaaccccgagaccctgaagcacagcctgagcgtgaacggcagcgacggcatgttcaagtacgaggagatcgtgctggagagaggcaacagcggcctgggcttcagcatcgccggcggcatcgacaacccccacgtgcccgacgaccccggcatcttcatcaccaagatcatccccggcggcgccgccgccatggacggcagactgggcgtgaacgactgcgtgctgagagtgaacgaggtggacgtgagcgaggtggtgcacagcagagccgtggaggccctgaaggaggccggccccgtggtgagactggtggtgagaagaagacagcccccccccgagaccatcatggaggtgaacctgctgaagggccccaagggcctgggcttcagcatcgccggcggcatcggcaaccagcacatccccggcgacaacagcatctacatcaccaagatcatcgagggcggcgccgcccagaaggacggcagactgcagatcggcgacagactgctggccgtgaacaacaccaacctgcaggacgtgagacacgaggaggccgtggccagcctgaagaacaccagcgacatggtgtacctgaaggtggccaagcccggcagcctgcacctgaacgacatgtacgccccccccgactacgccagcaccttcaccgccctggccgacaaccacatcagccacaacagcagcctgggctacctgggcgccgtggagagcaaggtgagctaccccgcccccccccaggtgccccccaccagatacagccccatccccagacacatgctggccgaggaggacttcaccagagagcccagaaagatcatcctgcacaagggcagcaccggcctgggcttcaacatcgtgggcggcgaggacggcgagggcatcttcgtgagcttcatcctggccggcggccccgccgacctgagcggcgagctgagaagaggcgacagaatcctgagcgtgaacggcgtgaacctgagaaacgccacccacgagcaggccgccgccgccctgaagagagccggccagagcgtgaccatcgtggcccagtacagacccgaggagtacagcagattcgagagcaagatccacgacctgagagagcagatgatgaacagcagcatgagcagcggcagcggcagcctgagaaccagcgagaagagaagcctgtacgtgagagccctgttcgactacgacagaaccagagacagctgcctgcccagccagggcctgagcttcagctacggcgacatcctgcacgtgatcaacgccagcgacgacgagtggtggcaggccagactggtgaccccccacggcgagagcgagcagatcggcgtgatccccagcaagaagagagtggagaagaaggagagagccagactgaagaccgtgaagttccacgccagaaccggcatgatcgagagcaacagagacttccccggcctgagcgacgactactacggcgccaagaacctgaagggcgtgaccagcaacaccagcgacagcgagagcagcagcaagggccaggaggacgccatcctgagctacgagcccgtgaccagacaggagatccactacgccagacccgtgatcatcctgggccccatgaaggacagagtgaacgacgacctgatcagcgagttcccccacaagttcggcagctgcgtgccccacaccaccagacccagaagagacaacgaggtggacggccaggactaccacttcgtggtgagcagagagcagatggagaaggacatccaggacaacaagttcatcgaggccggccagttcaacgacaacctgtacggcaccagcatccagagcgtgagagccgtggccgagagaggcaagcactgcatcctggacgtgagcggcaacgccatcaagagactgcagcaggcccagctgtaccccatcgccatcttcatcaagcccaagagcatcgaggccctgatggagatgaacagaagacagacctacgagcaggccaacaagatctacgacaaggccatgaagctggagcaggagttcggcgagtacttcaccgccatcgtgcagggcgacagcctggaggagatctacaacaagatcaagcagatcatcgaggaccagagcggccactacatctgggtgcccagccccgagaagctgtag

SEQ ID NO: 296260 - DNA, 6109 bp, Artificial Sequence
  derived and/or modified sequence
cagagcagaagcggtcctcacagcacccattctctgcttgagctcccgcttcttctttgccgctgggcctcggcccagaagccacgacgggcgacacggagccgccagtgctggagggggagccgtgggtgcggggcagcgtgggggccgaggccccgggacgcccgcccggccccaggccccgctcagcccgggcgcccccacgggtgccccccccttcttggtccgagcagtgtgagtgtgccagggagcccggcggcggcggcggcggtggtggcggcggtggcggcggcgtggaatccggcgtgggctggggggtccgagccgcggggggcagtgccatgcacaagcaccagcactgctgtaagtgccctgagtgctatgaggtgacccgcctggccgccctgcggcgcctcgagcctccgggctacggcgactggcaagtccccgacccttacgggccaggtgggggcaacggcgccagcgcgggttatgggggctacagctcgcagaccttgccctcgcaggcgggggccacccccacccctcgcaccaaggccaagctcatccccaccggccgggatgtggggccggtgcctcctaagccagtcccgggcaagagcacccccaaactcaacggcagcggccccagctggtggccagagtgcacctgtaccaaccgggactggtatgagcaggccaggcctgcacccctcctagtgaaccctgagacactgaagcacagcctctcggtgaatggcagtgatggcatgttcaaatatgaggaaatcgtacttgagaggggcaactctggcctgggcttcagtatcgcaggtggcatcgacaatccccatgtccctgatgaccctggcatctttattaccaagattatccctggtggagcagctgccatggatgggaggctgggggtgaatgactgtgtgctgcgggtgaatgaggtggacgtgtcggaggtggtacacagccgggcggtggaggcgctgaaggaggcaggccctgtggtgcgattggtggtgcggaggcgacagcctccacccgagaccatcatggaggtcaacctgctcaaagggcccaaaggcctgggtttcagcattgctgggggtattggcaaccagcacatcccaggagacaacagcatctacatcaccaagatcattgaggggggtgctgctcagaaggatggacgcctacagattggggaccggctgctggcggtgaacaacaccaatctgcaggatgtgaggcacgaggaagctgtggcctcactgaagaacacatctgatatggtgtatttgaaggtggccaagccaggcagcctccacctcaacgacatgtacgctccccctgactacgccagcacttttactgccttggctgacaaccacataagccataattccagcctgggttatctcggggctgtggagagcaaggtcagctaccctgctcctcctcaggttccccccacccgctactctcctattcccaggcacatgctggctgaggaggacttcaccagagagcctcgcaagatcatcctgcacaaaggctccacaggcctgggcttcaacatcgtaggaggagaggatggagaaggcatttttgtctccttcatcctggcaggaggcccagctgacctgagtggggagctgcgcaggggagaccggatcttatcggtgaatggagtgaatctgaggaatgcaactcatgagcaggctgcagctgctctgaaacgggccggccagtcagtcaccattgtggcccagtacagacctgaagaatacagtcgctttgaatcgaagatacatgacttacgagaacaaatgatgaacagcagcatgagctctgggtctgggtccctccgaacaagtgaaaagaggtccttgtatgtcagggccctgtttgattatgatcggactcgggacagctgcctgccaagccaggggctcagcttctcttatggtgacattctgcatgtcattaatgcctctgatgatgagtggtggcaggcaaggctggtgaccccacacggagaaagtgagcagatcggtgtgatccccagtaagaagagggtggaaaagaaagaaagagctcgattgaaaactgtgaagttccatgccaggacggggatgattgagtctaacagggacttcccggggttaagtgacgattattatggagcaaagaacctgaagggagtgacatccaacaccagtgacagcgaaagcagttccaaaggacaagaggatgctattttgtcatatgagccagtgacacggcaagaaattcactatgcaaggcctgtgatcatcctgggcccaatgaaggaccgagtcaatgatgacctgatctccgaatttccacataaatttggatcctgtgtgccacatactacccggcctcgacgtgataatgaggtggatggacaagactaccactttgtggtgtcccgagaacaaatggagaaagatattcaggacaacaagttcatcgaggcgggccaatttaatgataacctctatgggaccagcatccagtcagtgcgggcagttgcagagaggggcaagcactgcatcttagatgtttccggcaatgctatcaagagactgcagcaagcacaactttaccccattgccattttcatcaagcccaagtccattgaagcccttatggaaatgaaccgaaggcagacatatgaacaagcaaataagatctatgacaaagccatgaaactggagcaggaatttggagagtactttacagccattgtacagggtgactcactggaagagatttataacaaaatcaaacaaatcattgaggaccagtctgggcactacatttgggtcccatcccctgaaaaactctgaagaatcccctccaaccattctcttgtgaacagaagaaatcaagtccctcttccctcctccctcttcattcctgtccccatggggagaacaaatgctactgttcttgtccccttttttagatatgtcaaaaaaaattaagttttctagtcctgttctttttttttttttaagtttttgtttgtttcagtttattttttgggatgatgccatctcattcatcatgtgactgtgcccattcctgcatggacctttcccaagcgctagcacaggtgcaaaatccatcagagccattgttttcataaaaaccaagcagaagtgaagagaaaagaggaggactgatggaaagacagactctggacagctgcacggcttgtgaagtgagctaaatgcaccacatgatgagatgctcctgggcatttctccctatctgtactgctgtcttgcagctctgaacggtgcaacgtaatggcgacagaaagtatcttatttatatatagatatatatatgtaatttatataaaatatatagaaattattatatatatatattatacactctcatataatatatatatattcacacacatttgggttagaaaatctatggagacttcatcaatggtactatgttattagagaaatgctttaattttcatattccaatcagatggcatcttctatcccagctggttgggaagggattgaagatggtagcaagtgctgcactaagggcactcgcatttggtcattctcttgagagctaggaggggtcagcctgaggccggagaggaagggcttttgcctggggtgagagggtgagagacttgacctgaaagcagctgctgcccctgaggtgcagccagagtcctgtgtgcggacagagagaatggctaatgatgctccgcgtggaattgcctattgttttatgccacctgatgtgtctgcatgagaggtttcctttttgttcctttttaagctgctgttaaaccaaaaccatgttgtgctactgtgtcagccttttcattattgcaaattttacttttactatttaagtgaatgcatagaatccaatttgccaaggttctaaaggcttatgaggtcctgaaggagccaggccttgtgatggagtaggtgacacaggcctggttgtcctgtcagcagaagggaaagcaggggctgggctgagaggaggacacggagggctctgctgaggttccttcctgggttccaccaacagggacagggagtcacttgccttccagttctgtgctgggatggcgggacagcacttggcttgcttggccagctgcgtcatgagtttgatttggtttttttttttttgcagctgcttcatatgctctgctccagcccctccccaacagctggtagcttatggtttcttcaagaggaaagtagactttatgctgtacatttgagctgtagagctaagattcgcttactggtgagctgtgaaaccttgttgctttttcccagagtctgatggcagtgactgtgatcaagggaatcttcaccgccacaagtgcaggcagcaggtgtggttcaggtccccccccaccccactgtgctcctttgaagccaacgtgcctccctcgcctccatactggagggacgacgcaggggagaacagagaagtgcttggccctaggattgaggcacttgtttcctagcccgctgggttagggctggtgcaagcgaggcaatgttgaggatgctttaagcactaccagccgaatccgggaactctgttaacagttgtccaaccagcagaatgaggctaactgtataaagcatgggacccaggatgaggataaggaaaggacagcggctttccctgggcagtacaatggcttgaaggcaaaaagggataaagtgacagccgactgtgactctggtgaggaggggtgagcagggaggttgattctctgatgttaactaagtggcaaagtctcaaccgtgctcagccctccccctcccagggaagagaaacaaagattcaaagtaagcatgatactagtgggtttaccagtgtttcttccaaggagacatatattttttaataaacgatagttgcaatgaactgtggctcagagaccttcttaaagtagttgagaagggagggcgtgggcaaagcagtgggaagaacatcccaaacttttgggggccagagggctctctccttagtgatgatcagctagccgagctgggccgtcctggggatcggtacagctccctggggtggtgacaggccctttgtgaaagttgtgtgcttggtcttccaccccagccccagacactgcttcaaatagcaccaaccagatgggagtccacatctgtggtggcaaaatgctgacattttcccaagaggtacacaaggtgggagaggcctgctgtagcagaggtgtgtgttagagaaagcaggggcctgatttagtagcagagaactgggtgagaaaaatggccagagaaagtgacctgccagctaccagtgtttccgaaaatgagggtgggatgggcccatttgcagagcaggacagcagtcatccccatagccctctgaggaggggagggatgcttagagcaggcagttctggcagttctgacgtggcaggtgccattgcaacttgtgcggaggagtcttaggaagtgctgtcataattcataaggtcaagagcaacatctggatgaatgagccacctgaaatgtgtgtgggctgagccacaggaagggtgagtcctcttgcttgtggtgctttatggtgtgcaggttgcttgctttcccacattctctcatttgcttgaaggcagcctaacaaaagggagtccccaaagagctccatgagagcttaagaaaattcatctcctgaggacaaagagaacaaagatctgtcctgtggtcacactgttgaggctctgtcttcacagctgatgttctcctagtggaggtacagctgaagaacattcagccccagcacgagaagatacagagcaacttggaaaccccaaagggagacacacccttaacactgccgtgctgtgctgtgccgtgtcctgaaggaggagagagccctatctcctcctggttttgttgctgacattgcagctgatcatgccttgactccttcatctctaacagaggaagaactgtattatcaaaccttatggtctacccatgaataaataaaatatttgttcaagcac

SEQ ID NO: 296261 - protein, 1583 aa, Artificial Sequence
  derived and/or modified sequence
MAGPGGWRDREVTDLGHLPDPTGIFSLDKTIGLGTYGRIYLGLHEKTGAFTAVKVMNARKTPLPEIGRRVRVNKYQKSVGWRYSDEEEDLRTELNLLRKYSFHKNIVSFYGAFFKLSPPGQRHQLWMVMELCAAGSVTDVVRMTSNQSLKEDWIAYICREILQGLAHLHAHRVIHRDIKGQNVLLTHNAEVKLVDFGVSAQVSRTNGRRNSFIGTPYWMAPEVIDCDEDPRRSYDYRSDVWSVGITAIEMAEGAPPLCNLQPLEALFVILRESAPTVKSSGWSRKFHNFMEKCTIKNFLFRPTSANMLQHPFVRDIKNERHVVESLTRHLTGIIKKRQKKKGIPLIFEREEAIKEQYTVRRFRGPSCTHELLRLPTSSRCRPLRVLHGEPSQPRWLPDREEPQVQALQQLQGAARVFMPLQALDSAPKPLKGQAQAPQRLQGAARVFMPLQAQVKAKASKPLQMQIKAPPRLRRAARVLMPLQAQVRAPRLLQVQSQVSKKQQAQTQTSEPQDLDQVPEEFQGQDQVPEQQRQGQAPEQQQRHNQVPEQELEQNQAPEQPEVQEQAAEPAQAETEAEEPESLRVNAQVFLPLLSQDHHVLLPLHLDTQVLIPVEGQTEGSPQAQAWTLEPPQAIGSVQALIEGLSRDLLRAPNSNNSKPLGPLQTLMENLSSNRFYSQPEQAREKKSKVSTLRQALAKRLSPKRFRAKSSWRPEKLELSDLEARRQRRQRRWEDIFNQHEEELRQVDKDKEDESSDNDEVFHSIQAEVQIEPLKPYISNPKKIEVQERSPSVPNNQDHAHHVKFSSSVPQRSLLEQAQKPIDIRQRSSQNRQNWLAASESSSEEESPVTGRRSQSSPPYSTIDQKLLVDIHVPDGFKVGKISPPVYLTNEWVGYNALSEIFRNDWLTPAPVIQPPEEDGDYVELYDASADTDGDDDDESNDTFEDTYDHANGNDDLDNQVDQANDVCKDHDDDNNKFVDDVNNNYYEAPSCPRASYGRDGSCKQDGYDGSRGKEEAYRGYGSHTANRSHGGSAASEDNAAIGDQEEHAANIGSERRGSEGDGGKGVVRTSEESGALGLNGEENCSETDGPGLKRPASQDFEYLQEEPGGGNEASNAIDSGAAPSAPDHESDNKDISESSTQSDFSANHSSPSKGSGMSADANFASAILYAGFVEVPEESPKQPSEVNVNPLYVSPACKKPLIHMYEKEFTSEICCGSLWGVNLLLGTRSNLYLMDRSGKADITKLIRRRPFRQIQVLEPLNLLITISGHKNRLRVYHLTWLRNKILNNDPESKRRQEEMLKTEEACKAIDKLTGCEHFSVLQHEETTYIAIALKSSIHLYAWAPKSFDESTAIKVCIDQSADSEGDYMSYQAYIRILAKIQAADPVNRFKRPDELLHLLKLKVFPTLDHKPVTVDLAIGSEKRLKIFFSSADGYHLIDAESEVMSDVTLPKNPLEIIIPQNIIILPDCLGIGMMLTFNAEALSVEANEQLFKKILEMWKDIPSSIAFECTQRTTGWGQKAIEVRSLQSRVLESELKRRSIKKLRFLCTRGDKLFFTSTLRNHHSRVYFMTLGKLEELQSNYDV

SEQ ID NO: 296262 - protein, 188 aa, Artificial Sequence
  derived and/or modified sequence
MAGPGGWRDREVTDLGHLPDPTGIFSLDKTIGLGTYGRIYLGLHEKTGAFTAVKVMNARKTPLPEIGRRVRVNKYQKSVGWRYSDEEEDLRTELNLLRKYSFHKNIVSFYGAFFKLSPPGQRHQLWMVMELCAAGSVTDVVRMTSNQSLKEDWIAYICREILQPKVIFLGTGCSDSSLKKELCLKHQN

SEQ ID NO: 296263 - protein, 163 aa, Artificial Sequence
  derived and/or modified sequence
MQVPRERIKIAFRLWIPILVIRIVVAGTWPQAPGLSTLGLNIIILPDCLGIGMMLTFNAEALSVEANEQLFKKILEMWKDIPSSIAFECTQRTTGWGQKAIEVRSLQSRVLESELKRRSIKKLRFLCTRGDKLFFTSTLRNHHSRVYFMTLGKLEELQSNYDV

SEQ ID NO: 296264 - DNA, 567 bp, Artificial Sequence
  derived and/or modified sequence
atggctgggccaggagggtggagagacagagaggtcacagatctgggacacctgccagacccgacagggatcttttcactggataaaactataggtctgggcacctacggtagaatctatctagggctgcacgagaaaacaggcgcatttacggctgttaaggtcatgaacgcacgtaagacccctctgcccgaaatcgggaggcgagttcgcgtgaataaatatcaaaagtcagtaggctggcgatactccgacgaagaggaggaccttcgcactgaattaaacctgctgcgcaaatattcgttccataagaatatcgtctcattctatggcgcgtttttcaaactgagccccccaggccagagacaccagttgtggatggtcatggagttgtgcgctgctggatccgttaccgacgtcgtgcggatgacatctaaccaaagcctgaaggaagattggatcgcatacatctgtcgggaaatcctccaaccgaaggtgatcttcttagggaccgggtgtagcgattcttctttgaaaaaagaattgtgcctgaaacatcagaactag

SEQ ID NO: 296265 - DNA, 567 bp, Artificial Sequence
  derived and/or modified sequence
atggccggccctgggggctggagggaccgggaggtgacagacctgggccacctgcctgaccccaccggcatcttcagcctggacaagaccatcggcctgggcacctacggccgcatctacctgggcctgcacgagaagacaggagccttcaccgctgtgaaggtgatgaatgccaggaagacccccctgcctgagatcggccggcgggtgcgggtgaacaagtaccagaagtctgtgggctggagatacagtgatgaggaggaggacctgaggacagagctgaacctgctgaggaagtacagcttccacaagaacatcgtgtccttctacggggccttcttcaagctgagccccccaggccagaggcaccagctgtggatggtgatggagctgtgtgccgccggctctgtgacagatgtggtgaggatgaccagcaaccagagcctgaaggaggactggatcgcctacatctgccgggagatcctgcagcccaaggtgatcttcctgggcaccggctgcagcgacagcagcctgaagaaggagctgtgcctgaagcaccagaactag

SEQ ID NO: 296266 - DNA, 567 bp, Artificial Sequence
  derived and/or modified sequence
atggccggccccggcggctggcgggaccgggaggtgaccgacctggggcatctccccgacccgaccggtatcttctctcttgataaaactattggcctcgggacatacggaaggatctatctgggcctccacgagaaaacgggagcttttacagccgttaaagtaatgaacgcccggaagacgccactgcccgagatcggacggagagttcgtgtgaataagtaccagaagtctgttggttggcgctacagtgacgaggaggaggacctgaggactgaactgaaccttctgaggaaatattccttccacaaaaatatcgtgtctttctacggtgcgttcttcaagctgagcccccccggacagaggcatcagctctggatggttatggagctctgtgccgccggttctgttacggacgtggttcgtatgacctcgaaccagtccctaaaggaggactggatcgcttatatttgccgtgagatccttcagcctaaggtcatctttttagggactggatgtagcgacagcagcctcaaaaaggagctgtgcttgaaacatcagaactag

SEQ ID NO: 296267 - DNA, 832 bp, Artificial Sequence
  derived and/or modified sequence
gtctccaggactgacgctcaggctcctctctcgccttagcccaacttgctttcccgcctcgcaaactccggtttccctccactcccaactcttttcactacacgtttcccctcctctatctcccacgccacgaaccccgatccccagactcctctctcccgccctcctccttcctctctcctcccttcaactcttcatccgcttccacctcagactctgcgcgcacccaattcagtcgcccgctcccgttcggctcctcgaagccatggcgggacctgggggctggagggacagggaggtcacggatctgggccacctgccggatccaactggaatattctcactagataaaaccattggccttggtacttatggcagaatctatttgggacttcatgagaagactggtgcatttacagctgttaaagtgatgaacgctcgtaagacccctttacctgaaataggaaggcgagtgagagtgaataaatatcaaaaatctgttgggtggagatacagtgatgaggaagaggatctcaggactgaactcaaccttctgaggaagtactctttccacaaaaacattgtgtccttctatggagcatttttcaagctgagtccccctggtcagcggcaccaactttggatggtgatggagttatgtgcagcaggttcggtcactgatgtagtgagaatgaccagtaatcagagtttaaaagaagattggattgcttatatctgccgagaaatccttcagccaaaagtcatatttctgggaacgggttgtagtgattccagcctaaagaaagaattgtgtctgaaacatcaaaattaa

SEQ ID NO: 296268 - DNA, 567 bp, Artificial Sequence
  derived and/or modified sequence
atggctgggccaggagggtggcgggatagggaggtgaccgacctgggtcatctgcccgatcctactggtatatttagcctggataaaaccatcggcctcggaacatatggaagaatatacctggggctgcacgaaaagaccggggcttttaccgccgtgaaagtaatgaatgctcgcaagactcccctccctgaaattggtcgccgtgtgagggtcaataaataccagaagtctgtcggatggaggtattccgatgaggaggaagatcttcggacggagttaaatctgttgcgcaagtactctttccacaagaacatcgtgtctttctatggagcattttttaagctcagtcctccgggacaacgtcaccagttatggatggtgatggagctgtgcgctgccggatccgtcacagatgtcgtgcggatgacgtccaaccagtctctgaaggaggactggattgcatacatctgtcgcgagattctgcagcctaaggtaatatttctaggaacgggttgctctgacagctccctgaaaaaagagctttgcttgaagcaccagaactag

SEQ ID NO: 296269 - DNA, 567 bp, Artificial Sequence
  derived and/or modified sequence
atggccggccccggcggctggagagacagagaggtgaccgacctgggccacctgcccgaccccaccggcatcttcagcctggacaagaccatcggcctgggcacctacggcagaatctacctgggcctgcacgagaagaccggcgccttcaccgccgtgaaggtgatgaacgccagaaagacccccctgcccgagatcggcagaagagtgagagtgaacaagtaccagaagagcgtgggctggagatacagcgacgaggaggaggacctgagaaccgagctgaacctgctgagaaagtacagcttccacaagaacatcgtgagcttctacggcgccttcttcaagctgagcccccccggccagagacaccagctgtggatggtgatggagctgtgcgccgccggcagcgtgaccgacgtggtgagaatgaccagcaaccagagcctgaaggaggactggatcgcctacatctgcagagagatcctgcagcccaaggtgatcttcctgggcaccggctgcagcgacagcagcctgaagaaggagctgtgcctgaagcaccagaactag

SEQ ID NO: 296270 - protein, 1181 aa, Artificial Sequence
  derived and/or modified sequence
MRSRSNSGVRLDGYARLVQQTILCHQNPVTGLLPASYDQKDAWVRDNVYSILAVWGLGLAYRKNADRDEDKAKAYELEQSVVKLMRGLLHCMIRQVDKVESFKYSQSTKDSLHAKYNTKTCATVVGDDQWGHLQLDATSVYLLFLAQMTASGLHIIHSLDEVNFIQNLVFYIEAAYKTADFGIWERGDKTNQGISELNASSVGMAKAALEALDELDLFGVKGGPQSVIHVLADEVQHCQSILNSLLPRASTSKEVDASLLSVVSFPAFAVEDSQLVELTKQEIITKLQGRYGCCRFLRDGYKTPKEDPNRLYYEPAELKLFENIECEWPLFWTYFILDGVFSGNAEQVQEYKEALEAVLIKGKNGVPLLPELYSVPPDRVDEEYQNPHTVDRVPMGKLPHMWGQSLYILGSLMAEGFLAPGEIDPLNRRFSTVPKPDVVVQVSILAETEEIKTILKDKGIYVETIAEVYPIRVQPARILSHIYSSLGCNNRMKLSGRPYRHMGVLGTSKLYDIRKTIFTFTPQFIDQQQFYLALDNKMIVEMLRTDLSYLCSRWRMTGQPTITFPISHSMLDEDGTSLNSSILAALRKMQDGYFGGARVQTGKLSEFLTTSCCTHLSFMDPGPEGKLYSEDYDDNYDYLESGNWMNDYDSTSHDVHMYLPTKLFQASRPSFNLLDSPHPRQENQVPSVRVEIHLPRDQSGEVDFKALVLQLKETSSLQEQADILYMLYTMKGPDWNTELYNERSATVRELLTELYGKVGEIRHWGLIRYISGILRKKVEALDEACTDLLSHQKHLTVGLPPEPREKTISAPLPYEALTQLIDEASEGDMSISILTQEIMVYLAMYMRTQPGLFAEMFRLRIGLIIQVMATELAHSLRCSAEEATEGLMNLSPSAMKNLLHHILSGKEFGVERSVRPTDSNVSPAISIHEIGAVGATKTERTGIMQLKSEIKQVEFRRLSISAESQSNGGHPLGIDLMSPSFMSPGTSMTPSSGSFPSAYDQQSSKDSRQGQWQRRRRLDGALNRVPVGFYQKVWKVLQKCHGLSVEGFVLPSSTTREMTPGEIKFSVHVESVLNRVPQPEYRQLLVEAILVLTMLADIEIHSIGSIIAVEKIVHIANDLFLQEQKTLGADDTMLAKDPASGICTLLYDSAPSGRFGTMTYLSKAAATYVQEFLPHSICAMQ

SEQ ID NO: 296271 - DNA, 3546 bp, Artificial Sequence
  derived and/or modified sequence
atgaggtcaagatctaactcaggagtccgcctcgacggctacgcgcggctggtgcagcagacaattctctgtcaccaaaatccagttactggtctactccctgccagctatgaccaaaaagacgcatgggtacgagacaatgtgtactcgattctcgctgtgtgggggctcgggttagcgtatagaaagaacgcagacagagatgaagacaaagccaaggcgtacgagcttgaacagagtgtggtgaagttgatgaggggcctccttcactgtatgattcgacaagtggacaaggtggagtcgtttaaatactcacaatccacaaaagatagcttgcatgccaagtacaacacgaagacttgcgctaccgtggtgggtgatgatcagtggggccatctgcagctggacgccaccagcgtttacctgctgtttttggctcagatgactgcatctgggctgcacatcattcactccctggacgaagtcaattttatacagaatcttgtcttctatattgaggcggcctataagactgctgactttggcatttgggagcggggggacaaaacgaatcaaggaatttctgaattgaacgcctcctccgtcgggatggccaaagctgccctcgaggccttggatgagctggacctgtttggtgtgaaagggggtccacaaagtgtcattcacgtgcttgccgatgaagtgcagcactgccagtcaattctcaactctttattaccgagagcatctaccagtaaggaggtcgacgccagccttttgagtgtggtgagctttcccgcatttgctgtggaggactctcagctcgtagagcttaccaaacaggagatcatcaccaaattacagggtaggtatggttgctgcaggttcctcagagacggctataaaacccccaaggaagatcccaatcgtctgtactatgaaccagccgagctgaagctgtttgagaatatagagtgcgagtggcctcttttttggacctattttatcctggatggcgtgttctctggaaatgcggaacaggttcaggaatacaaagaggctctcgaggccgtgctgattaaagggaaaaacggggtgcccctgttgcctgagttatacagcgtaccaccagatagggttgatgaagaatatcagaatcctcataccgtggaccgcgtcccgatgggtaaacttccccacatgtggggccaatccctgtatatcctgggcagtctgatggcggagggcttcctggctccgggcgaaattgatccgctaaaccggagattctcgacggtaccaaagccggacgtggtagtgcaagtcagcatcttagctgagaccgaagagattaagactatcctaaaagataagggtatttatgtcgagaccatagccgaggtctatcccatacgggttcagccagctaggatcctcagtcatatatacagtagtctgggctgtaacaataggatgaagctttccggtcggccatatcgccatatgggcgtattaggaactagtaaactctacgacattcgcaagacgatttttacttttacaccacaattcatcgatcaacaacagttttatttggccttagataataagatgatagtggagatgctgcgcaccgatctgtcatatctgtgctccaggtggagaatgaccgggcagcctacgatcacatttccaatcagccattcaatgctggatgaagatggaacaagcctcaattcttctatccttgcagccctcaggaaaatgcaagacgggtacttcggcggtgccagagtgcagaccggcaagctgtccgagttcttaacgacctcatgttgcactcacctaagcttcatggatcccgggcccgaaggaaagctttatagcgaggattacgacgataactacgattacctcgagagtggcaattggatgaatgattatgactcgacgagtcacgatgtacacatgtatctccccacaaagctgtttcaggcttcacgaccaagctttaacttactcgactctccacacccacggcaggaaaatcaggttccctctgtccgcgtcgaaatccacctaccgcgggatcagagcggggaagttgactttaaagcattggtcttgcagttgaaggagacatcctctttgcaggaacaagcggacatcctttatatgctttataccatgaaagggccagattggaacacagagctgtataatgaaagatctgcaactgtacgggaacttctgaccgagctctatgggaaggttggagaaatccggcactggggattgatccggtatattagcggaattctgcgtaagaaggtagaggcattggatgaagcctgcaccgacttgcttagtcaccagaagcatctgactgttggattgccgcccgagccacgcgaaaaaaccatctccgctcctctgccttatgaggccctgacacagctgattgatgaggcctccgagggtgacatgtccatatctatactcacacaggaaatcatggtgtatctagcgatgtacatgaggactcaacccgggttattcgcagagatgtttcgtctccgcatcgggttgatcatccaggtaatggccaccgaactcgcgcactcactccggtgcagcgctgaagaggctacagaaggattgatgaatctatctccttcagcaatgaaaaatctactccaccacatcctaagcggtaaggaattcggagtcgagaggtctgtgagacccactgactccaacgttagccctgccatttctatccacgagattggcgcagtgggggctactaagacagagcgaacgggcataatgcaactgaagagtgagatcaaacaggttgaatttcgaagactgtctattagtgcagagagccagtcaaacgggggccatcctttgggaattgatctgatgtcacctagctttatgagccccggtacaagtatgacacctagtagcgggagcttcccttctgcctacgaccagcagtcttcaaaggacagccggcagggccagtggcagaggagaaggcggctggacggagccttgaatagggtgcccgtgggcttctaccagaaagtttggaaggtgctgcaaaagtgccacgggctgagcgtcgaaggttttgtccttcctagttctacgacacgggaaatgaccccaggtgagatcaaattcagcgttcatgtggagagtgtgcttaatagggtccctcagcccgaatatcgccagcttctcgtggaagccattctcgtgctcacaatgctggcagacattgaaatccactccatcggaagcatcatcgccgtcgagaagatcgttcatatagcgaatgatctctttctacaggaacagaaaactctgggcgcggatgacaccatgctggccaaagaccctgcctcagggatctgtacgctgctgtatgactcagccccttctggccgttttgggaccatgacatacctgtctaaggctgccgctacatacgtacaggagtttctgcctcatagcatttgcgcaatgcagtag

SEQ ID NO: 296272 - DNA, 3546 bp, Artificial Sequence
  derived and/or modified sequence
atgaggagccgcagcaacagcggcgtgcggctggatggctacgcccggctggtgcagcagaccatcctgtgccaccagaaccctgtgacaggcctgctgcctgccagctatgaccagaaggatgcctgggtgcgggacaacgtgtacagcatcctggccgtgtggggcctgggcctggcctacaggaagaatgctgacagagatgaggacaaggccaaggcctatgagctggagcagagcgtggtgaagctgatgaggggcctgctgcactgcatgatccggcaggtggacaaggtggagagcttcaagtacagccagagcaccaaggacagcctgcacgccaagtacaacaccaagacctgtgccaccgtggtgggagatgaccagtggggccacctgcagctggatgccacctctgtgtacctgctcttcctggcccagatgacagccagcggcctgcacatcatccacagcctggatgaggtgaacttcatccagaacctggtgttctacatcgaggccgcctacaagacagctgactttggcatctgggagcggggggacaagaccaaccagggcatcagcgagctgaatgccagctctgtgggcatggccaaggccgccctggaggccctggatgagctggacctgtttggagtgaagggcggcccccagagcgtcatccacgtgctggctgatgaggtgcagcactgccagagcatcctgaacagcctgctgccccgggccagcaccagcaaggaggtggatgccagcctgctgtctgtggtgtccttccctgcctttgctgtggaggacagccagctggtggagctgaccaagcaggagatcatcaccaagctgcagggccgctatggctgctgccgcttcctgagagatggctacaagacccccaaggaggaccccaacagactctactatgagcctgctgagctgaagctgtttgagaacattgaatgtgagtggcccctcttctggacctacttcatcctggatggagtcttctctggaaatgctgagcaggtgcaggagtacaaggaggccctggaggccgtgctgatcaagggcaagaatggagtgcccctgctgcctgagctgtacagcgtgcccccagacagagtggatgaggagtaccagaacccccacacagtggacagagtgcccatgggcaagctgccccacatgtggggccagagcctgtacatcctgggcagcctgatggccgagggcttcctggcccctggagaaattgaccccctgaacagacgcttcagcacagtgcccaagccagatgtggtggtgcaggtgtccatcctggccgagacagaggagatcaagaccatcctgaaggacaagggcatctacgtggagaccatcgccgaggtgtaccccatccgggtgcagcctgcccgcatcctgagccacatctacagcagcctgggctgcaacaacaggatgaagctgagcggccggccctaccgccacatgggcgtgctgggcaccagcaagctgtatgacatcaggaagaccatcttcaccttcaccccccagttcatcgaccagcagcagttctacctggccctggacaacaagatgattgtggagatgctgaggacagacctgagctacctgtgcagccgctggaggatgacaggccagcccaccatcaccttccccatcagccacagcatgctggatgaagatggcaccagcctgaacagcagcatcctggccgccctgaggaagatgcaggacggctactttggaggagcccgggtgcagacaggcaagctgtctgagttcctgaccaccagctgctgcacccacctgtccttcatggaccccggccctgagggcaagctgtacagcgaggactatgatgacaactatgactacctggagagcggcaactggatgaatgactatgacagcaccagccatgatgtgcacatgtacctgcccaccaagctgttccaggccagccggcccagcttcaacctgctggacagcccccacccccggcaggagaaccaggtgcccagcgtgcgggtggagatccacctgccccgggaccagagcggggaggtggacttcaaggccctggtgctgcagctgaaggagaccagcagcctgcaggagcaggccgacatcctgtacatgctgtacaccatgaagggccctgactggaacacagagctgtacaatgaaagaagtgccaccgtgcgggagctgctgacagagctgtatggcaaggtgggggagatccgccactggggcctcatccgctacatcagcggcatcctgaggaagaaggtggaggccctggatgaggcctgcacagacctgctgagccaccagaagcacctgactgtgggcctgcccccagagccccgggagaagaccatcagcgcccccctgccctatgaggccctgacccagctgattgatgaggccagcgagggggacatgagcatcagcatcctgacccaggagatcatggtgtacctggccatgtacatgaggacccagcccggcctgtttgctgagatgttccggctgagaattggcctcatcatccaggtgatggccacagagctggcccacagcctgcgctgcagcgctgaggaggccacagagggcctgatgaacctgagccccagcgccatgaagaacctgctgcaccacatcctgagcggcaaggagtttggagtggagaggtctgtgcggcccacagacagcaatgtgtccccagccatcagcatccacgagatcggggctgtgggcgccaccaagacagagaggacaggcatcatgcagctgaagtctgagatcaagcaggtggagttccggcggctgagcatctctgctgagagccagagcaatggaggccaccccctgggcatcgacctgatgagccccagcttcatgagccctggcacctccatgacccccagcagcggcagcttccccagcgcctatgaccagcagagcagcaaggacagccggcagggccagtggcagaggagaagaaggctggatggagccctgaacagagtgcctgtgggcttctaccagaaggtgtggaaggtgctgcagaagtgccacggcctgtctgtggagggctttgtgctgcccagcagcaccacccgggagatgaccccaggagagatcaagttctctgtgcacgtggagagcgtgctgaacagagtgccccagcctgagtaccggcagctgctggtggaggccatcctggtgctgaccatgctggccgacatcgagatccacagcatcggcagcatcatcgctgtggagaagatcgtgcacatcgccaatgacctcttcctgcaggagcagaagaccctgggcgcagatgacaccatgctggccaaggaccctgccagcggcatctgcaccctgctgtatgattctgcccccagcggccgcttcggcaccatgacctacctgagcaaggctgctgccacctacgtgcaggagttcctgccccacagcatctgtgccatgcagtag

SEQ ID NO: 296273 - DNA, 3546 bp, Artificial Sequence
  derived and/or modified sequence
atgcggagccggagcaacagcggcgtgcggctggacggctacgccaggctagtacaacagacaatactctgccaccagaaccctgtcacaggattactacctgccagctatgaccagaaggatgcctgggtccgagacaacgtgtacagcattttagcagtctggggtctgggtttagcttatcggaagaatgccgatagggatgaggacaaggctaaagcttatgaactcgagcaatctgtggtgaagttgatgcggggtttgctccactgtatgatcaggcaggtggacaaggtggagagctttaagtatagtcagagcactaaagattctctgcatgcaaaatataacaccaagacgtgcgctactgtagtcggagacgatcaatggggacacctccagctggacgccacgtctgtgtatctccttttcctcgcacaaatgacagcatctggcctccacataattcactctctggacgaagtgaattttatacaaaatctcgtcttttacatcgaggctgcctacaagacggcagactttggcatatgggagagaggcgacaagaccaaccaaggaataagtgagctcaacgcttcttccgtgggaatggctaaagctgcactcgaggccttggacgaactcgacctttttggcgtcaaaggggggcctcaaagcgttatccacgtcttagcggacgaggtccagcactgccagtcaatattgaattccttgttaccgcgggcctcaacctctaaagaagtagacgcatcacttctgtcagtcgtcagcttccccgccttcgctgtcgaggacagtcagctggtggaactgactaaacaggagataattacaaagctgcagggccgctacggctgttgtcgctttcttagagacggttataaaacacctaaagaagacccgaatcgcctctattacgagcccgcagagctgaagttgttcgagaacatcgaatgcgaatggccattgttctggacatatttcattttggatggagtgttttcagggaatgcagagcaggttcaggagtataaggaggccctggaagcagtgctgattaaggggaagaacggagtgcctctgctccctgaactatattccgttcctcctgaccgggtggacgaggagtaccagaatccccacactgtagacagggtgcctatgggtaagttgccgcacatgtgggggcagtccctgtacatactcgggtctctgatggccgagggctttttagccccaggggagatagatcccctgaaccgccgattttccaccgtaccgaaacccgatgtcgtggtgcaggtctctatcctcgccgagacggaggagatcaaaaccattctgaaagacaaaggaatttatgttgaaactatcgcggaagtataccctataagagtgcagcccgctcgaatactgagccacatatactcctctttaggctgcaacaaccggatgaagcttagcggcagaccgtacagacacatgggagtgcttggaactagtaagctgtacgacatcagaaagacgatcttcactttcacacctcaatttatcgatcagcagcagttctacttggcactggacaacaaaatgatcgtcgagatgttacggactgatctgagctatctgtgcagtcgctggaggatgactggacaacccaccattacgttccctatcagtcattccatgcttgatgaagacggtacctccctgaacagttcaattttggctgccttgcgtaaaatgcaggatggctactttggcggcgcccgtgttcagacaggcaagctgagtgagtttttgaccacatcctgctgcacgcatctttcattcatggaccctggaccagaaggtaagctatactctgaggactacgatgataattacgattacttagagtctgggaattggatgaatgattacgacagcactagccacgatgtccatatgtacctccccaccaagctcttccaagctagtcgaccctcctttaaccttctggatagcccacaccctcggcaagaaaaccaagtcccctctgtgagggtggagatccatctgcctcgagaccagtcaggcgaggttgacttcaaggccctggtgttacagctcaaggaaacatcgagtctacaggaacaggccgatattctctatatgctgtatacaatgaagggtccggattggaatacagagttatacaatgagcgctccgccacagttagggagctcttaacagagctctacgggaaggtgggcgagattaggcactggggtttgatccggtacatttcgggcattctcaggaaaaaggtggaagcactcgacgaggcttgcactgaccttctgtcccaccagaagcacttgacagttggactgcctccggagcctcgcgagaaaacgatctcagcgcccctcccgtacgaggctctaacacagctaattgatgaggcctcagaaggcgatatgagtatctccatccttactcaggaaattatggtctacttggctatgtatatgcgcactcagcctggactgttcgccgaaatgtttaggttgcgaatcggccttatcattcaggtcatggccacggaactcgctcattctctgcggtgcagcgctgaggaggccaccgagggcttaatgaaccttagtccatctgctatgaaaaacctgttacatcatatcctgagcgggaaggagttcggggttgagcgctccgtgcgacctactgactccaacgtgagtccagcaatttccattcacgagataggagccgtcggcgctactaaaacagagagaaccgggatcatgcagctgaagtcagaaataaagcaagtcgagttccggaggctgtcaatcagcgccgaaagccagtcgaacggaggtcacccactgggcatcgacctaatgtcaccctcattcatgagcccgggaacttccatgaccccaagttcaggaagcttcccatccgcatacgatcaacagagttcgaaagactcacggcagggacagtggcaaaggcggagacgtctggatggagccctgaaccgggtgcctgtcggcttctaccagaaggtgtggaaggttctccagaagtgccatggccttagcgtggaggggtttgtcctcccttcgtctactactagggagatgacgcctggtgaaataaaattttctgttcacgttgagagcgttctgaatcgagtgccccagccggagtaccgccaactgctggtggaagcgattttggtattaacaatgttagccgacattgagattcacagcataggcagtatcatcgcagtcgaaaaaattgtgcatatcgcaaacgacctgttcctgcaggagcagaaaacactgggcgctgatgacaccatgctcgcaaaggacccggcttctggaatctgcactctcctgtacgactcagcaccctcagggaggttcggtaccatgacgtatttgtccaaggccgcagccacctatgtccaggaatttctgccgcattctatctgcgctatgcaatag

SEQ ID NO: 296274 - DNA, 6173 bp, Artificial Sequence
  derived and/or modified sequence
tcgcgcccgccccgcctcccgctcgcgtctcccgcaaggtggaggcggcgcagcggtcgttgacctgttggcggcggccgggcgggaggctgtgggccgcggcggtctcccggggttgaggggaggatgcaggagtcacacgcggaggccggactggactaagggggcaggagcggcgcctggggcgctgcggcggggctctagaccgcgggaagccagtgctagcgctggcgcgtggtgggcccctgaggccgccggagtccggagaggtacgcggaatccgcggcgccaggcctgagcggtgggagggctctgcggggcctggtgttcaggcgtcccaccacgagggtggagcagcgttggatacttgttccttagggaccgaaggctccggtggcacccgggctatttctcagaggacaattagtaacgtgtcgccatgaggagccggagtaactccggggtccggctggacggctacgctcgactggtgcaacagaccatcctgtgccatcagaatccagtgactggcttgcttccagccagctatgatcagaaagatgcttgggtccgagataatgtgtacagcatcttggctgtgtggggtttgggcctggcctatcggaagaatgcagaccgggatgaggataaggcaaaggcctatgaattggagcagagtgtagtgaagctgatgagaggactactgcactgcatgatcagacaggtggataaagtagaatccttcaaatatagtcagagtactaaggatagcctccatgcaaagtacaacaccaaaacctgtgccactgtagtgggtgatgatcaatggggacacctgcagttggatgctacctctgtgtacctgctcttcttagcccaaatgactgcctcaggactccatatcatccacagcctagatgaagtcaatttcatacagaaccttgtgttttacattgaagctgcatataaaactgctgacttcgggatatgggaacgtggagacaagaccaaccaagggatctcagagttgaatgccagttcagttggaatggcaaaggcagccctggaagcattagatgaactggatctgtttggtgtgaaaggtgggcctcaatcagttatccatgtcctggctgatgaagtacagcactgccagtctatcctaaattcactactgccccgtgcttcaacatcaaaagaggttgatgctagtctactctcagtggtttccttccctgcctttgcagtagaggatagccagttggtggagctcacaaaacaggaaatcatcaccaagcttcagggtcgttatggttgctgtcgctttctacgagatggatataaaactcctaaagaggatcccaatcgtctgtactatgaaccagctgagctgaagctatttgaaaacattgagtgtgaatggccattgttctggacatactttattcttgatggggtcttcagtggcaatgcagaacaggttcaagaatataaagaggctcttgaagcagtcctcatcaagggcaaaaatggagtcccacttctgccagagctgtacagtgttcctcctgacagggtcgatgaagaatatcagaatcctcacactgtggaccgagtccccatggggaaattgcctcacatgtggggtcagtctctatacattttaggaagcttgatggcagagggatttttagcccctggagaaattgatcccctgaatcgcaggttttctactgtaccgaagcccgatgttgtggttcaagtctccattctagctgaaacagaagaaatcaagaccattttgaaggacaagggaatttacgtggagaccattgctgaggtataccccatcagagtacaaccagctcgtattctcagccacatttattccagcctaggatgcaacaatagaatgaaactcagtggacgaccctacagacacatgggagtgcttggaacttcaaaactctatgacattcggaaaactatctttactttcactccacagtttatagaccagcaacagttctacctggctctggacaacaagatgatagtggaaatgcttagaacagacctctcctacctctgtagccgctggcggatgacaggccagcccaccatcaccttccccatctcacacagcatgcttgatgaagatggaacaagcttgaattcaagtatcctggcagcactccgaaaaatgcaagatgggtattttggtggggcaagggttcaaacaggtaaattgtcagagtttttgacaacatcttgttgcacacacttgagcttcatggaccctggacctgagggtaagctgtacagtgaagattatgatgacaactatgattacctggaatctggcaactggatgaatgattatgattcaaccagtcatgatgttcacatgtatcttcctacgaagttatttcaggcttcccggccttcattcaacttacttgattcacctcatccccgacaggagaaccaggttccctctgttcgtgtagaaatacatcttcctagagaccagtctggggaggtggactttaaagcactggttttacagttgaaggagacctcaagcttacaggaacaagctgatatcctctatatgctgtatactatgaaaggacctgactggaacactgaattgtataatgaacggagtgctacagtgagagagcttcttaccgagctgtatggcaaagtgggagaaattcgtcactggggcctgatccgatacatttctgggatcttaaggaagaaagtggaagcacttgatgaggcctgcacagaccttctctcccaccagaaacatttgacagtaggacttcctccagaacctcgagaaaagactatctctgcacctctgccctatgaggcgctcactcagctgatagatgaagccagtgaaggggatatgagcatttcaatccttacacaggaaataatggtatatctagccatgtatatgcgaacccagcctggcctctttgctgaaatgtttcgacttcgaattggtctgatcatacaagttatggcaacagaactggcccactcccttcgatgctcagctgaggaagccacagagggcctgatgaatctcagtccttcggccatgaagaatctcctgcatcacattctcagcggcaaggagtttggagtggaacgaagcgttcgtcccactgattcaaatgtcagtcctgctatttctatccacgagattggtgctgttggagcaaccaaaacagaacgaactgggatcatgcagttaaaaagtgagataaagcaggtggaatttcgtagactgtcaatctcagctgagagtcagtccaatggtggtcatcccctgggtatagatttgatgtcaccgtcttttatgtcacctggaacctctatgactccaagtagtgggtcctttcctagtgcatatgatcagcagtcatctaaagatagtcgtcaaggtcaatggcaacgccgaagaaggctggatggggcactgaatagagttccagttggattttatcagaaagtatggaaagttttgcagaagtgtcacggactttctgttgaagggtttgtccttccttcctctaccactagagagatgactccaggtgagattaaattctctgttcatgtggagtctgtcctgaatcgtgtacctcagccagagtaccgtcagctgctggttgaagccatccttgtcctcaccatgctggcagatattgaaattcatagcatcggaagcatcattgctgtggaaaaaatagtgcatattgccaatgacttgttccttcaagaacagaaaacccttggcgcagatgataccatgttggcaaaggatcccgcatctggcatctgtactcttctgtatgacagtgcacccagtggcaggtttggcaccatgacctacctctccaaggcagccgccacctacgtgcaggagttcctgccccacagcatctgtgccatgcaatgagggctttggttcctggcttctgggagccttttgacagctggtccctgcctcggttgattgtgcatggaactaaaatgttattgcctaatcactccaaccctgcccctttctgtcccatccttcccaagaagagagaactttttcgataaactaactactgtagaagaagtgaacacttacctggaggctcaccttgcagaaccagtgacaatcttatgagtataatgaacactcagccaggcctgtcatgattggctttatttctttcatcattcataaaagtttgcatgtgtttttattctctagatctgttaccaatatagttttctaactcctgtttggggagcaagtgttaataataacttattcctaaagcttggtttttcttttttgtgattttattgtgtatatgagtggtgggtactttgggacattatttcaaatgagtaaactctaaattgttaaatatttatgctgctataaattagaattacctattctacgtgccttttcttaggaaaagagagtactggatcatggttttcttccttacttacaggttgcttcacactgagtgataatttaaaattgtttctatgtagaatcattgtctctactgttgccctctctgtgtctgcacacataatgcctctctcactttggtgaaatatcaaaaaaatgcaagtacagcatgcatatttaagaatttctgaactaacacttgaaatcacattttataaagattgttggtactcagagttgtatttgcagcagaaaatgcagaataacccagaaatggagcccggagcccaattccagagaggaagggaaagaagagacgatgcctggacaatgtcttatacatagggaacagagagggaatcagaggtggcttagttccctgaagacagccttatgcgcttaatccctgcctttgaaaaatgggccaatacacaacacagacaataatttgaagcgtctgtattcagcaaagataaatacagcagtccagtctataggtgctctacttagcattcttttcatgtgctcctggtctctgtctcactcacctactttctactacatccaactcaactccctgacaccctatccccccatctattcttaaactctttcatatatattttcacttcctaattctagtgtacatatccctgtatatcatggtatctgtgggcatatgtctgtttcttataaagacacatatttgtgtgtgtatgtgtgtgtgtgtgtgtgtgtgtgtataagcatacatgggaatttttctgaatgtaagcagttttgatgtgtctgtatatcaatctgtatctacatttgatggactgagtaagaatgttgcatgtgagagaagggatgtgactgtggactcagattgacacacacagattggtggaagaatagcttcagtcctcttccttcatcccatatgtaggtagccttgcttgacaaatgtttcttctaactctccttcttctgaattgtgcagagactctgttaacttccctttttgcacttagataacttcctacttcaaccccctcctttatcttggatttctaaagtttttccccaatattgggaatggtgagggtggggatgagagactctctgaacaattcttgcagaaccagtgacaatcttatgaatataatgaataagtaagcatatagtagggtgatagaatacagatagtagaaacaaagagaggacagcaaaccttttcagcacttctctcagagcaaatggaaacacacagtaagtagctttctgactacattattttctggtcacttttaaagaaagtttacaacctgttctgaaactatttgtcttttcactggttgtaagtgtaccccaatctcagggagtatatctgtagtgccacaggcaaaagatccactccttcccacactcatttgcctgaacttactcgaagggctgcatttctctgagtttacgaaattgtgtcattatggtccccatacagtggtatttaacttttaaagcaacttttaagaaaactcgacttgttttttgttcattttaagtgtgtggtactaaaaagacatgttagactttttttaaaaaagcacttatgttttgaaaatagaataaataataagaatttccaattaaatcatgtctggtgccaatgtgcaaaacttca

SEQ ID NO: 296275 - DNA, 3546 bp, Artificial Sequence
  derived and/or modified sequence
atgcggtcacgatcaaactcaggggtccgtctggacggctatgctaggcttgtgcagcagacaatcttatgccatcagaatcctgtgaccggcctgctgcccgcaagctacgaccaaaaggatgcctgggtccgggacaatgtgtacagcatactggctgtctggggcctcgggctggcatatagaaaaaacgccgatcgggacgaagacaaagctaaagcctacgagctggagcagtccgtggtgaagttgatgagggggctgctccactgtatgattcgtcaagtggataaggtcgagtcctttaagtactcccagagcactaaagatagcctgcacgccaagtataacactaagacatgtgcaactgtggtgggcgatgaccagtgggggcatttgcagctggatgctactagcgtttatctgctcttcctggcccagatgactgccagtggactccacatcatccatagcctcgacgaggttaatttcatccagaatcttgtgttttacatcgaggctgcatataaaacagccgacttcggtatctgggaacggggtgacaaaaccaatcagggcattagtgagctgaacgcaagcagcgtagggatggccaaagcagcactcgaggcattagatgagctggacctgtttggtgttaaaggagggccacagtcagtgatccatgtcctggccgatgaagtgcaacattgtcagagcattctgaactctcttttaccacgcgcatccacttcaaaggaagtggatgccagcctcctaagcgtcgtgagctttcccgcttttgccgtagaagactcgcagctggtcgagctgaccaaacaggaaataattaccaagctacaggggcgatatggttgctgtcggttcctgagggacggatataaaactccgaaagaggatccaaacaggctgtattatgagccagcagagctaaagttgttcgaaaacatcgagtgcgagtggcctctgttctggacctattttattctggacggcgtattcagcggtaatgcagaacaggtccaggagtataaagaagcactggaggctgtcctgattaagggcaaaaacggtgtgccactgctcccagagctctattcagtcccgcctgaccgggtggatgaggagtatcagaacccccacaccgtggatcgagtccccatgggcaagttgcctcacatgtggggccagagtctttatatcttgggatctctgatggcagaaggttttctggcacctggcgagatcgaccctctcaaccgtaggtttagtacggtcccgaagccagatgtggtcgtgcaggtgtctattctggctgagactgaagagataaagactattttaaaagacaaagggatttatgtggagaccatcgccgaggtgtaccccatccgtgtgcagcctgccaggatcctctcccacatctattcctccttaggctgtaataatcgaatgaagctgagcggccgaccctataggcatatgggggtgctgggtaccagcaagttgtacgatattaggaagacaatattcaccttcacccctcagttcatcgaccagcagcaattttatttggcactcgacaacaagatgatcgtggaaatgctgcgcactgatctgagctacctctgtagcaggtggcgcatgaccgggcagcctaccattacattccccatttcccattcgatgctggatgaagacggaaccagcctgaactcaagtatactggctgccctcagaaaaatgcaggatggctatttcggaggggcaagagttcagacaggcaagctgagcgagtttttaacgactagttgctgtacacacctctccttcatggatcccggtcccgaggggaagttatatagtgaagactacgacgacaactatgactacctggaaagcggcaactggatgaacgactatgatagcacgtcacacgacgtgcatatgtacctacctacgaagctttttcaagctagccgtccatcatttaacctgcttgactctccgcatcccagacaggagaatcaggtccccagcgtgcgtgtggagatccacttacctcgggaccaatccggcgaggtagattttaaagccttggtgctacagctgaaagaaacatcctcactacaggagcaggctgatattttatatatgctctataccatgaagggtcccgattggaacacagagctgtataacgagaggagtgccacagtaagggaactgctaacggagctgtatggtaaggttggggagattagacactggggcctgataagatacatttcaggaatcctcaggaaaaaggttgaagcgctcgacgaagcttgcacagacctccttagccatcagaagcacctgaccgtaggattgccccctgaaccacgggagaagaccatctctgcccctctgccgtatgaagcccttacacagctcatcgacgaggcctccgagggcgacatgtctataagtatcttgactcaggaaattatggtctatctcgccatgtacatgagaactcagcccggattattcgctgagatgtttcgtttgcggatcggcttgattatacaggtgatggctacagagctagcccatagcctcaggtgtagcgcagaggaagctactgaggggctgatgaacttatcaccctcagccatgaagaaccttctgcaccatatcctctccggcaaagagttcggtgtggaaaggagtgtgagacctacagatagtaacgtgtcaccggcaatttctatacacgaaattggcgcagtcggggcaactaagacagaacggacaggcatcatgcagcttaagtccgagattaaacaggtagagtttcggagactatcaatttcagcggagtctcagtcaaacggtggtcacccgcttggcattgacctgatgtcccccagtttcatgtcccctggtacatcaatgaccccttcctccggatcctttccttcagcctacgaccaacagagctcaaaggattcaagacagggccaatggcagagacgcaggcgccttgatggtgctctcaaccgggtgccggttgggttctatcaaaaagtttggaaagttctccagaaatgccacggactcagcgtggaaggattcgtacttccaagttccaccaccagggagatgacccctggagagatcaaattctctgtgcacgttgagagtgttctgaacagagtcccccagcccgagtatagacagctcctggtggaggccattctggttttaaccatgctggcagacatcgaaattcactccatcggcagcataatcgcagtcgagaagattgtccatatcgcaaacgacctgtttttgcaggaacagaagaccctcggggctgacgataccatgttggctaaggaccccgcatccggcatttgcacgctactctatgattcggcaccaagcggcagattcggaaccatgacttatctatccaaagccgcagctacctacgtgcaggaattcctgccccactccatatgtgctatgcagtag

SEQ ID NO: 296276 - DNA, 3546 bp, Artificial Sequence
  derived and/or modified sequence
atgagaagcagaagcaacagcggcgtgagactggacggctacgccagactggtgcagcagaccatcctgtgccaccagaaccccgtgaccggcctgctgcccgccagctacgaccagaaggacgcctgggtgagagacaacgtgtacagcatcctggccgtgtggggcctgggcctggcctacagaaagaacgccgacagagacgaggacaaggccaaggcctacgagctggagcagagcgtggtgaagctgatgagaggcctgctgcactgcatgatcagacaggtggacaaggtggagagcttcaagtacagccagagcaccaaggacagcctgcacgccaagtacaacaccaagacctgcgccaccgtggtgggcgacgaccagtggggccacctgcagctggacgccaccagcgtgtacctgctgttcctggcccagatgaccgccagcggcctgcacatcatccacagcctggacgaggtgaacttcatccagaacctggtgttctacatcgaggccgcctacaagaccgccgacttcggcatctgggagagaggcgacaagaccaaccagggcatcagcgagctgaacgccagcagcgtgggcatggccaaggccgccctggaggccctggacgagctggacctgttcggcgtgaagggcggcccccagagcgtgatccacgtgctggccgacgaggtgcagcactgccagagcatcctgaacagcctgctgcccagagccagcaccagcaaggaggtggacgccagcctgctgagcgtggtgagcttccccgccttcgccgtggaggacagccagctggtggagctgaccaagcaggagatcatcaccaagctgcagggcagatacggctgctgcagattcctgagagacggctacaagacccccaaggaggaccccaacagactgtactacgagcccgccgagctgaagctgttcgagaacatcgagtgcgagtggcccctgttctggacctacttcatcctggacggcgtgttcagcggcaacgccgagcaggtgcaggagtacaaggaggccctggaggccgtgctgatcaagggcaagaacggcgtgcccctgctgcccgagctgtacagcgtgccccccgacagagtggacgaggagtaccagaacccccacaccgtggacagagtgcccatgggcaagctgccccacatgtggggccagagcctgtacatcctgggcagcctgatggccgagggcttcctggcccccggcgagatcgaccccctgaacagaagattcagcaccgtgcccaagcccgacgtggtggtgcaggtgagcatcctggccgagaccgaggagatcaagaccatcctgaaggacaagggcatctacgtggagaccatcgccgaggtgtaccccatcagagtgcagcccgccagaatcctgagccacatctacagcagcctgggctgcaacaacagaatgaagctgagcggcagaccctacagacacatgggcgtgctgggcaccagcaagctgtacgacatcagaaagaccatcttcaccttcaccccccagttcatcgaccagcagcagttctacctggccctggacaacaagatgatcgtggagatgctgagaaccgacctgagctacctgtgcagcagatggagaatgaccggccagcccaccatcaccttccccatcagccacagcatgctggacgaggacggcaccagcctgaacagcagcatcctggccgccctgagaaagatgcaggacggctacttcggcggcgccagagtgcagaccggcaagctgagcgagttcctgaccaccagctgctgcacccacctgagcttcatggaccccggccccgagggcaagctgtacagcgaggactacgacgacaactacgactacctggagagcggcaactggatgaacgactacgacagcaccagccacgacgtgcacatgtacctgcccaccaagctgttccaggccagcagacccagcttcaacctgctggacagcccccaccccagacaggagaaccaggtgcccagcgtgagagtggagatccacctgcccagagaccagagcggcgaggtggacttcaaggccctggtgctgcagctgaaggagaccagcagcctgcaggagcaggccgacatcctgtacatgctgtacaccatgaagggccccgactggaacaccgagctgtacaacgagagaagcgccaccgtgagagagctgctgaccgagctgtacggcaaggtgggcgagatcagacactggggcctgatcagatacatcagcggcatcctgagaaagaaggtggaggccctggacgaggcctgcaccgacctgctgagccaccagaagcacctgaccgtgggcctgccccccgagcccagagagaagaccatcagcgcccccctgccctacgaggccctgacccagctgatcgacgaggccagcgagggcgacatgagcatcagcatcctgacccaggagatcatggtgtacctggccatgtacatgagaacccagcccggcctgttcgccgagatgttcagactgagaatcggcctgatcatccaggtgatggccaccgagctggcccacagcctgagatgcagcgccgaggaggccaccgagggcctgatgaacctgagccccagcgccatgaagaacctgctgcaccacatcctgagcggcaaggagttcggcgtggagagaagcgtgagacccaccgacagcaacgtgagccccgccatcagcatccacgagatcggcgccgtgggcgccaccaagaccgagagaaccggcatcatgcagctgaagagcgagatcaagcaggtggagttcagaagactgagcatcagcgccgagagccagagcaacggcggccaccccctgggcatcgacctgatgagccccagcttcatgagccccggcaccagcatgacccccagcagcggcagcttccccagcgcctacgaccagcagagcagcaaggacagcagacagggccagtggcagagaagaagaagactggacggcgccctgaacagagtgcccgtgggcttctaccagaaggtgtggaaggtgctgcagaagtgccacggcctgagcgtggagggcttcgtgctgcccagcagcaccaccagagagatgacccccggcgagatcaagttcagcgtgcacgtggagagcgtgctgaacagagtgccccagcccgagtacagacagctgctggtggaggccatcctggtgctgaccatgctggccgacatcgagatccacagcatcggcagcatcatcgccgtggagaagatcgtgcacatcgccaacgacctgttcctgcaggagcagaagaccctgggcgccgacgacaccatgctggccaaggaccccgccagcggcatctgcaccctgctgtacgacagcgcccccagcggcagattcggcaccatgacctacctgagcaaggccgccgccacctacgtgcaggagttcctgccccacagcatctgcgccatgcagtag

SEQ ID NO: 296277 - DNA, 3319 bp, Artificial Sequence
  derived and/or modified sequence
ggtgcgcgggcacagcagccaggctgccggagagctgatctcggggattcgggtgcggagcccttggcctggaggcgatatgggtggtccgtggcccggttcagtcgcttgcagcagcccggggaacagtgtgcccccagaacatccacacagctgtgcccgaagtcatgctgccggtctggttcactgccaacttggatatcgtcgctacttacatccaggagcccaacgaagactgtctctacctgaacgtctatgtgccgacggaggatggatccggcgctaagaaacagggcgaggacttagcggataatgacggggatgaagatgaagacatccgggacagtggtgctaaacccgtcatggtctacatccacggaggctcttacatggaagggacaggcaacatgattgatggcagcatcctcgccagttatggcaatgtcatcgtcatcaccctcaactatcgggttggagtgctaggtttcctgagtactggagatcaggctgccaagggcaactatgggctccttgaccagatccaggccctccgctgggtgagcgagaatattgccttcttcgggggagacccccgccggatcactgtctttggctcgggcattggtgcatcctgcgtcagcctcctcacgttgtcacatcactcagagggacttttccagagagccatcatccaaagtggctctgctctgtccagctgggctgtgaactaccaaccagtgaagtacaccagcctgctggcagacaaagtgggctgtaatgtgctggacaccgtggatatggtggactgtcttcggcaaaagagtgccaaggagctggtagagcaggacatccagccagcccgctaccacgtggcctttggccctgtgattgatggtgatgtcattcctgatgaccctgagatcctcatggagcagggcgagttcctcaactatgacatcatgctaggtgtcaaccagggcgagggtctcaagtttgtggaaggggtggtggaccctgaggatggtgtctctggcactgactttgactattccgtctccattttgtggacaatctgtatggctatcctgagggtaaggacaccctgcgagagaccatcaagttcatgtatacagactgggcagaccgtgacaaccctgagacccgccgtaaaacactggtggcactcttcactgaccaccagtgggtggagccctcagtggtgacagccgatctgcatgcccgctacggctcgcctacctacttctacgccttctatcatcactgccagagcctcatgaagcctgcttggtcagatgcagctcatggggatgaagtaccctatgtttttggggttcctatggtaggccccactgaccttttcccctgcaacttctccaagaatgatgttatgctcagtgctgtcgtcatgacctattggaccaactttgccaagactggggatcccaacaagccggtcccccaggacaccaagttcattcacaccaaggccaaccgctttgaggaagtggcctggtccaaatacaatccccgagaccagctctaccttcacatcgggctgaaaccaagggtccgagatcattaccgggccactaaggtggccttttggaaacatctggtgccccacctatacaacctgcatgacatgttccactatacgtccaccaccaccaaagtgccgcctccggataccacccacagctcccacatcacccgcaggcccaatggcaagacctggagcaccaagcggccagccatctcacctgcctacagcaacgagaatgcccaggggtcctggaacggggaccaggatgcagggccactcctggtggagaaccctcgtgactactccactgaattaagtgtcaccatcgccgtgggggcctccctcctgttccttaacgttctggccttcgctgccctctactaccgtaaggacaaacggcgccaggagcccctgcggcagcctagccctcagcggggagccggggccccggagttgggagctgctccagaggaggagctggcagcattacaactgggccccacccaccacgagtgtgaggccggtcccccccatgacacgctgcgcctcactgcattgcccgactacaccctgaccctgcggcgctccccggatgacatcccactcatgacccccaacaccatcactatgatccccaactccctggtagggctgcagacattgcacccctataacacctttgccgcagggttcaacagtaccgggctgccccactcacactccactacccgggtatagctccaactcagagcacagccaatctccaggctccctccctcccagatccaggaacacatgcacacacacacacacacacacgcagacacacacacacacacacatatatgtatacgcacgcacccacaccctacagcagatccacctgcacaaacatagacagatgtggacatgcacccgcatgtacaaaaacacaaatacggaagtaaacctgaacaaaccctttaaatggggacgcagatgagtcctcggtaaaccgaggacccatgaaacagcagctgaagccagctccctgaatctgaccacagacactcctggggggcctgaaagcaacagctggacacccccttggtgctcgccttcggcctctcttggaactgcaccaccgaccaactccagacttgggagctttaaagagcaggatagctcttcctccccaggacttggtcttttttctgggtcttgttttgttgatttttcttttttaattttggaacaaatgcttttccaacccatgagtgctaagagcctctggaagggagggcttcaggcccgaaggtctctctggctctaggacccccagtgctcacacaatcagaccaaggaacaagacccccaggaaggaaacagatttaagcaagaccatggggtggaaggagaaaggggctagcactggatggagctggagggtcgtaggggagagatctccaactctctctgtgtccgtgtggagggctgcagagcctgcagggtgacctgcttccccaaaggccaacagcattggcctggccagaccaggtgaccttagatttggtgaacaacgtactatggaagccacatcactattgggcccccaggtctgatctgggttttgcctctgcccttggggaaatgctatcagaaattcgccccattttctttacagtcttttgtgtctgtcatttctctttcaaaaaggcggtgttttttgttgttgttggtttttttttttttttaaagaaaagttcttaaaacact

SEQ ID NO: 296278 - protein, 126 aa, Artificial Sequence [sequence omitted]

SEQ ID NO: 296279 - protein, 122 aa, Artificial Sequence
  derived and/or modified sequence
INYNRDKISGSGSNSDMMENSKEEGTSSSEKSKSSGSSRSKRKPSIVTKYVESDDEKPLDDETVNEDASNENSENDITMQSLPKGTVIVQPEPVLNEDKDDFKGPEFRSRSKMKTENLKKRG

SEQ ID NO: 296280 - protein, 160 aa, Artificial Sequence
  derived and/or modified sequence
  misc_feature (1)..(1): Xaa can be any naturally occurring amino acid
XPDFVVCDEGHILKNEASAVSKAMNSIRSRRRIILTGTPLQNNLIEYHCMVNFIKENLLGSIKEFRNRFINPIQNGQCADSTMVDVRVMKKRAHILYEMLAGCVQRKDYTALTKFLPPKHEYVLAVRMTSIQCKLYQYYLDHLTVLHLNKMGMLKSIKYF

SEQ ID NO: 296281 - DNA, 381 bp, Artificial Sequence
  derived and/or modified sequence
atgaatcagaataccgataagatctcggggtctggatctaactccgatatgatggagaattctaaagaagaaggaacttcctctagcgagaaatccaagtcttcaggatcgagccgatcgaaacgtaagccctccattgtgactaagtatgtggagagcgatgatgaaaagcctctcgatgacgaaaccgtgaacgaggacgctagcaacgagaacagcgaaaacgacattaccatgcagtctcttcctaaggggactgtaattgtgcaaccagaacccgtactcaacgaagataaagacgactttaaggggcctgaatttcggtctcgaagcaagatgaaaacagagaatcttaagaagcggggcggtaaatacaaatag

SEQ ID NO: 296282 - DNA, 369 bp, Artificial Sequence
  derived and/or modified sequence
atcaactataatcgtgacaagatcagcgggagcggcagcaactctgatatgatggaaaacagcaaggaagagggcactagctcctccgaaaaatccaaatctagtggcagttctaggtctaaaaggaaaccatccatcgtgacaaaatatgtggaaagtgacgatgagaagcctctggatgatgagaccgtaaatgaggacgccagcaacgagaatagcgaaaacgacatcactatgcagtcccttccaaaaggcactgtgatcgtgcaacccgaacccgtgctaaatgaagacaaggacgatttcaaaggccctgagtttcgatcaagatcaaagatgaaaactgaaaatttgaagaaacgcggctag

SEQ ID NO: 296283 - DNA, 483 bp, Artificial Sequence
  derived and/or modified sequence
taaccagacttcgttgtctgcgacgagggccatattctgaagaacgaggccagtgccgtgtcaaaggcaatgaacagcattaggagccggcgcagaatcattctgacaggcactccactacaaaacaatctgatagagtatcactgtatggtgaacttcattaaggagaacctgctagggtccataaaagagttccgtaatagattcattaacccaatacagaacggccagtgcgctgatagtaccatggttgatgtacgcgtgatgaaaaagcgggcccacatattgtatgagatgctggcaggttgcgtgcaacgaaaagactacacagcgctgacaaagtttctgcccccaaagcatgaatatgtgctcgctgtgcgcatgacatccatccagtgtaaactgtatcagtattacctggaccacctcacagtactgcaccttaacaagatgggaatgctgaaaagcatcaagtacttctag

SEQ ID NO: 296284 - DNA, 381 bp, Artificial Sequence
  derived and/or modified sequence
atgaaccagaacacagacaagatcagcggcagcggcagcaacagcgacatgatggagaacagcaaggaggagggcaccagcagcagcgagaagagcaagagcagcggcagcagccgcagcaagaggaagcccagcatcgtgaccaagtatgtggagagtgatgatgagaagcccctggatgatgaaacagtgaatgaagatgccagcaatgaaaattctgaaaatgacatcaccatgcagagcctgcccaagggcaccgtcatcgtgcagcctgagcctgtgctgaatgaagacaaggatgacttcaagggccctgagttccgcagccgcagcaagatgaagacagagaacctgaagaagaggggcggcaagtacaagtag

SEQ ID NO: 296285 - DNA, 369 bp, Artificial Sequence
  derived and/or modified sequence
atcaactacaacagagacaagatcagcggcagcggcagcaacagcgacatgatggagaacagcaaggaggagggcaccagcagcagcgagaagagcaagagcagcggcagcagccgcagcaagaggaagcccagcatcgtgaccaagtatgtggagagtgatgatgagaagcccctggatgatgaaacagtgaatgaagatgccagcaatgaaaattctgaaaatgacatcaccatgcagagcctgcccaagggcaccgtcatcgtgcagcctgagcctgtgctgaatgaagacaaggatgacttcaagggccctgagttccgcagccgcagcaagatgaagacagagaacctgaagaagaggggctag

SEQ ID NO: 296286 - DNA, 483 bp, Artificial Sequence
  derived and/or modified sequence
tgaccagactttgtggtgtgtgatgagggccacatcctgaagaatgaggccagcgctgtgtccaaggccatgaacagcatccgcagcagaagacgcatcatcctgaccggcacccccctgcagaacaacctgattgagtaccactgcatggtgaacttcatcaaggagaacctgctgggcagcatcaaggagttcaggaaccgcttcatcaaccccatccagaatggccagtgtgccgacagcaccatggtggatgtgcgggtgatgaagaagagggcccacatcctgtatgagatgctggccggctgtgtgcagaggaaggactacacagccctgaccaagttcctgccccccaagcatgaatatgtgctggccgtgaggatgaccagcatccagtgcaagctgtaccagtactacctggaccacctgactgtgctgcacctgaacaagatgggcatgctgaagagcatcaagtacttctag

SEQ ID NO: 296287 - DNA, 381 bp, Artificial Sequence
  derived and/or modified sequence
atgaaccagaacaccgacaagatcagcggcagcggcagcaacagcgacatgatggaaaattctaaagaggagggtacatcctcttccgaaaagagcaagtcaagtgggtcaagcaggagcaaaaggaaaccatcgattgtgacaaagtacgtggagagcgacgatgaaaaaccactggatgatgaaacagtcaacgaggatgccagcaatgaaaattcggaaaacgacattacgatgcagtctctgcctaaggggaccgtaatcgtccaacccgagcccgtcctgaatgaggacaaagatgattttaagggccctgagttccgtagccgctccaagatgaagacagagaatcttaagaaaagaggtggaaagtataagtag

SEQ ID NO: 296288 - DNA, 369 bp, Artificial Sequence
  derived and/or modified sequence
atcaactacaaccgggacaagatcagcggcagcggcagcaacagcgacatgatggaaaactcaaaggaggaagggaccagttccagcgagaaatccaagtccagtggatcctcaaggagtaagcgcaagccgtccatcgtgacaaagtacgtggaaagcgacgacgaaaagcccttagatgatgaaacagtgaacgaagacgcaagcaacgaaaacagcgagaacgatataacaatgcagtccttaccgaagggcacagtgattgtccaacctgagcccgtcctgaatgaggataaagatgattttaagggccctgagttccgctctcggagcaagatgaagaccgaaaacttaaagaagagggggtag

SEQ ID NO: 296289 - DNA, 483 bp, Artificial Sequence
  derived and/or modified sequence
tgacccgacttcgtggtgtgcgacgagggccacatcctgaagaacgaagcttctgccgtgagtaaagctatgaacagcataagaagtagacgacggattatcctgacagggacccctctgcagaacaacctcatcgaatatcattgcatggtcaacttcatcaaagagaacctccttggaagcataaaggaatttcgcaatcgatttatcaatcctatccagaatggtcaatgcgcagattccacgatggttgacgttagggtcatgaagaagcgggcccacatcctttacgagatgctagccggctgcgtccagcgcaaggactatactgctttaacaaaatttctgccccctaaacatgaatatgtacttgcggtgcggatgacctctattcagtgcaagctctatcagtactatctggaccacttgacagtgcttcacctgaacaaaatggggatgctgaagagtatcaagtatttctag

SEQ ID NO: 296290 - DNA, 381 bp, Artificial Sequence
  derived and/or modified sequence
atgaaccagaacacagataagatctcaggcagcggatccaattctgatatgatggagaatagtaaagaggagggcaccagttcttccgaaaagtccaaatcctctggctcctccagatcgaaacgcaagccctctattgtgacaaagtacgtggagagtgacgacgagaaacccctcgacgacgaaacagttaacgaagacgctagcaatgaaaattcagaaaacgatataacaatgcagtcccttcccaaggggaccgtgatcgtgcagcctgagccagtgcttaatgaggataaagatgactttaagggcccagagttccgctccagatccaagatgaaaacggagaatctaaagaagcgtggcggaaaatacaagtag

SEQ ID NO: 296291 - DNA, 369 bp, Artificial Sequence
  derived and/or modified sequence
attaactataatagggacaaaatctccggcagcgggtccaactccgacatgatggaaaactcaaaggaggaggggacaagctcctccgaaaaaagcaaatcctccggaagctctaggtcaaagcgtaagccatctattgttactaaatatgtggagagcgacgatgagaagccgctcgacgatgaaacagtgaacgaagatgcatctaacgagaacagtgaaaatgacataacaatgcaaagcctgcccaaaggcactgtgatcgttcagcccgagcctgtgctgaatgaggacaaggatgactttaagggccctgagttccggtctcggagcaaaatgaaaacagagaatctcaaaaaaagaggctag

SEQ ID NO: 296292 - DNA, 483 bp, Artificial Sequence
  derived and/or modified sequence
tgacccgactttgtagtgtgcgatgaagggcacattttaaaaaatgaggccagtgcagttagcaaggcaatgaactccatccggtcccgcaggcgcattattctgaccggcacacccctgcaaaacaacctgatcgagtaccattgcatggtcaattttatcaaagaaaacttgctgggttccataaaagagtttcgcaaccgatttattaatcctattcagaatggacagtgcgccgacagcactatggtcgatgtgcgtgtaatgaagaaacgggctcacatcctatacgaaatgttggctggttgcgttcagcggaaggactacactgcactgacaaagttcctgccaccgaaacatgagtacgtcttggcagtacggatgacctctatacaatgtaaactttatcagtattatcttgaccatctcactgtgctccacctcaataagatggggatgctgaaatcaattaagtacttttag

SEQ ID NO: 296293 - DNA, 589 bp, Artificial Sequence
  derived and/or modified sequence
tgaaagcaagttgaatacattggtgcagaagcttcatgacttccttgcacactcatcagaagaatctgaagaaacaagttctcctccacgacttgcaatgaatcaaaacacagataaaatcagtggttctggaagtaactctgatatgatggaaaacagcaaggaagagggaactagctcttcagaaaaatccaagtcttcaggatcgtcacgatcaaagaggaaaccttcaattgtaacaaagtatgtagaatcagatgatgaaaaacctttggatgatgaaactgtaaatgaagatgcgtctaatgaaaattcagaaaatgatattactatgcagagcttgccaaaaggtacagtgattgtacagccagagccagtgctgaatgaagacaaagatgattttaaagggcctgaatttagaagcagaagtaaaatgaaaactgaaaatctcaaaaaacgcggaggtaaatacaagtgaaaatgaaacatgaatttaaattgctgtttatgaccatattggaaaatcggatgtgcttactaaaaatacctccacttttctgccttttgtttattaaaagcactacttaaa

SEQ ID NO: 296294 - DNA, 692 bp, Artificial Sequence
  derived and/or modified sequence
gccctgattttgttgtttgtgatgaaggccatattctaaaaaatgaagcatctgctgtttctaaagctatgaattctatacgatcaaggaggaggattattttaacaggaacaccacttcaaaataacctaattgagtatcattgtatggttaattttatcaaggaaaatttacttggatccattaaggagttcaggaatagatttataaatccaattcaaaatggtcagtgtgcagattctaccatggtagatgtcagagtgatgaaaaaacgtgctcacattctctatgagatgttagctggatgtgttcagaggaaagattatacagcattaacaaaattcttgcctccaaaacacgaatatgtgttagctgtgagaatgacttctattcagtgcaagctctatcagtactacttagatcacttaacagttttgcatttgaataaaatgggtatgcttaaaagcataaaatatttctaattaaaacactgatgctgtcaaaattaaaatcaagaagcaaattgatgaaaaagatatacagcacatatgaataatgcccttaatttgtaaagagcttttatttcagaaaaattatgaatgtgaataaatccataaaagaagatatacaaaattccagagtatttttttaaaaagtatttacccacattaataataaaaggtgtataagtt

SEQ ID NO: 296295 - DNA, 381 bp, Artificial Sequence
  derived and/or modified sequence
atgaaccagaacaccgacaagatcagcggcagcggcagcaacagcgacatgatggagaacagcaaggaggagggcaccagcagcagcgagaagagcaagagcagcggcagcagcagaagcaagagaaagcccagcatcgtgaccaagtacgtggagagcgacgacgagaagcccctggacgacgagaccgtgaacgaggacgccagcaacgagaacagcgagaacgacatcaccatgcagagcctgcccaagggcaccgtgatcgtgcagcccgagcccgtgctgaacgaggacaaggacgacttcaagggccccgagttcagaagcagaagcaagatgaagaccgagaacctgaagaagagaggcggcaagtacaagtag

SEQ ID NO: 296296 - DNA, 369 bp, Artificial Sequence
  derived and/or modified sequence
atcaactacaacagagacaagatcagcggcagcggcagcaacagcgacatgatggagaacagcaaggaggagggcaccagcagcagcgagaagagcaagagcagcggcagcagcagaagcaagagaaagcccagcatcgtgaccaagtacgtggagagcgacgacgagaagcccctggacgacgagaccgtgaacgaggacgccagcaacgagaacagcgagaacgacatcaccatgcagagcctgcccaagggcaccgtgatcgtgcagcccgagcccgtgctgaacgaggacaaggacgacttcaagggccccgagttcagaagcagaagcaagatgaagaccgagaacctgaagaagagaggctag

SEQ ID NO: 296297 - DNA, 483 bp, Artificial Sequence
  derived and/or modified sequence
tgacccgacttcgtggtgtgcgacgagggccacatcctgaagaacgaggccagcgccgtgagcaaggccatgaacagcatcagaagcagaagaagaatcatcctgaccggcacccccctgcagaacaacctgatcgagtaccactgcatggtgaacttcatcaaggagaacctgctgggcagcatcaaggagttcagaaacagattcatcaaccccatccagaacggccagtgcgccgacagcaccatggtggacgtgagagtgatgaagaagagagcccacatcctgtacgagatgctggccggctgcgtgcagagaaaggactacaccgccctgaccaagttcctgccccccaagcacgagtacgtgctggccgtgagaatgaccagcatccagtgcaagctgtaccagtactacctggaccacctgaccgtgctgcacctgaacaagatgggcatgctgaagagcatcaagtacttctag

SEQ ID NO: 296298 - protein, 543 aa, Artificial Sequence
  derived and/or modified sequence
MTEEQEEELEKTVIHNDNEELIKVEGTKIVLGKQLIESADEVRRKSLVLKFPKQQLPPKKKRRVGTTVHCDYLNRPHKSIHRRRTDPMVTLSSILESIINDMRDLPNTYPFHTPVNAKVVKDYYKIITRPMDLQTLRENVRKRLYPSREEFREHLELIVKNSATYNGPKHSLTQISQSMLDLCDEKLKEKEDKLARLEKAINPLLDDDDQVAFSFILDNIVTQKMMAVPDSWPFHHPVNKKFVPDYYKVIVNPMDLETIRKNISKHKYQSRESFLDDVNLILANSVKYNGPESQYTKTAQEIVNVCYQTLTEYDEHLTQLEKDICTAKEAALEEAELESLDPMTPGPYTPQAKPPDLYDTNTSLSMSRDASVFQDESNMSVLDIPSATPEKQVTQMRQGRGRLGEEDSDVDIEGYDDEEEDGKPKTPAPEGEDGDGDLADEEEGTVQQPQASVLYEDLLMSEGEDDEEDAGSDEEGDNPFSAIQLSESGSDSDVGSGGIRPKQPRMLQENTRMDMENEESMMSYEGDGGEASHGLEDSNISHQ

SEQ ID NO: 296299 - DNA, 1632 bp, Artificial Sequence
  derived and/or modified sequence
atgaccgaggagcaggaggaggagctggagaagaccgtgatccacaacgacaacgaggagctgatcaaggtggagggcaccaagatcgtgctgggcaagcagctgatcgagagcgccgacgaggtgagaagaaagagcctggtgctgaagttccccaagcagcagctgccccccaagaagaagagaagagtgggcaccaccgtgcactgcgactacctgaacagaccccacaagagcatccacagaagaagaaccgaccccatggtgaccctgagcagcatcctggagagcatcatcaacgacatgagagacctgcccaacacctaccccttccacacccccgtgaacgccaaggtggtgaaggactactacaagatcatcaccagacccatggacctgcagaccctgagagagaacgtgagaaagagactgtaccccagcagagaggagttcagagagcacctggagctgatcgtgaagaacagcgccacctacaacggccccaagcacagcctgacccagatcagccagagcatgctggacctgtgcgacgagaagctgaaggagaaggaggacaagctggccagactggagaaggccatcaaccccctgctggacgacgacgaccaggtggccttcagcttcatcctggacaacatcgtgacccagaagatgatggccgtgcccgacagctggcccttccaccaccccgtgaacaagaagttcgtgcccgactactacaaggtgatcgtgaaccccatggacctggagaccatcagaaagaacatcagcaagcacaagtaccagagcagagagagcttcctggacgacgtgaacctgatcctggccaacagcgtgaagtacaacggccccgagagccagtacaccaagaccgcccaggagatcgtgaacgtgtgctaccagaccctgaccgagtacgacgagcacctgacccagctggagaaggacatctgcaccgccaaggaggccgccctggaggaggccgagctggagagcctggaccccatgacccccggcccctacaccccccaggccaagccccccgacctgtacgacaccaacaccagcctgagcatgagcagagacgccagcgtgttccaggacgagagcaacatgagcgtgctggacatccccagcgccacccccgagaagcaggtgacccagatgagacagggcagaggcagactgggcgaggaggacagcgacgtggacatcgagggctacgacgacgaggaggaggacggcaagcccaagacccccgcccccgagggcgaggacggcgacggcgacctggccgacgaggaggagggcaccgtgcagcagccccaggccagcgtgctgtacgaggacctgctgatgagcgagggcgaggacgacgaggaggacgccggcagcgacgaggagggcgacaaccccttcagcgccatccagctgagcgagagcggcagcgacagcgacgtgggcagcggcggcatcagacccaagcagcccagaatgctgcaggagaacaccagaatggacatggagaacgaggagagcatgatgagctacgagggcgacggcggcgaggccagccacggcctggaggacagcaacatcagccaccagtag

SEQ ID NO: 296300 - DNA, 897 bp, Artificial Sequence
  derived and/or modified sequence
atgaccgaggagcaggaggaggagctggagaagaccgtgatccacaacgacaacgaggagctgatcaaggtggagggcaccaagatcgtgctgggcaagcagctgatcgagagcgccgacgaggtgagaagaaagagcctggtgctgaagttccccaagcagcagctgccccccaagaagaagagaagagtgggcaccaccgtgcactgcgactacctgaacagaccccacaagagcatccacagaagaagaaccgaccccatggtgaccctgagcagcatcctggagagcatcatcaacgacatgagagacctgcccaacacctaccccttccacacccccgtgaacgccaaggtggtgaaggactactacaagatcatcaccagacccatggacctgcagaccctgagagagaacgtgagaaagagactgtaccccagcagagaggagttcagagagcacctggagctgatcgtgaagaacagcgccacctacaacggccccaagcacagcctgacccagatcagccagagcatgctggacctgtgcgacgagaagctgaaggagaaggaggacaagctggccagactggagaaggccatcaaccccctgctggacgacgacgaccaggtggccttcagcttcatcctggacaacatcgtgacccagaagatgatggccgtgcccgacagctggcccttccaccaccccgtgaacaagaagttcgtgcccgactactacaaggtgatcgtgaaccccatggacctggagaccatcagaaagaacatcagcaagcacaagtaccagagcagagagagcttcctggacgacgtgaacctgatcctggccaacagcgtgaagtacaacggctacatgtgcaccacctgcagattctag

SEQ ID NO: 296301 - DNA, 1632 bp, Artificial Sequence
  derived and/or modified sequence
atgacagaagagcaggaggaggagcttgagaagaccgtgattcataacgacaacgaagagttgatcaaggtggaaggcacgaaaatagtgctgggcaagcagctgatcgaatccgctgatgaggtgcgacggaagagtcttgtcctgaagtttccgaagcagcagcttccacctaaaaaaaagagacgtgtaggaacaaccgtccattgcgactatctgaacaggccccataagagcattcacagaaggagaacagaccctatggttaccttgtcctcaatcctggaaagcataatcaacgatatgagggatttgcccaatacataccccttccatacccccgtgaatgctaaggtggtgaaggactattacaaaatcataacacggcccatggacttgcagactttgcgtgagaatgtgcggaagcggctttatccaagccgagaggagttcagggagcacctcgagctgatagtgaaaaactctgccacatacaacggacctaagcattccctgacccagatctcccaatcaatgctggacctctgcgacgaaaaactgaaagagaaggaggacaagctagcgcgccttgaaaaggcaataaaccccctcctcgatgatgatgaccaggtcgcttttagcttcatacttgataatatcgtgactcagaagatgatggcagtgcctgacagttggccttttcatcacccggtcaacaagaaattcgtcccggactactacaaagtgatcgtgaatccaatggatctggagaccattagaaagaacatttcaaaacacaaataccagtctcgcgaaagctttctcgacgacgtgaacttgatcttggctaactcagttaagtacaatggcccagaaagccaatacaccaaaacagctcaggagatagttaacgtttgttatcagacacttaccgagtatgacgagcacctcactcagctggaaaaagacatctgtaccgctaaggaagccgctctggaagaggctgagctcgaatcgctagatcccatgacccccggaccttataccccacaggctaagccacctgacttgtacgatacaaatacctccttatcgatgagtcgcgacgcctcagtgttccaggacgaatctaatatgtcagtcctcgacattccctccgccaccccggagaagcaggtaacacaaatgagacaaggccggggccgactaggagaggaggactccgatgttgacatcgagggctacgacgacgaggaagaggacgggaagcctaagaccccggcgccagaaggcgaggacggagacggggacttggccgatgaggaagagggcaccgtccaacagccgcaagccagtgtgttatatgaagacctgctcatgagtgaaggcgaagatgatgaggaggacgccggctcagatgaagagggggacaacccattttcagcgatccagttgtccgaatctgggagtgacagcgatgttgggagtgggggcatcagaccaaaacagccccgcatgctgcaagaaaacacccggatggacatggaaaatgaagagtccatgatgagctacgaaggtgatggaggagaagcatcccacggactggaagatagtaacattagccaccagtag

SEQ ID NO: 296302 - DNA, 897 bp, Artificial Sequence
  derived and/or modified sequence
atgacagaggagcaggaggaggagttggagaagacagtgatccacaatgacaacgaagagcttataaaagttgaaggtaccaagattgtactgggaaaacaactcattgaatccgccgacgaagtgcgtcgcaaatccctggtgctgaaatttccgaagcagcaactcccaccgaagaagaaacgtagagtgggaacaacggtacactgcgactacctgaaccggccccacaagtccatacatagacggaggacggaccctatggtcactctctccagcatcctggaaagcataatcaatgacatgcgagatctgcccaatacttatccctttcacacaccagtaaatgcgaaagtggtgaaggattactacaagatcatcaccagacctatggacctgcagacactgcgagagaacgtccggaagaggctttatccttcaagggaggagttccgtgaacacctcgagctgattgtgaagaactccgccacctacaatggtcctaaacacagcctgactcagattagtcagtcaatgctcgacctgtgcgatgagaagttgaaggaaaaagaggataagttagcccggttagagaaggccattaatccactgttggacgatgatgaccaggtggccttctcttttatccttgacaacatcgtcacccaaaaaatgatggccgtccccgactcctggccgtttcaccatcccgtcaacaagaagttcgtccccgactattataaggtcatagtcaatcctatggacctcgaaacaattaggaagaatatttctaaacataagtatcagagccgagagagcttcctcgacgacgtgaatctgatcctggctaactctgtcaaatacaacggctacatgtgtacgacatgccgattctag

SEQ ID NO: 296303 - DNA, 1632 bp, Artificial Sequence
  derived and/or modified sequence
atgacagaggagcaggaggaggagctggagaagacagtcatccacaatgacaatgaggagctgatcaaggtggagggcaccaagatcgtgctgggcaagcagctgattgagagcgcagatgaggtgcggaggaagagcctggtgctgaagttccccaagcagcagctgccccccaagaagaagagaagagtgggcaccaccgtgcactgtgactacctgaaccggccccacaagagcatccacagaagaagaacagaccccatggtgaccctgagcagcatcctggagagcatcatcaatgacatgagggacctgcccaacacctaccccttccacacccctgtgaatgccaaggtggtgaaggactactacaagatcatcacccggcccatggacctgcagaccctgcgggagaatgtgaggaagaggctgtaccccagccgggaggagttccgggagcacctggagctgattgtgaagaacagcgccacctacaacggccccaagcacagcctgacccagatcagccagagcatgctggacctgtgtgatgagaagctgaaggagaaggaggacaagctggcccggctggagaaggccatcaaccccctgctggatgatgatgaccaggtggccttctccttcatcctggacaacatcgtgacccagaagatgatggctgtgcctgacagctggcccttccaccaccctgtgaacaagaagtttgtgcctgactactacaaggtgattgtgaaccccatggacctggagaccatcaggaagaacatcagcaagcacaagtaccagagccgggagagcttcctggatgatgtgaacctgatcctggccaacagcgtgaagtacaatggacctgagagccagtacaccaagacagcccaggagatcgtgaatgtgtgctaccagaccctgacagaatatgatgagcacctgacccagctggagaaggacatctgcacagccaaggaggccgccctggaggaggccgagctggagagcctggaccccatgaccccaggcccctacaccccccaggccaagcccccagacctgtatgacaccaacaccagcctgtccatgagcagagatgcctctgtgttccaggatgagagcaacatgtctgtgctggacatccccagcgccaccccagagaagcaggtgacccagatgaggcagggccggggccgcctgggggaggaggacagtgatgtggacatcgagggctatgatgatgaggaggaggatggcaagcccaagaccccagcccctgagggggaggatggagatggagacctggctgatgaggaggagggcaccgtgcagcagccccaggcctctgtgctgtatgaggacctgctgatgtctgagggggaggatgatgaggaggatgctggcagtgatgaggagggggacaaccccttcagcgccatccagctgtctgagagcggcagtgacagtgatgtgggcagcggcggcatccggcccaagcagcccaggatgctgcaggagaacaccaggatggacatggagaatgaggagagcatgatgtcctatgaaggagatggaggagaggccagccacggcctggaggacagcaacatcagccaccagtag

SEQ ID NO: 296304 - DNA, 897 bp, Artificial Sequence
  derived and/or modified sequence
atgacagaggagcaggaggaggagctggagaagacagtcatccacaatgacaatgaggagctgatcaaggtggagggcaccaagatcgtgctgggcaagcagctgattgagagcgcagatgaggtgcggaggaagagcctggtgctgaagttccccaagcagcagctgccccccaagaagaagagaagagtgggcaccaccgtgcactgtgactacctgaaccggccccacaagagcatccacagaagaagaacagaccccatggtgaccctgagcagcatcctggagagcatcatcaatgacatgagggacctgcccaacacctaccccttccacacccctgtgaatgccaaggtggtgaaggactactacaagatcatcacccggcccatggacctgcagaccctgcgggagaatgtgaggaagaggctgtaccccagccgggaggagttccgggagcacctggagctgattgtgaagaacagcgccacctacaacggccccaagcacagcctgacccagatcagccagagcatgctggacctgtgtgatgagaagctgaaggagaaggaggacaagctggcccggctggagaaggccatcaaccccctgctggatgatgatgaccaggtggccttctccttcatcctggacaacatcgtgacccagaagatgatggctgtgcctgacagctggcccttccaccaccctgtgaacaagaagtttgtgcctgactactacaaggtgattgtgaaccccatggacctggagaccatcaggaagaacatcagcaagcacaagtaccagagccgggagagcttcctggatgatgtgaacctgatcctggccaacagcgtgaagtacaacggctacatgtgcaccacctgccgcttctag

SEQ ID NO: 296305 - DNA, 1632 bp, Artificial Sequence
  derived and/or modified sequence
atgaccgaggagcaggaggaggagctggagaagaccgtgatccacaatgataatgaagagcttattaaggtcgagggaacgaagatcgtgctcggaaagcagctgatagaatccgccgatgaagtccgccggaagtccctggtactcaaatttccaaaacaacaactgccaccaaagaaaaaaaggagagtgggaacaaccgtgcactgcgactatttgaatcgccctcacaagtcaatccacaggcgcaggacagatcccatggtgacgctgtcctccatcttagaatccatcatcaacgacatgagagacctgccaaatacttacccttttcatacaccagtgaacgcgaaggttgtgaaggactactacaagatcatcacccggccgatggatttacagaccctgcgtgaaaatgttcgtaaacggctgtacccttcacgagaagaattcagagaacatcttgaacttatcgttaagaactcggcgacttacaatggcccaaagcattcgcttacccagatcagccagtccatgcttgacctgtgtgatgagaagctcaaagaaaaagaagacaagctggcgcgactggaaaaggctattaaccccttgttagatgatgatgaccaggtggccttcagcttcattctcgataatattgtgactcagaagatgatggccgtgccagactcttggccatttcaccacccagtgaataaaaagttcgtccccgactactataaggtgattgtcaatcctatggatctggagaccattagaaaaaacatatctaaacacaagtatcaatcaagggagagttttctcgacgacgttaaccttatcctcgccaactctgtaaaatataatggccctgaatcccagtacaccaaaacagcccaggaaatcgtcaacgtgtgttaccagacgctgaccgaatatgatgagcacttgacccagctcgagaaggacatctgcacagccaaggaggctgccttggaggaggccgaacttgaaagtctggaccccatgacaccaggcccatacacaccccaagctaaacccccggatctttatgatactaacacctccttgtctatgagccgggatgcatctgtttttcaggacgagtctaacatgagtgtgctcgacataccctccgccacgcccgaaaagcaagtcacgcagatgcggcagggcagagggagactcggagaggaggattctgatgttgatattgaaggctacgatgacgaggaagaggatggcaaacccaagacaccggccccagaaggcgaagatggagatggagaccttgcagatgaggaggaggggacggtacagcagccacaggccagtgtattatacgaagatctattgatgagcgaaggcgaagatgacgaggaagacgccggctccgatgaggagggcgacaacccattctcagcaatccaactgtccgagagtgggtctgactctgacgtcgggtcgggcggaatcaggcccaagcagcctagaatgctgcaagaaaacacccggatggatatggagaatgaggagagcatgatgtcctatgagggcgacgggggggaagcatcccatggactggaagacagtaatattagccatcagtag

SEQ ID NO: 296306 - DNA, 897 bp, Artificial Sequence
  derived and/or modified sequence
atgaccgaggagcaggaggaggagctggagaagaccgtgatccacaatgacaatgaagagctgatcaaagtcgaaggtacaaagattgttttagggaaacagctgatcgagtcagcagatgaggtaagaaggaaaagtctggtactgaagtttccgaagcagcagcttcccccgaagaagaagaggcgcgtgggtacaaccgttcattgcgattatttgaacagacctcacaagtccatccacaggcggcggactgaccctatggtgactttgtcttctatcctggaatccataatcaatgatatgagggatctgccgaacacttatcctttccacacccctgtgaacgcaaaagtggtgaaggattattacaagattatcacacggcccatggacctccagacactgcgagagaacgtgagaaagagactataccctagcagggaggaatttcgagagcatctggagcttatcgtcaaaaattctgcaacctataacggccccaaacactctcttacccagatcagtcaatctatgctggatttgtgtgacgagaaacttaaagagaaagaggataagctggcccggctggagaaggccatcaacccacttttagatgacgacgatcaggtggcttttagttttatcttggataatatcgtgactcagaagatgatggccgtcccggactcatggccattccaccatcccgtgaataaaaagttcgtaccagactattataaggtgatagtcaatccaatggatctggagactattaggaagaacatatccaagcacaaataccagagtagagaaagcttcctcgatgacgtcaacttgatattggccaatagcgtgaagtataatggctacatgtgtaccacctgcagattctag

SEQ ID NO: 296307 - DNA, 1632 bp, Artificial Sequence
  derived and/or modified sequence
atgaccgaagaacaggaggaggagctggagaagaccgtgatccataatgataatgaggagttgattaaggtggaaggaacaaaaattgtcctgggcaaacaactgattgagtctgcggatgaggtgaggaggaaaagcctggtgctgaagtttcctaagcaacaactccctccgaaaaaaaagcgacgagtcgggaccaccgtccactgtgattacctgaacagacctcacaaatccattcaccggcgtcggaccgatcctatggtaaccttgtccagcatccttgaatccataataaatgacatgagggatttgcccaatacttaccccttccatacccccgtgaacgccaaagtggtgaaagattactacaagatcattacccggcctatggatctccaaaccctcagagaaaatgtccgcaaaagactgtatcctagtagggaggagttccgagaacacctcgaactgatagtaaaaaactccgctacttataatggccctaaacactcattgacacagataagccagagcatgctggatctttgtgatgagaagttaaaggagaaggaggataaactcgccaggttagaaaaagccatcaatcccctattggacgatgatgaccaagtggccttttcgttcatcttggacaatattgttacccagaaaatgatggccgtgcctgacagctggcccttccatcaccctgtgaacaaaaaatttgtccccgattattacaaggtgattgtgaaccctatggacttagagactatcaggaagaatatctctaagcacaaataccagagccgagaatcatttttggatgacgtcaacttaatattagctaatagcgtaaaatataatggtccagagtctcaatatacaaaaacggcccaagagatagtgaacgtgtgctatcagactctaacagaatatgatgagcaccttacacagctggagaaagacatctgcaccgctaaggaggcagcattagaagaggcagaactggaatccttagaccctatgactccaggaccatataccccccaagccaaacctccagacctgtatgataccaacacgtccttgtccatgtctcgcgacgcctccgtcttccaggacgagagtaatatgtcggtactcgacatcccgtccgccactcccgagaagcaggtcacgcaaatgaggcagggcagaggtcgcctgggagaggaagactccgatgtggacatcgaaggttatgatgatgaggaagaagacgggaaacctaagacgccagcacctgaaggagaagacggggacggagatctcgcagatgaagaggaaggtaccgttcagcagccgcaggccagcgtgctgtatgaggacttgctgatgagtgagggagaggatgacgaagaggatgcaggatccgatgaggagggcgataaccccttctctgctatacagctcagtgaaagcggatccgatagtgacgtgggtagcgggggtatcagaccaaagcagccacgcatgctccaggagaataccaggatggatatggaaaatgaagagtctatgatgtcatacgaaggcgacggcggagaagctagccacggattagaagattcaaacattagccatcaatag

SEQ ID NO: 296308 - DNA, 897 bp, Artificial Sequence
  derived and/or modified sequence
atgactgaggagcaggaggaagaactggaaaaaacggtgattcacaacgacaatgaggagctcataaaagtggaaggcacaaagatcgttctgggcaagcagctgattgaatctgccgacgaagtccgcagaaagtcactggtgttgaaattcccaaagcagcaactgcctcctaagaagaaaaggcgtgtcggcactacagttcactgtgactatcttaatcggccacacaagtctatccaccggagaaggaccgatcctatggttaccctaagctccattctcgaatccatcataaatgatatgcgggaccttccaaacacttacccctttcacacacccgtgaatgcaaaagtggttaaggattactacaagattattacgagaccaatggacctccaaactctgagagagaatgtcagaaaaaggttgtatcccagccgggaagaattcagggagcatctggaattaatcgttaagaatagtgcgacttacaacggtcctaagcattctcttacacagatcagccagagtatgctcgacctctgtgacgagaagcttaaagagaaggaagataaattagcgaggctggagaaggccatcaacccactgttagatgacgatgatcaggtagcatttagtttcattctggacaacatcgttacgcaaaaaatgatggccgttccggattcctggccattccatcacccagtcaataagaaattcgtgcctgactactacaaggtgatagtgaaccctatggatctggagacgatccgtaagaacatcagtaaacacaagtatcaatctagggagtcctttctggatgatgtcaacctcatcctcgccaacagtgtcaaatacaacggatatatgtgtaccacatgccgcttttag

SEQ ID NO: 296309 - protein, 161 aa, Artificial Sequence
  derived and/or modified sequence
MPKRKPKRRSARLSAMLVPVTPEVKPKRTSSSRKMKTKSDMMEENIDTSAQAVAETKQEAVVEEDYNENAKNGEAKITEAPASEKEIVEVKEENIEDATEKGGEKKEAVAAEVKNEEEDQKEDEEDQNEEKGEAGKEDKDEKGEEDGKEDKNGNEKGEDAK

SEQ ID NO: 296310 - protein, 201 aa, Artificial Sequence
  derived and/or modified sequence
MPKRKMLVPVTPEVKPKRTSSSRKMKTKSDMMEENIDTSAQAVAETKQEAVVEEDYNENAKNGEAKITEAPASEKEIVEVKEENIEDATEKGGEKKEAVAAEVKNEEEDQKEDEEDQNEEKGEAGKEDKDEKGEEDGKEDKNGNEKGEDAKEKEDGKKGEDGKGNGEDGKEKGEDEKEEEDRKETGDGKENEDGKEKGDKK

SEQ ID NO: 296311 - DNA, 486 bp, Artificial Sequence
  derived and/or modified sequence
atgccaaagagaaaaccaaaaagacgcagtgctcgtctgtccgcgatgctggtgccagtgacaccagaagtgaagcctaagcggactagttcgtcccgtaagatgaagaccaagtcagacatgatggaagagaatatcgacacatccgcccaagccgtggcggagacaaagcaggaggccgttgtcgaagaagactacaacgagaacgccaagaatggtgaagccaaaatcacagaggctcctgcttctgagaaggagatcgtggaggttaaggaggagaacatagaagatgccactgagaaagggggcgaaaagaaggaagctgtcgccgcggaagtcaagaacgaagaggaggaccagaaggaggacgaagaggatcagaacgaggagaaaggagaggctggcaaagaggacaaagatgagaagggcgaagaagatggaaaagaggacaagaatggcaacgagaaaggggaggacgcaaagtag

SEQ ID NO: 296312 - DNA, 606 bp, Artificial Sequence
  derived and/or modified sequence
atgcctaaacgcaagatgctcgtcccagtgacccccgaagtcaagcctaaacgcacttctagcagcaggaagatgaaaacgaaatccgacatgatggaggagaatatagatacgtctgcacaggctgtcgctgaaaccaaacaagaagccgtggttgaggaggattacaatgaaaatgccaagaatggcgaggccaagattaccgaggcccccgcatctgagaaagagattgtcgaggtgaaggaggagaacatagaagatgccaccgagaaaggcggcgagaagaaagaagcagtcgctgccgaggtcaaaaacgaggaggaagaccagaaagaggatgaagaggaccagaatgaagaaaagggagaagcgggcaaggaggacaaggatgaaaagggagaagaagacggaaaggaagataagaacgggaacgaaaagggcgaagatgcaaaagagaaggaggatgggaagaaaggtgaagacggcaaaggaaacggcgaggatggcaaagagaaaggcgaggatgagaaggaggaggaagatcgaaaagagacaggggatggaaaagaaaatgaggatggtaaggagaagggtgataaaaaatag

SEQ ID NO: 296313 - DNA, 486 bp, Artificial Sequence
  derived and/or modified sequence
atgcccaagaggaagcccaagagaagaagtgcccggctgagcgccatgctggtgcctgtgaccccagaggtgaagcccaagaggaccagcagcagcaggaagatgaagaccaagagtgacatgatggaggagaacatcgacaccagcgcccaggccgtggccgagaccaagcaggaggccgtggtggaggaggactacaatgaaaatgccaagaatggagaggccaagatcacagaggccccagccagcgagaaggagatcgtggaggtgaaggaggagaacattgaagatgccacagagaagggcggggagaagaaggaggccgtggccgctgaggtgaagaatgaggaggaggaccagaaggaggatgaggaggaccagaatgaggagaagggggaggccggcaaggaggacaaggatgagaagggggaggaggatggcaaggaggacaagaatggaaatgagaagggggaggatgccaagtag

SEQ ID NO: 296314 - DNA, 606 bp, Artificial Sequence
  derived and/or modified sequence
atgcccaagaggaagatgctggtgcctgtgaccccagaggtgaagcccaagaggaccagcagcagcaggaagatgaagaccaagagtgacatgatggaggagaacatcgacaccagcgcccaggccgtggccgagaccaagcaggaggccgtggtggaggaggactacaatgaaaatgccaagaatggagaggccaagatcacagaggccccagccagcgagaaggagatcgtggaggtgaaggaggagaacattgaagatgccacagagaagggcggggagaagaaggaggccgtggccgctgaggtgaagaatgaggaggaggaccagaaggaggatgaggaggaccagaatgaggagaagggggaggccggcaaggaggacaaggatgagaagggggaggaggatggcaaggaggacaagaatggaaatgagaagggggaggatgccaaggagaaggaggatggcaagaagggggaggatggaaaaggaaatggagaagatggcaaggagaagggggaggatgagaaggaggaggaggacaggaaggagactggagatggcaaggaaaatgaagatggcaaggagaagggggacaagaagtag

SEQ ID NO: 296315 - DNA, 486 bp, Artificial Sequence
  derived and/or modified sequence
atgcccaagcggaagcccaagcggcggagcgcccggctgagcgccatgttggtacctgttaccccagaagtcaagcctaaacggacctcctcatcgcggaagatgaaaaccaaatctgacatgatggaggagaatatagatacaagcgcccaggcagtcgctgaaactaaacaagaggcggtcgtagaggaggattacaatgagaatgcgaagaacggagaggccaagatcacggaggcaccggccagcgaaaaagagattgtagaagtgaaagaggaaaatatagaagatgcaactgaaaaggggggtgagaaaaaggaggctgttgctgccgaagtgaagaatgaggaagaagaccagaaggaagacgaagaagatcagaacgaagagaagggcgaagctgggaaggaagacaaggacgaaaagggggaggaggacggtaaggaagacaagaacgggaacgaaaagggagaggatgccaagtag

SEQ ID NO: 296316 - DNA, 606 bp, Artificial Sequence
  derived and/or modified sequence
atgcccaagcggaagatgctggtgcccgtgacccccgaggtgaagcccaagcgcacctcctcatcccgcaagatgaagacaaaatcagacatgatggaggagaacatagatacctctgcccaggcggtcgccgaaacgaagcaggaagcggtggtggaggaggattacaacgagaacgccaaaaatggggaggcaaagatcaccgaagcacccgcgtctgaaaaggaaatcgtcgaagtgaaggaagagaatatagaggacgcaacagaaaaagggggagaaaagaaggaggccgtggcagctgaagtcaaaaatgaggaggaggaccagaaggaagatgaggaggatcagaatgaagagaaaggggaggcaggcaaagaggataaggacgagaaaggcgaagaggatggaaaagaagacaaaaatggaaacgagaaaggcgaagacgctaaggagaaagaagacggaaaaaagggagaggacggaaaagggaatggtgaagacggcaaggagaaaggggaagacgagaaggaagaagaggataggaaagagacaggggatggtaaggagaacgaggacggtaaggaaaagggcgataaaaagtag

SEQ ID NO: 296317 - DNA, 486 bp, Artificial Sequence
  derived and/or modified sequence
atgccaaagcgtaaacccaaaaggaggtctgccaggctgtccgcaatgctagtgcccgtcacccctgaagtgaagcccaaacggacctcttcaagccgcaaaatgaagactaaatccgacatgatggaagagaatatcgatacgagcgcccaggccgtggccgaaaccaagcaagaagcggtggtggaggaggactacaatgagaatgccaagaatggggaggcaaagatcacagaggccccagcatctgagaaggagatagttgaagtaaaagaagagaacattgaggacgcaacggagaaggggggagagaaaaaggaggcagtggccgctgaggtgaaaaatgaagaagaggaccagaaagaggatgaagaagaccagaatgaggagaagggcgaagctggtaaagaggataaagacgagaaaggggaagaggacggaaaagaagacaaaaacgggaacgagaaaggtgaagacgccaagtag

SEQ ID NO: 296318 - DNA, 606 bp, Artificial Sequence
  derived and/or modified sequence
atgcctaagagaaaaatgctggtgcccgtcacccctgaggttaaaccgaagaggacctcatccagccgcaagatgaaaactaagagcgacatgatggaagaaaacatagacacatccgcccaggcagtagccgaaactaaacaggaggctgttgtagaagaagattataatgaaaacgccaagaacggagaggccaaaataacagaagctccggcttccgagaaagaaatcgtggaagtgaaggaggagaacatcgaggatgcgacggagaaaggaggcgagaagaaagaagcagtggcggcagaggtgaagaacgaagaagaagatcaaaaggaggatgaggaggaccaaaacgaggagaagggagaagcaggcaaagaggacaaggacgaaaagggtgaggaagacggtaaagaggataaaaatggaaatgagaaaggcgaggatgctaaggaaaaggaggacgggaaaaagggagaagatggcaagggcaacggggaggacggtaaagagaaaggagaagatgaaaaagaggaggaagatagaaaagaaaccggcgacggcaaagaaaacgaagacggtaaggagaagggcgataagaagtag

SEQ ID NO: 296319 - DNA, 486 bp, Artificial Sequence
  derived and/or modified sequence
atgcccaagagaaagcccaagagaagaagcgccagactgagcgccatgctggtgcccgtgacccccgaggtgaagcccaagagaaccagcagcagcagaaagatgaagaccaagagcgacatgatggaggagaacatcgacaccagcgcccaggccgtggccgagaccaagcaggaggccgtggtggaggaggactacaacgagaacgccaagaacggcgaggccaagatcaccgaggcccccgccagcgagaaggagatcgtggaggtgaaggaggagaacatcgaggacgccaccgagaagggcggcgagaagaaggaggccgtggccgccgaggtgaagaacgaggaggaggaccagaaggaggacgaggaggaccagaacgaggagaagggcgaggccggcaaggaggacaaggacgagaagggcgaggaggacggcaaggaggacaagaacggcaacgagaagggcgaggacgccaagtag

SEQ ID NO: 296320 - DNA, 606 bp, Artificial Sequence
  derived and/or modified sequence
atgcccaagagaaagatgctggtgcccgtgacccccgaggtgaagcccaagagaaccagcagcagcagaaagatgaagaccaagagcgacatgatggaggagaacatcgacaccagcgcccaggccgtggccgagaccaagcaggaggccgtggtggaggaggactacaacgagaacgccaagaacggcgaggccaagatcaccgaggcccccgccagcgagaaggagatcgtggaggtgaaggaggagaacatcgaggacgccaccgagaagggcggcgagaagaaggaggccgtggccgccgaggtgaagaacgaggaggaggaccagaaggaggacgaggaggaccagaacgaggagaagggcgaggccggcaaggaggacaaggacgagaagggcgaggaggacggcaaggaggacaagaacggcaacgagaagggcgaggacgccaaggagaaggaggacggcaagaagggcgaggacggcaagggcaacggcgaggacggcaaggagaagggcgaggacgagaaggaggaggaggacagaaaggagaccggcgacggcaaggagaacgaggacggcaaggagaagggcgacaagaagtag

SEQ ID NO: 296321 - DNA, 572 bp, Artificial Sequence
  derived and/or modified sequence
gaaaactcatttgctcttggagcagtcaggcagtgactgccttcggctttttttctgctgactaagatctcctatagagagctacaacaatgcccaaaagaaagccaaagagaagatctgccaggttgtctgctatgcttgtgccagttacaccagaggtgaagcctaaaagaacatcaagttcaaggaaaatgaagacaaaaagtgatatgatggaagaaaacatagatacaagtgcccaagcagttgctgaaaccaagcaagaagcagttgttgaagaagactacaatgaaaatgctaaaaatggagaagccaaaattacagaggcaccagcttctgaaaaagaaattgtggaagtaaaagaagaaaatattgaagatgccacagaaaagggaggagaaaagaaagaagcagtggcagcagaagtaaaaaatgaagaagaagatcagaaagaagatgaagaagatcaaaacgaagagaaaggggaagctggaaaagaagacaaagatgaaaaaggggaagaagatggaaaagaggataaaaatggaaatgagaaaggagaagatgcaaaa

SEQ ID NO: 296322 - DNA, 742 bp, Artificial Sequence
  derived and/or modified sequence
ttttttttttttccagaggagagtacaggtcgtgctgcagttagttcattgaaaactcatttgctcttggagcagtcaggcagtgactgccttcggctttttttctgctgactaagatctcctatagagagctacaacaatgcccaaaagaaagatgcttgtgccagttacaccagaggtgaagcctaaaagaacatcaagttcaaggaaaatgaagacaaaaagtgatatgatggaagaaaacatagatacaagtgcccaagcagttgctgaaaccaagcaagaagcagttgttgaagaagactacaatgaaaatgctaaaaatggagaagccaaaattacagaggcaccagcttctgaaaaagaaattgtggaagtaaaagaagaaaatattgaagatgccacagaaaagggaggagaaaagaaagaagcagtggcagcagaagtaaaaaatgaagaagaagatcagaaagaagatgaagaagatcaaaacgaagagaaaggggaagctggaaaagaagacaaagatgaaaaaggggaagaagatggaaaagaggataaaaatggaaatgagaaaggagaagatgcaaaagagaaagaagatggaaaaaaaggtgaagacggaaaaggaaatggagaagatggaaaagagaaaggagaagatgaaaaagaggaagaagacagaaaagaaacaggagatggaaaagagaatgaagatggaaaagagaagggagataaaaaa

SEQ ID NO: 296323 - protein, 954 aa, Artificial Sequence
  derived and/or modified sequence
MNNHQLELAKQLHKEGHLFYCTCRVLTCPGQAKSIASAPGKCQDSAALTSTAFSGLDFGLLSGYLHKQALVTATHPTCTLLFPSCHAFFPLPLTPTLYKMHKGWKNYCSQKSLNEASMDEYLGSLGLFRKLTAKDASCLFRAISEQLFCSQVHHLEIRKACVSYMRENQQTFESYVEGSFEKYLERLGDPKESAGQLEIRALSLIYNRDFILYRFPGKPPTYVTDNGYEDKILLCYSSSGHYDSVYSKQFQSSAAVCQAVLYEILYKDVFVVDEEELKTAIKLFRSGSKKNRNNAVTGSEDAHTDYKSSNQNRMEEWGACYNAENIPEGYNKGTEETKSPENPSKMPFPYKVLKALDPEIYRNVEFDVWLDSRKELQKSDYMEYAGRQYYLGDKCQVCLESEGRYYNAHIQEVGNENNSVTVFIEELAEKHVVPLANLKPVTQVMSVPAWNAMPSRKGRGYQKMPGGYVPEIVISEMDIKQQKKMFKKIRGKEVYMTMAYGKGDPLLPPRLQHSMHYGHDPPMHYSQTAGNVMSNEHFHPQHPSPRQGRGYGMPRNSSRFINRHNMPGPKVDFYPGPGKRCCQSYDNFSYRSRSFRRSHRQMSCVNKESQYGFTPGNGQMPRGLEETITFYEVEEGDETAYPTLPNHGGPSTMVPATSGYCVGRRGHSSGKQTLNLEEGNGQSENGRYHEEYLYRAEPDYETSGVYSTTASTANLSLQDRKSCSMSPQDTVTSYNYPQKMMGNIAAVAASCANNVPAPVLSNGAAANQAISTTSVSSQNAIQPLFVSPPTHGRPDTKVLQYYFNLGLQCYYHSYWHSMVYVPQMQQQLHVENYPVYTEPPLVDQTVPQCYSEVRREDGIQAEASANDTFPNADSSSVPHGAVYYPVMSDPYGQPPLPGFDSCLPVVPDYSCVPPWHPVGTAYGGSSQIHGAINPGPIGCIAPSPPASHYVPQGM

SEQ ID NO: 296324 - DNA, 3924 bp, Artificial Sequence
  derived and/or modified sequence
acggatttccgcctccctcacagaaggcagtcactgcaacgtgcgtggcctcagttgcgtcatatccggcccttgcgatcagggcttgaggaacccgcgccatgaagtgcgtgtttgttaccgtagggaccaccagctttgacgacctcattgcgtgtgtgtcggcgcccgacagtctgcaaaaaatcgagagccttggttacaaccgacttatcctgcaaattggtagaggaacggtggtacctgaacccttcagtactgagtcgtttactctggatgtttacaggtacaaggattccttgaaagaagacattcagaaagcagatcttgttattagtcacgcaggtgcaggaagctgtttggagactctggaaaaaggaaagccactcgtagtggttataaacgaaaagttgatgaacaatcatcagctggaactggcaaagcagctacacaaagagggtcatctcttctattgtacctgcagggtcctgacttgtcctgggcaagccaagtccattgcttctgctcctgggaagtgccaagattctgcagcgctgacttcaactgccttttcaggcctagactttgggctgctttccggatacctgcataagcaagcccttgttactgctacccatcctacctgcaccctgctttttccctcttgccacgctttttttcctctccctcttacccccaccctgtacaaaatgcataaaggatggaaaaactactgcagccagaagtctttgaatgaggcatcaatggatgaatatttaggcagcttagggctgtttcgaaagctgactgccaaggatgcctcttgcctctttcgggccatttcggagcagttgttttgcagccaggtccatcatttggaaatcaggaaggcttgtgtctcatatatgagggaaaatcaacaaacttttgagtcttatgtggagggatcttttgagaaatacctggaacggttgggagatcccaaggaaagtgctggccagctggaaataagagctctttctctaatttataatcgggatttcattctttatcgctttcctggaaaacctccaacttatgtcacagataatggctatgaagacaagattctactctgctactcaagtagtggtcactatgattctgtgtactcaaaacaatttcagtcaagtgcagctgtttgtcaggctgtattgtacgaaattctctataaagatgtgtttgttgtggatgaagaagagttgaagactgcgattaaattgtttcgaagtggttctaagaagaacagaaataatgctgtaactggaagcgaggatgcccatactgattacaagagttcaaatcagaataggatggaagagtggggtgcctgctacaatgctgaaaatataccagagggctacaataaaggaacagaagaaacaaagtctccagaaaatccatcaaagatgcccttcccctataaggtgctcaaagccctggatccagaaatctatcgtaatgtagaatttgatgtttggttggacagcagaaaagaacttcaaaaatctgattacatggagtatgctgggagacagtactatttgggagacaagtgtcaggtttgcttggaatcagaaggaagatattataatgctcatatccaggaagttggaaatgagaacaattcagtaacagtcttcattgaagaattggcggaaaagcatgttgttccactggctaacttaaaaccagttacccaagtgatgtctgttcctgcctggaatgctatgcccagtcggaaaggaagaggttaccagaaaatgcctgggggttatgtcccggaaatagttatatcagagatggacataaagcaacagaagaagatgttcaagaaaattcgagggaaagaagtttacatgactatggcttacggcaagggagaccccctcctcccacccaggctgcagcacagtatgcattatgggcacgatcctccaatgcactactcacagacagctggcaatgttatgtctaatgaacattttcatcctcagcatccatctccgagacaaggtcggggatatgggatgcccaggaattcatctcggtttataaacaggcacaacatgccgggccctaaagttgatttttacccaggcccaggtaaaaggtgctgccagagctatgataacttctcttatagatctcgttcatttagacgtagtcaccgccagatgagttgtgtgaataaggagtcccagtatggatttaccccagggaatggacagatgcccaggggcttggaagaaactattactttttatgaagttgaagaaggggatgagactgcttatccaactttacctaatcatggaggtccctctacaatggttcctgctacttcaggatactgtgttggaaggcggggacatagctcaggcaaacagactttgaatttagaggagggcaatggccagagtgaaaatgggcgatatcatgaagaatatctttatcgtgcagagccagactatgaaacttcaggtgtttatagcacaactgcatctacagcaaacttgtctcttcaggacagaaagtcatgttctatgtctcctcaggacacagttacctcatacaactacccccagaagatgatgggaaatattgcagcagttgcagcttcctgtgccaataatgttccagctccagtcttatctaacggtgcagcggctaatcaagctattagtaccacttcagtttcctcacagaatgctatacagcctctctttgtatctccacctacacacggcaggccagatacaaaagttttgcagtactatttcaatctaggattgcagtgctattaccacagctactggcactccatggtctatgtgccacagatgcagcagcagcttcatgtagagaattatccagtctatactgagccacctctggtagatcaaaccgttcctcaatgctacagtgaggtgaggagagaagatggcatacaggcggaagcatcagcaaatgatacttttccgaatgctgattcttcatctgtccctcatggagcagtctattatccagtaatgtcagatccctatgggcagccacctttgccaggttttgactcctgccttccggttgtgccagattattcctgtgttcccccctggcatccagttggtacagcatatggtggttcttctcaaattcatggtgctataaatcctgggccaattggctgtattgctccatctcccccagcttctcattatgtacctcagggtatgtaagatccagcagtatgaagtattcttgcactgccattttcttgctgtttttgtttttaaaaagtattttatgttagtggttaaatgatttaggtgattagtgtttactattgtatttgtctttaaaattattttatcttttgatttaaaatagtactttaaaattaaggggtattattttgggctgtgactaaggaaattgagatggatgtacaactagccccatattgagcatacttcattgtattcagctgttttcctgtcagccatttgtcagctttatattagctgatggtaccaattgataaaatgaatataaagtatttcattggttcaaaaatcacacatcatattaaaccatgcagaattggagtaacttccacttttttctagaaagtaaaaccaagagcctttgcttctggataactcacttaatattaaattaaagagctcttcacgtttcttgagaattatctgaagccagttgcattctgtgatatcagttttgaaggcacatggttctctgctttagatttatcccatatgctattgtttaatactggatgtatgtaagtgttttactgcactgtattgaattggtgtcttttgcacagttagcagtaaataaaaattagcatttaaaattgcc

SEQ ID NO: 296325 - DNA, 3477 bp, Artificial Sequence
  derived and/or modified sequence
atggaatccggtcacctcctttgggcactactcttcatgcagtctctttggccgcaactgacagacggcgccaccagggtgtactacttgggaatccgcgacgtccagtggaactatgcacccaagggccgcaatgtgatcactaatcagccactggactcagatatcgtagcatcctctttcctgaagtccgataaaaataggatcggtggcacatataaaaaaacaatttacaaagagtacaaggatgactcctacacggatgaggtggcgcagcctgcctggctgggcttcctcggacccgtccttcaggccgaggtcggagatgtaatactgattcatctgaagaatttcgcaacacgaccatacacaattcaccctcacggggtgttttatgagaaggatagcgaaggatcactgtaccctgatggatcatccgggccactaaaggccgatgattccgtgcctcctggcgggtcgcacatttataattggacaattccagagggccatgctcccactgacgctgaccccgcttgtttgacctggatttatcatagtcatgtcgacgcccctcgggacattgctactggactcatcggcccactcattacttgcaaacgcggcgcactggacggcaattctcctcctcagcggcaggatgtagaccatgattttttcctcctgttctctgtcgtggatgaaaacctttcttggcacttgaatgaaaatattgccacatattgcagtgaccctgcctctgtggacaaagaggacgagacctttcaagagagcaatcgcatgcatgcaattaacgggttcgtcttcggtaatctgccagagctgaacatgtgtgcccagaagcgcgtggcttggcatctgttcggcatgggcaacgagattgacgtacatacggccttttttcatggccaaatgctgaccactagagggcaccacacggatgtggccaacatttttccagctacattcgtgacagccgagatggtgccctgggaaccgggcacctggcttatatcctgccaggtgaatagccatttccgtgacggtatgcaagccttatataaagttaagtcgtgctccatggcaccgcctgttgatctccttacaggtaaggtaaggcaatatttcattgaagctcatgaaatccagtgggactacgggccaatgggccatgacggctctaccggcaagaacttgagggaacccggttcaatttccgataaatttttccagaaatcatcgagtcgcataggggggacgtactggaaagttcggtacgaggcttttcaggacgaaacattccaggagaaaatgcatctcgaggaagatcggcacttagggattctcggacctgtcatcagagccgaggtcggagacaccatccaagtggttttttataaccgggcttcacaaccgttcagtatgcagcctcacggggtattctacgagaaagattatgaggggaccgtgtacaatgatggttcatcttatccaggcctggtagctaagcctttcgagaaggtcacctatagatggaccgtacctccccacgcagggccaactgcccaggatcctgcctgtttaacgtggatgtatttctcggcagccgatcctatccgtgataccaactctggcctggtgggacctctcctggtctgtagagccggcgccctgggtgccgacggtaagcaaaaaggggtagacaaagagttcttccttctgttcacagtgctggatgagaataaaagctggtactctaatgccaaccaggctgccgccatgctggacttcaggctcttgagcgaagacatcgaaggtttccaggattccaacaggatgcacgcaatcaatggctttctgttttctaatttgccaaggctggatatgtgcaagggagacaccgtggcctggcacctgctgggactgggtaccgagactgacgttcacggggttatgttccagggaaatactgtgcagctccagggcatgcgcaagggagctgccatgcttttccctcatacttttgtaatggcgataatgcagccagacaacttggggactttcgagatctactgccaggcgggctcccaccgcgaagctggcatgcgtgccatttataatgtgagtcaatgtccggggcatcaagctacaccccggcaaaggtaccaggctgcccgcatctattacattatggccgaggaagttgaatgggactattgtcctgataggtcatgggagagagagtggcacaatcagtccgagaaggattcatatggatatatcttcctgagcaataaggatggactccttggcagcaggtacaaaaaagcggtatttagagaatacactgacggcaccttccgcatccctcgcccccgcaccggacccgaagaacacctgggaattctcggtccccttattaaaggagaggtaggagatatattaactgtcgtgttcaagaacaacgcctccagaccatattctgtccacgcacacggtgtcctggaatctactacagtctggcctctggccgctgagccgggcgaagtggtcacctaccagtggaacatccctgagcgcagtggtccaggacccaatgattcagcctgtgtgtcttggatctattactccgcagtggatcctatcaaggacatgtattccgggctggtcggccccttggctatctgccaaaagggtatacttgagcctcacgggggccgctctgatatggaccgggagtttgccctgttatttcttattttcgacgagaataaatcctggtacctggaggagaatgtagccactcacggatctcaggaccctgggagcatcaatcttcaggacgagactttcctcgagagcaataaaatgcacgccatcaacggcaaactgtatgccaatctcagggggctgaccatgtaccaaggcgaacgtgtggcttggtacatgctggcgatgggccaggatgtcgatctccacacaatccactttcacgccgaaagttttctctaccggaacggtgagaactacagagcagatgtagtcgacttgttcccaggaacgttcgaggttgtggagatggtcgcctctaacccaggcacttggctcatgcattgccacgtaactgatcacgttcacgctggcatggaaactttgtttaccgtattctccagaaccgaacatctgtctcccctgacagtgatcacaaaagagacagagaaagcagtccctcctcgtgacatagaagagggtaatgtgaaaatgcttggcatgcagatccctataaaaaatgtggagatgctagcgtcggtactggtcgccattagcgtgacactgctgttggtggtgctcgcactgggcggggttgtctggtatcaacataggcagcgaaagctgagaagaaatcgcagatccatactagatgactctttcaagttattatccttcaagcaatag

SEQ ID NO: 296326 - DNA, 3486 bp, Artificial Sequence
  derived and/or modified sequence
atgtgggctatggagtctggtcatttactctgggccctgttattcatgcagagtttatggccacagctgaccgacggagccactcgcgtgtattacctcggaattagggatgttcagtggaactacgcgcccaaaggtcgcaacgtgataaccaaccaaccccttgattctgatatcgtggcatccagcttccttaagtctgataagaaccggatcgggggaacctacaaaaaaaccatttataaagagtacaaagacgatagctataccgatgaagttgcccaaccagcatggttgggattcctcggccctgtcctgcaggcagaagtcggcgatgtcatcctaattcacctgaaaaacttcgctaccagaccctacacaatccatccccacggcgtgttctacgagaaagatagcgaaggatctctatatccagacgggtcctccggccctctgaaagcagatgactcggtgccacctgggggatcacacatctacaactggaccattcccgaagggcatgcacctacggatgcagaccctgcttgtctcacatggatctaccacagccatgttgacgctcccagggatattgcaacaggcctcataggccccctgatcacctgcaagcgcggcgcgttggatggaaactctccaccacagaggcaggacgtagatcacgatttctttctccttttcagcgtggtggatgaaaatctgagttggcatctgaatgaaaacatagccacatactgttccgatcctgcttccgtcgataaggaggatgaaacttttcaggagagcaacagaatgcatgcgattaacggctttgtcttcggaaacctacccgagctgaacatgtgcgctcagaagagggttgcttggcaccttttcgggatgggcaacgaaatagacgtccacaccgcgttcttccacggacaaatgctcaccacaagggggcaccacacagacgtagctaacatttttccggctacgtttgttactgctgagatggtgccctgggaacccgggacctggctgatctcatgtcaggtaaacagtcatttcagagatgggatgcaggcactctacaaggttaagagctgctctatggcccctcccgtggacttgctcacaggaaaggtcaggcagtatttcatcgaagcgcacgagatccagtgggattacggacctatgggccacgatgggtccacaggtaaaaatctgagagaacccggaagtatcagcgataagtttttccaaaagagctcaagccgaattgggggcacatactggaaggtgcgatacgaagcattccaagatgaaacttttcaagaaaagatgcatctggaagaagaccgacacctcggtatccttgggccggtgattcgcgctgaagttggtgatacgatccaggtcgtcttctataaccgggcgtcccagcctttctccatgcaacctcatggcgtgttttacgagaaggactacgaggggacagtgtataacgacgggtctagttatccaggccttgttgctaaacctttcgaaaaagtcacctatcgctggaccgtaccaccgcacgccggacccaccgcccaggatcctgcgtgtcttacgtggatgtactttagcgccgcagacccaattcgggataccaacagcggtctcgtgggacctctgttagtttgcagggcaggggctttgggagccgacggaaaacagaagggggtcgataaggaattctttttactcttcactgtattggatgaaaacaaatcatggtactctaatgctaatcaagctgctgctatgctcgacttccgcctgctgagtgaagatatcgaggggttccaagacagtaataggatgcacgccataaacgggttcctgttttccaatctcccacggcttgatatgtgcaaaggggatacagttgcatggcatctattggggctgggcacagagactgatgttcatggagtgatgtttcaaggaaatacagtccagctacaggggatgcgaaagggcgctgccatgctgttccctcacacattcgtgatggccatcatgcagccagataacctgggcacatttgagatttattgtcaagccggctctcatcgagaagccgggatgagggctatctataacgtgagccaatgtcctggccaccaggctactccgagacagcgctatcaggctgctaggatttattacattatggcggaggaagtggagtgggactactgtcccgaccgaagctgggaacgggagtggcataatcaatctgagaaggacagctatggctacatctttttgagcaataaggacggcttattgggaagccgctataagaaagcagtgttccgggagtacactgatgggactttcagaataccgcggccacggactgggcccgaagaacacctgggcatactgggtccactcatcaaaggggaagttggggatattcttactgtggtgttcaaaaacaatgcatcgcggccctattccgtccatgcgcacggcgttctggagtcaacgacggtctggcccttggctgctgaacccggcgaagttgtgacttaccaatggaatatccctgagcggtcaggacccgggcccaacgactcagcatgcgtttcctggatctactactcagccgtagacccaattaaggatatgtacagcggcctcgtggggccgttagccatttgccaaaagggtatactggagccccatggcggtagatctgacatggatagggaatttgctctgctgtttttaatttttgatgaaaacaagagctggtacctcgaagagaatgtggcgacccatggcagccaggatccgggctctatcaacctccaggacgagacctttctggagagcaataaaatgcatgcgattaatgggaagctttacgcgaacttgagaggcctcacgatgtatcagggggagagggtggcctggtatatgctagcgatggggcaggatgtagaccttcacactatccacttccacgccgagtccttcctttatcgaaacggtgaaaattatcgggccgatgtggtggatctgttccccgggaccttcgaggttgttgagatggttgcatccaaccctggaacatggctgatgcattgccatgtcacagaccacgtccatgccggaatggagacactgttcacagttttttccaggaccgagcacctgagcccattaacagtcattactaaggaaacagaaaaggctgttccaccccgtgatatcgaagaagggaatgtgaaaatgctcggtatgcagatccccattaaaaatgtcgagatgttggctagcgtcctcgtggccatcagcgtgaccctgctgctagttgtgcttgccctaggcggtgtggtctggtaccagcatagacagcgaaaactgcgacgcaatagacggtctattctggatgattcatttaagctgctctcttttaagcaatag

SEQ ID NO: 296327 - DNA, 4228 bp, Artificial Sequence
  derived and/or modified sequence
ggaaaagagggcacccagcccttccccctccctcatcctcccatcccagtaaaccctgccaaattggaatcctggacttaatttaggagaaaggccctgtaaccaagatactgactgaacatggctggcggactcaggctggggtctgcagtgcagcattaatgggccgctgacatgaatatggagtagttttctctagcaaagagtggcttccagcttcttaaagtctgacaagaaccggatagggggaacctacaagaagaccatctataaagaatacaaggatgactcatacacagatgaagtggcccagcctgcctggttgggcttcctggggccagtgttgcaggctgaagtgggggatgtcattcttattcacctgaagaattttgccactcgtccctataccatccaccctcatggtgtcttctacgagaaggactctgaaggttccctatacccagatggctcctctgggccactgaaagctgatgactctgttcccccggggggcagccatatctacaactggaccattccagaaggccatgcacccaccgatgctgacccagcgtgcctcacctggatctaccattctcatgtagatgctccacgagacattgcaactggcctaattgggcctctcatcacctgtaaaagaggagccctggatgggaactcccctcctcaacgccaggatgtagaccatgatttcttcctcctcttcagtgtggtagatgagaacctcagctggcatctcaatgagaacattgccacttactgctcagatcctgcttcagtggacaaagaagatgagacatttcaggagagcaataggatgcatgcaatcaatggctttgtttttgggaatttacctgagctgaacatgtgtgcacagaaacgtgtggcctggcacttgtttggcatgggcaatgaaattgatgtccacacagcatttttccatggacagatgctgactacccgtggacaccacactgatgtggctaacatctttccagccacctttgtgactgctgagatggtgccctgggaacctggtacctggttaattagctgccaagtgaacagtcactttcgagatggcatgcaggcactctacaaggtcaagtcttgctccatggcccctcctgtggacctgctcacaggcaaagttcgacagtacttcattgaggcccatgagattcaatgggactatggcccgatggggcatgatgggagtactgggaagaatttgagagagccaggcagtatctcagataagtttttccagaagagctccagccgaattgggggcacttactggaaagtgcgatatgaagcctttcaagatgagacattccaagagaagatgcatttggaggaagataggcatcttggaatcctggggccagtgatccgggctgaggtgggtgacaccattcaggtggtcttctacaaccgtgcctcccagccattcagcatgcagccccatggggtcttttatgagaaagactatgaaggcactgtgtacaatgatggctcatcttaccctggcttggttgccaagccctttgagaaagtaacataccgctggacagtcccccctcatgccggtcccactgctcaggatcctgcttgtctcacttggatgtacttctctgctgcagatcccataagagacacaaattctggcctggtgggcccgctgctggtgtgcagggctggtgccttgggtgcagatggcaagcagaaaggggtggataaagaattctttcttctcttcactgtgttggatgagaacaagagctggtacagcaatgccaatcaagcagctgctatgttggatttccgactgctttcagaggatattgagggcttccaagactccaatcggatgcatgccattaatgggtttctgttctctaacctgcccaggctggacatgtgcaagggtgacacagtggcctggcacctgctcggcctgggcacagagactgatgtgcatggagtcatgttccagggcaacactgtgcagcttcagggcatgaggaagggtgcagctatgctctttcctcatacctttgtcatggccatcatgcagcctgacaaccttgggacatttgagatttattgccaggcaggcagccatcgagaagcagggatgagggcaatctataatgtctcccagtgtcctggccaccaagccacccctcgccaacgctaccaagctgcaagaatctactatatcatggcagaagaagtagagtgggactattgccctgaccggagctgggaacgggaatggcacaaccagtctgagaaggacagttatggttacattttcctgagcaacaaggatgggctcctgggttccagatacaagaaagctgtattcagggaatacactgatggtacattcaggatccctcggccaaggactggaccagaagaacacttgggaatcttgggtccacttatcaaaggtgaagttggtgatatcctgactgtggtattcaagaataatgccagccgcccctactctgtgcatgctcatggagtgctagaatctactactgtctggccactggctgctgagcctggtgaggtggtcacttatcagtggaacatcccagagaggtctggccctgggcccaatgactctgcttgtgtttcctggatctattattctgcagtggatcccatcaaggacatgtatagtggcctggtggggcccttggctatctgccaaaagggcatcctggagccccatggaggacggagtgacatggatcgggaatttgcattgttgttcttgatttttgatgaaaataagtcttggtatttggaggaaaatgtggcaacccatgggtcccaggatccaggcagtattaacctacaggatgaaactttcttggagagcaataaaatgcatgcaatcaatgggaaactctatgccaaccttaggggtcttaccatgtaccaaggagaacgagtggcctggtacatgctggccatgggccaagatgtggatctacacaccatccactttcatgcagagagcttcctctatcggaatggcgagaactaccgggcagatgtggtggatctgttcccagggacttttgaggttgtggagatggtggccagcaaccctgggacatggctgatgcactgccatgtgactgaccatgtccatgctggcatggagaccctcttcactgttttttctcgaacagaacacttaagccctctcaccgtcatcaccaaagagactgaaaaagcagtgccccccagagacattgaagaaggcaatgtgaagatgctgggcatgcagatccccataaagaatgttgagatgctggcctctgttttggttgccattagtgtcacccttctgctcgttgttctggctcttggtggagtggtttggtaccaacatcgacagagaaagctacgacgcaataggaggtccatcctggatgacagcttcaagcttctgtctttcaaacagtaacatctggagcctggagatatcctcaggaagcacatctgtagtgcactcccagcaggccatggactagtcactaaccccacactcaaaggggcatgggtggtggagaagcagaaggagcaatcaagcttatctggatatttctttctttatttattttacatggaaataatatgatttcactttttctttagtttctttgctctacgtgggcacctggcactaagggagtaccttattatcctacatcgcaaatttcaacagctacattatatttccttctgacacttggaaggtattgaaatttctagaaatgtatccttctcacaaagtagagaccaagagaaaaactcattgattgggtttctacttctttcaaggactcaggaaatttcactttgaactgaggccaagtgagctgttaagataacccacacttaaactaaaggctaagaatataggcttgatgggaaattgaaggtaggctgagtattgggaatccaaattgaattttgattctccttggcagtgaactactttgaagaagtggtcaatgggttgttgctgccatgagcatgtacaacctctggagctagaagctcctcaggaaagccagttctccaagttcttaacctgtggcactgaaaggaatgttgagttacctcttcatgttttagacagcaaaccctatccattaaagtacttgttagaacactg

SEQ ID NO: 296328 - DNA, 3477 bp, Artificial Sequence
  derived and/or modified sequence
atggagagcggccacctgctgtgggccctgctcttcatgcagagcctgtggccccagctgacagatggagccaccagggtgtactacctgggcatcagagatgtgcagtggaactatgcccccaagggcagaaatgtcatcaccaaccagcccctggacagcgacatcgtggccagcagcttcctgaagagtgacaagaacagaattggaggcacctacaagaagaccatctacaaggagtacaaggatgacagctacacagatgaggtggcccagcctgcctggctgggcttcctgggccctgtgctgcaggccgaggtgggagatgtgatcctgatccacctgaagaactttgccacccggccctacaccatccacccccacggcgtcttctatgagaaggacagcgagggcagcctgtacccagatggcagcagcggccccctgaaggcagatgacagcgtgcccccaggcggcagccacatctacaactggaccatccctgagggccacgcccccacagatgctgaccctgcctgcctgacctggatctaccacagccacgtggatgccccccgggacatcgccaccggcctcatcggccccctcatcacctgcaagagaggagccctggatggcaacagccccccccagaggcaggatgtggaccatgacttcttcctgctcttctctgtggtggatgagaacctgtcctggcacctgaatgaaaatattgccacctactgcagcgaccctgcctctgtggacaaggaggatgagaccttccaggagagcaacaggatgcacgccatcaatggatttgtgtttggaaacctgcctgagctgaacatgtgtgcccagaagagggtggcctggcacctgtttggcatgggaaatgaaattgatgtgcacacagccttcttccacggccagatgctgaccacccggggccaccacacagatgtggccaacatcttccctgccacctttgtgacagctgagatggtgccctgggagcccggcacctggctgatcagctgccaggtgaacagccacttcagagatggcatgcaggccctgtacaaggtgaagagctgcagcatggcccctcctgtggacctgctgaccgggaaggtgcggcagtacttcatcgaggcccacgagatccagtgggactatggccccatgggccatgatggcagcacaggcaagaacctgcgggagcccggcagcatcagtgacaagttcttccagaagagcagcagccgcatcggcggcacctactggaaggtgcgctatgaggccttccaggatgagaccttccaggagaagatgcacctggaggaggacagacacctgggcatcctgggccctgtgatccgggcagaggtgggggacaccatccaggtggtgttctacaacagagccagccagcccttctccatgcagccccatggagtcttctatgagaaggactatgagggcaccgtgtacaatgatggcagcagctacccaggcctggtggccaagccctttgagaaggtgacctaccgctggacagtgccccctcatgctggccccacagcccaggaccctgcctgcctgacctggatgtacttctctgctgctgaccccatccgggacaccaacagcggcctggtgggccccctgctggtgtgccgggccggggccctgggcgcagatggcaagcagaagggcgtggacaaggagttcttcctgctcttcaccgtgctggatgagaacaagtcctggtacagcaatgccaaccaggccgccgccatgctggacttccggctgctgtctgaagatattgagggcttccaggacagcaacaggatgcacgccatcaatggcttcctgttcagcaacctgccccggctggacatgtgcaagggggacacagtggcctggcacctgctgggcctgggcacagaaacagatgtgcacggcgtgatgttccagggcaacacagtgcagctgcagggcatgaggaagggggccgccatgctgttcccccacacctttgtgatggccatcatgcagcctgacaacctgggcacctttgagatctactgccaggccggcagccaccgggaggccggcatgagggccatctacaacgtgtcccagtgccccggccaccaggccaccccccggcagcgctaccaggccgcccgcatctactacatcatggccgaggaggtggagtgggactactgcccagaccgctcctgggagcgggagtggcacaaccagagcgagaaggacagctatggctacatcttcctgagcaacaaggatggcctgctgggcagccgctacaagaaggctgtgttccgggagtacacagatggcaccttccgcatcccccggcccaggactggacctgaggagcacctgggcatcctgggccccctcatcaagggggaggtgggggacatcctgactgtggtgttcaagaacaatgccagccggccctacagcgtgcacgcccatggagtgctggagagcaccaccgtgtggcccctggccgctgagcccggggaggtggtgacctaccagtggaacatccctgagaggagcggccctggccccaatgattctgcctgtgtgtcctggatctactacagcgctgtggaccccatcaaggacatgtacagcggcctggtgggccccctggccatctgccagaagggcatcctggagccccatggaggccgcagtgacatggaccgggagtttgccctgctcttcctgatctttgatgagaacaagtcctggtacctggaggagaatgtggccacccacggcagccaggaccccggcagcatcaacctgcaggatgagaccttcctggagagcaacaagatgcacgccatcaacgggaagctgtatgccaacctgcggggcctgaccatgtaccagggcgagcgggtggcctggtacatgctggccatgggccaggatgtggacctgcacaccatccacttccacgccgagagcttcctgtacagaaatggagagaactacagagcagatgtggtggacctcttccctggcacctttgaggtggtggagatggtggccagcaaccctggcacctggctgatgcactgccacgtgacagaccacgtgcacgccggcatggagaccctcttcaccgtcttcagcaggacagagcacctgagccccctgaccgtcatcaccaaggagacagagaaggctgtgcccccccgggacatcgaggagggcaatgtgaagatgctgggcatgcagatccccatcaagaatgtggagatgctggcctctgtgctggtggccatctctgtgaccctgctgctggtggtgctggccctgggcggcgtggtgtggtaccagcaccggcagaggaagctgcggaggaacagaagaagcatcctggatgacagcttcaagctgctgtccttcaagcagtag

SEQ ID NO: 296329 - DNA, 3486 bp, Artificial Sequence
  derived and/or modified sequence
atgtgggccatggagagcggccacctgctgtgggccctgctcttcatgcagagcctgtggccccagctgacagatggagccaccagggtgtactacctgggcatcagagatgtgcagtggaactatgcccccaagggcagaaatgtcatcaccaaccagcccctggacagcgacatcgtggccagcagcttcctgaagagtgacaagaaccgcatcggcggcacctacaagaagaccatctacaaggagtacaaggatgacagctacacagatgaggtggcccagcctgcctggctgggcttcctgggccctgtgctgcaggccgaggtgggagatgtgatcctgatccacctgaagaactttgccacccggccctacaccatccacccccatggagtcttctatgagaaggacagcgagggcagcctgtacccagatggcagcagcggccccctgaaggcagatgattctgtgcccccaggcggcagccacatctacaactggaccatccctgagggccacgcccccacagatgctgaccctgcctgcctgacctggatctaccacagccacgtggatgccccccgggacatcgccaccggcctgattggccccctcatcacctgcaagagaggagccctggatggcaacagccccccccagaggcaggatgtggaccatgacttcttcctgctcttctctgtggtggatgagaacctgtcctggcacctgaatgaaaacatcgccacctactgcagcgaccctgcctctgtggacaaggaggatgagaccttccaggagagcaacaggatgcacgccatcaatggatttgtgtttggaaacctgcctgagctgaacatgtgtgcccagaagagggtggcctggcacctgtttggcatgggaaatgaaattgatgtgcacacagccttcttccacggccagatgctgaccacccggggccaccacacagatgtggccaacatcttccctgccacctttgtgacagctgagatggtgccctgggagcccggcacctggctgatcagctgccaggtgaacagccacttcagagatggcatgcaggccctgtacaaggtgaagagctgcagcatggcccctcctgtggacctgctgaccgggaaggtgcggcagtacttcatcgaggcccacgagatccagtgggactatggccccatgggccatgatggcagcacaggcaagaacctgcgggagcccggcagcatcagtgacaagttcttccagaagagcagcagcagaattggaggcacctactggaaggtgcgctatgaggccttccaggatgagaccttccaggagaagatgcacctggaggaggacagacacctgggcatcctgggccctgtgatccgggcagaggtgggggacaccatccaggtggtgttctacaacagagccagccagcccttctccatgcagccccacggcgtcttctatgagaaggactatgagggcaccgtgtacaatgatggcagcagctacccaggcctggtggccaagccctttgagaaggtgacctaccgctggacagtgccccctcatgctggccccacagcccaggaccctgcctgcctgacctggatgtacttctctgctgctgaccccatccgggacaccaacagcggcctggtgggccccctgctggtgtgcagagctggggccctgggcgcagatggcaagcagaagggcgtggacaaggagttcttcctgctcttcaccgtgctggatgagaacaagtcctggtacagcaatgccaaccaggccgccgccatgctggacttccggctgctgtctgaggacatcgagggcttccaggacagcaacaggatgcacgccatcaatggcttcctgttcagcaacctgccccggctggacatgtgcaagggggacacagtggcctggcacctgctgggcctgggcacagaaacagatgtgcatggagtgatgttccagggcaacacagtgcagctgcagggcatgaggaaaggagctgccatgctgttcccccacacctttgtgatggccatcatgcagcctgacaacctgggcacctttgagatctactgccaggccggcagccaccgggaggccggcatgagggccatctacaacgtgtcccagtgccccggccaccaggccaccccccggcagcgctaccaggccgcccgcatctactacatcatggccgaggaggtggagtgggactactgcccagaccgctcctgggagcgggagtggcacaaccagagcgagaaggacagctatggctacatcttcctgagcaacaaggatggcctgctgggcagccgctacaagaaggctgtgttccgggagtacacagatggcaccttccgcatcccccggcccaggacaggccctgaggagcacctgggcatcctgggccccctcatcaagggggaggtgggggacatcctgactgtggtgttcaagaacaatgccagccggccctacagcgtgcacgcccacggcgtgctggagagcaccaccgtgtggcccctggccgctgagcctggagaggtggtgacctaccagtggaacatccctgagaggagcggccctggccccaatgacagcgcctgtgtgtcctggatctactacagcgctgtggaccccatcaaggacatgtacagcggcctggtgggccccctggccatctgccagaagggcatcctggagccccacggcggccgcagtgacatggaccgggagtttgccctgctcttcctgatctttgatgagaacaagtcctggtacctggaggagaatgtggccacccacggcagccaggaccccggcagcatcaacctgcaggatgagaccttcctggagagcaacaagatgcacgccatcaatggcaagctgtatgccaacctgcggggcctgaccatgtaccagggcgagcgggtggcctggtacatgctggccatgggccaggatgtggacctgcacaccatccacttccacgccgagagcttcctgtacagaaatggagagaactacagagcagatgtggtggacctcttccctggcacctttgaggtggtggagatggtggccagcaaccctggcacctggctgatgcactgccacgtgacagaccacgtgcatgctggcatggagaccctcttcaccgtcttcagcaggacagagcacctgagccccctgaccgtcatcaccaaggagacagagaaggctgtgcccccccgggacatcgaggagggcaatgtgaagatgctgggcatgcagatccccatcaagaatgtggagatgctggcctctgtgctggtggccatctctgtgaccctgctgctggtggtgctggccctgggcggcgtggtgtggtaccagcaccggcagaggaagctgcggaggaacagaagaagcatcctggatgacagcttcaagctgctgtccttcaagcagtag

SEQ ID NO: 296330 - DNA, 3477 bp, Artificial Sequence
  derived and/or modified sequence
atggagagcggccacctgctgtgggccctgctgttcatgcagagcctctggccccaactcactgacggcgcaactagagtgtattacctgggaatccgggatgtccagtggaattacgccccaaaagggaggaatgtgatcacaaaccaaccgttagatagcgacattgtggccagcagctttttaaaatccgacaaaaacagaatcgggggcacatacaagaagacaatctacaaagagtacaaagacgactcctacacagatgaggtggctcagcccgcctggctcgggttcctcggccctgttctccaagccgaggtcggtgatgtgatcctgatccatctgaaaaactttgcaacccgcccatatactattcatccacacggagttttttacgagaaggactcagagggctctttatacccagacgggtccagcggccctcttaaagcagatgactctgtgcctcccggcgggtcacatatctacaactggacgattccagagggccacgcccccacagatgctgatcctgcttgcctgacctggatctaccactcccacgtcgatgcacctagagacattgctaccggactgatcggacctctgatcacctgcaagaggggtgctctagacgggaattctcctccgcagcggcaggatgtggaccatgactttttcttgctgttctcagtcgtggatgagaatctgtcttggcacctgaatgaaaatatcgcaacctattgctccgatcccgctagtgtggacaaggaagacgaaactttccaagagtcaaatcgcatgcatgctataaatggctttgtgtttggcaatctgccagaacttaatatgtgcgcccagaagcgcgtcgcttggcacctgttcggaatgggaaatgagatcgacgttcatacggctttcttccacgggcaaatgctgactacccgtgggcaccataccgatgtggccaacatattcccggcgactttcgtgactgccgagatggtgccctgggagcccggcacttggttaatctcatgtcaggtaaacagccatttccgagatggaatgcaagctctttacaaagtgaaaagctgttccatggccccccctgtcgacctgttgactgggaaagtcaggcagtactttatcgaagcacacgagatccaatgggactatggtcctatggggcatgatggatctacagggaagaatttgcgggaacctggcagcattagtgataagtttttccagaaatccagctccagaatcggaggaacttactggaaagtgaggtacgaagcttttcaggacgagacgttccaggagaaaatgcacctcgaggaggaccgccacctgggaatcttgggtcctgtgatccgggccgaggtaggagacactatacaggtggttttctacaatcgcgcctctcaaccattctccatgcagccccacggagtgttttatgagaaggattacgagggtacagtgtataatgatgggagctcctatcctggtctcgtggccaagccgtttgaaaaagtgacctacaggtggacagtgcccccccacgctggcccaacagcccaggatccagcatgtcttacctggatgtacttttctgcagccgacccgatccgggacacgaacagtggcctggttggccccctcttagtgtgtagggctggagctctgggcgccgacggaaagcagaaaggagtggataaagagtttttcctgctgttcaccgtcctcgatgaaaacaaatcttggtacagcaacgccaaccaggccgctgcaatgttggacttccgcttgctttccgaggatattgaaggattccaggatagcaatcggatgcacgctatcaatggatttctcttctcaaacttgcctcggctagatatgtgcaagggggatacagtggcttggcacttattaggcttaggcaccgagacagacgtccacggtgtgatgtttcagggtaatacagtgcaattacagggcatgcggaaaggcgcagctatgctgtttccgcatacttttgttatggcaattatgcaaccagacaacctggggactttcgaaatttattgtcaggctggctctcatcgggaggccggcatgcgcgccatttacaacgtttcccagtgccctggacaccaggcaacccctcggcagaggtatcaagccgctagaatttactacatcatggctgaggaagtggaatgggactattgtcctgatagatcctgggaaagagagtggcacaaccagtcagaaaaagattcttatggctacatcttcctttccaataaagacgggctattgggctcaaggtacaaaaaggccgtgttccgtgaatatacagacggcacatttagaattcctagacccagaactggaccggaagagcacctgggtattctcggccctctgatcaaaggcgaggtgggggatattctcaccgtagtattcaaaaataatgcctcacgcccttatagtgtgcacgctcacggcgtcctcgagtccacaacagtctggcccctagcagctgagcccggcgaagtggttacgtatcagtggaacatcccagaacggtccggcccaggacctaacgatagcgcttgtgtctcgtggatctactacagtgcagtcgatcccattaaggacatgtacagcggcctagtaggcccccttgctatatgccagaaaggaatcctcgagccccacgggggacgcagtgatatggacagagagttcgccctgctcttcctgatctttgatgaaaacaaatcatggtacctcgaggagaacgtggccacacacggttcgcaggatccaggatctattaacctccaagacgagacctttttagaatccaacaagatgcacgccatcaacggtaagctgtatgctaacttacgaggccttacaatgtaccaaggagagcgggttgcatggtacatgctcgcaatgggacaggacgtggacttacatactattcactttcacgccgaatcctttttatacagaaatggcgagaattaccgggctgacgtcgtcgacctattccctggaacatttgaggtagtggaaatggtcgcttccaatcctggcacgtggctgatgcactgccacgtgaccgaccatgtgcatgccggcatggagaccctctttacagtcttctctcgtacagagcatctgagtcctctcaccgtaatcaccaaagaaaccgaaaaggcggttcctccacgggacatagaggaaggtaatgttaaaatgctgggcatgcaaatccccataaaaaatgtcgaaatgcttgcgtcagtcttggttgctatttcagtgacgttactgctcgtggtcctcgccctgggcggagtggtatggtaccagcaccgacagcggaagcttcgaagaaaccgcaggagcattctggatgacagcttcaaactgctctccttcaaacagtag

SEQ ID NO: 296331 - DNA, 3486 bp, Artificial Sequence
  derived and/or modified sequence
atgtgggccatggagagcggccacctgctgtgggccctgctgttcatgcaaagcctttggccacagcttacagatggtgccacccgcgtgtactacttggggattcgcgacgtccagtggaactatgctcccaagggtagaaatgttattactaatcagccgctggactcggatattgtagctagcagtttcctcaagtctgataaaaaccgcataggcggtacatacaagaaaacaatctataaggagtataaggacgactcatataccgacgaggttgcccagcccgcctggttgggcttcctcggacctgtgctgcaggccgaagtaggagatgtgatccttatccatctcaagaatttcgcaacccgaccatatacaatccacccccatggagtcttttatgagaaggatagcgagggcagcttgtatcccgatggcagttccgggcccctgaaggccgatgactcagtgccaccaggtggcagccacatttacaactggactatccccgaagggcatgctccaacagacgcagatcccgcctgtctcacatggatttatcacagccacgtggacgctccaagggatattgccaccggactgatcggacccctgatcacatgcaagcggggcgcattggacggcaacagcccccctcagcggcaggatgtggatcacgatttcttcctcctattttccgtggtcgatgagaacctgtcctggcatctgaacgaaaatatcgccacatactgctccgaccccgcatccgtggataaggaggacgagacattccaagagtccaatagaatgcacgcaattaacggattcgtgtttggcaacctgccggaattgaacatgtgtgcgcagaagcgagtagcatggcatctgtttggcatggggaacgaaatcgatgtccatactgccttctttcatggacagatgctgacaacccgcggccaccacaccgatgtcgcaaacatattcccagcaaccttcgtgacagcagaaatggtgccatgggaaccagggacgtggttgattagttgccaggtaaattctcatttccgggacggcatgcaggctctttataaggtcaagtcttgtagcatggctcccccagtggatctgcttaccggaaaagtgcgccaatacttcatcgaggcacacgagatccagtgggactacggaccaatgggccatgacgggtccactgggaagaatttaagagaaccgggtagtataagcgacaaattttttcagaaaagcagtagcaggatcggaggaacctattggaaagtgcggtatgaggcctttcaggatgaaacttttcaagaaaagatgcaccttgaggaggacaggcaccttgggattctcggcccagtcatcagggctgaagtcggcgacacaatccaggtggttttttacaacagagcgtcgcagccctttagcatgcagcctcacggggtgttctatgagaaagactatgaaggcactgtgtataatgatggatcctcgtaccccggccttgtggcaaaaccattcgagaaagtgacctaccgttggacagttcctccacatgccggccccaccgcccaggatcctgcttgcctgacatggatgtacttctccgccgctgatcctattcgggacacaaactccgggctggtgggtcccttgctggtctgtcgcgcaggagccctgggtgccgacggcaagcaaaaaggcgttgacaaggagttcttcctgctgttcacagtacttgatgaaaataaatcctggtattcgaacgcaaaccaggctgccgcgatgctagacttccggctgctctctgaagacatcgaggggttccaggattccaatagaatgcacgccatcaatggatttttgttctctaacctgccaaggctggatatgtgcaagggtgacactgtggcttggcacctgctggggctggggaccgaaaccgatgtccacggggtgatgttccaggggaataccgtccaactgcaaggaatgcgaaaaggagccgcgatgctctttccacacacttttgtaatggctatcatgcagccagataaccttggcaccttcgagatttattgccaggccggttctcacagagaagcgggaatgcgcgcaatctacaatgttagccagtgcccagggcatcaggccacccctaggcaaaggtaccaggcagcgcgcatttactatatcatggctgaagaagtggaatgggattactgtcctgataggagctgggaaagggaatggcataaccagagcgagaaagactcctatggatatatttttttgtctaacaaggacggcctgctggggtccagatacaagaaggccgtattcagagagtacacggacggcacctttagaattcctcgaccaaggacaggcccagaggaacatctgggaatccttggacctctgattaaaggcgaggtgggcgacatactcactgtagtgttcaaaaataatgcttctcgtccctattcagtgcacgcccatggggtgctcgagtctacaactgtgtggcccctagccgcagagcctggggaggttgttacttatcagtggaatatcccggaacgcagcggcccagggcctaatgattccgcgtgtgttagttggatttattactctgccgttgatccaatcaaggatatgtattcagggctggtgggtcccttggccatctgccaaaaagggatcctggagccgcacggcggtcggtcagacatggatagagaattcgcacttttattccttatatttgatgagaacaagtcatggtatctggaagaaaatgttgccacccacggttcacaggatcctggctcaataaacttgcaggacgaaacctttctggagagtaataaaatgcacgctatcaatggcaagttatacgccaacctgaggggacttacaatgtaccagggagaaagggtggcatggtacatgctggcgatgggacaggatgtcgacctgcatactatccacttccacgccgagtcctttctgtatcgcaatggcgagaattatagagcggacgtggtcgatcttttcccaggcaccttcgaagtggtggaaatggtggccagcaatcccgggacatggttgatgcattgtcatgtaacagaccatgtgcacgcagggatggaaactctgtttacagttttctcccgaactgaacacctctcccccctcactgtcattaccaaggagactgaaaaagctgtgccaccaagagacattgaggaaggtaacgtcaaaatgctgggcatgcagattccgataaagaatgttgaaatgctggcatcagtccttgtggccatctcagtcacgttactcctggtagtcctcgctctcgggggtgtggtgtggtaccagcacagacagcgtaagcttagaagaaacaggcgttctatcctagatgattccttcaagctattgtccttcaagcagtag

SEQ ID NO: 296332 - DNA, 3477 bp, Artificial Sequence
  derived and/or modified sequence
atggagtctggacacctcctgtgggcattgttattcatgcaatccctttggcctcagttgacagatggcgcaacgcgagtttactatttgggcatcagggatgtgcagtggaactacgcacctaaaggcaggaatgttatcaccaaccagccattggacagcgatattgtcgcatcaagcttcttgaaaagcgacaaaaaccgaatcggcggtacctacaaaaagacaatatacaaagagtataaggacgactcctataccgacgaggtcgcccaacctgcctggctggggttcttgggtcctgtattacaggccgaggtgggggacgtgattctgatacacctgaaaaactttgcgacccgtccctacacgattcatccgcacggagtgttttatgagaaagattccgagggatcactgtatcctgatggctccagtgggcctttaaaagctgacgacagcgtaccgccaggcggatcgcatatctataactggaccatccccgagggacacgcccctactgacgcagatccagcttgcctcacttggatctatcactcccatgtagacgcgccaagggatattgctactggtctgattggcccactgattacgtgcaagcgcggagctctcgatgggaattcacctcctcagcggcaggatgttgaccacgacttcttcctgctcttttctgtggtcgatgaaaaccttagctggcacctgaatgaaaatatagccacctactgctccgaccccgctagtgtggataaggaggacgaaacttttcaggagtctaataggatgcacgccataaatggattcgtgttcgggaacttgccagaactcaatatgtgcgctcagaaacgcgtcgcatggcacctgttcggaatgggtaacgaaattgacgtgcacacggccttcttccatggccagatgctgaccacgcggggtcatcatacggatgtagcgaacatctttccggctaccttcgtgactgccgaaatggtcccctgggagccaggaacttggctgatctcatgtcaggttaactcccatttccgcgatgggatgcaggccctgtataaggtaaagtcatgctccatggcgcctcccgtagacctgttgaccggaaaagtcagacagtactttattgaagcacatgaaatccaatgggattacggtccaatgggccatgacgggtcaaccggtaagaacctaagagaacctgggtccatttccgataagttcttccagaagagcagcagccggattggaggtacatactggaaggtgcgatacgaggcattccaggatgaaacgtttcaggagaaaatgcatctggaggaagacaggcatctcgggatcctagggccagtgataagagccgaggttggggatactatacaggtagtgttttacaaccgagcttcccagccattttccatgcaaccccacggcgtattctacgagaaggactatgaaggcacggtgtataatgacggttctagttatcctggactggttgctaagccgtttgagaaagtgacataccggtggacggtgccccctcatgcaggcccaaccgcgcaggaccctgcctgcctgacttggatgtacttcagcgcagctgaccccatcagagacactaactccgggttggtgggaccactccttgtgtgccgtgccggagctttgggcgctgacggcaagcagaagggagtggacaaggagttcttcctgttgttcacagtgctcgacgagaacaagtcatggtatagcaatgcaaaccaggctgccgcaatgctggacttccgcctgctatccgaagacattgagggctttcaggattccaacagaatgcacgctatcaacgggttcctcttttcaaacctaccccgattagacatgtgcaagggcgatacagtggcttggcacctgctaggtctagggacagagaccgacgtgcacggggtgatgtttcagggaaataccgtgcagcttcaaggcatgaggaaaggagcagccatgctcttcccgcacacatttgtcatggcaattatgcagcctgacaatctcgggacgttcgagatatactgccaagccggatcccaccgcgaggcaggcatgagagcgatctacaacgtgtctcagtgcccaggtcaccaggctacgcctcggcagaggtaccaggccgcacgaatctattacataatggcagaggaagtcgagtgggattattgccccgacaggagctgggagcgggagtggcataaccagagtgaaaaggatagttacgggtacatctttctgtccaataaggacgggttattgggatctcgctacaagaaagctgtgtttagagaatatacggacggaactttccgcatacccagaccccgaaccggacctgaagaacacctgggcattcttggaccattgatcaaaggggaggtgggagatattctgaccgttgtgttcaagaataatgcatcccgaccttattccgtacatgcccatggcgtattagagtctacaactgtatggcctctggccgcagaaccgggagaggtcgtgacttaccaatggaacatacctgagaggtcaggtcctggcccaaacgatagcgcttgcgttagttggatctattatagcgctgtggatccaattaaagatatgtacagcgggctggtgggcccattagctatttgtcagaaggggattttggagccgcatggcggacgatccgacatggaccgcgaattcgcattgctttttttgattttcgacgagaataaatcgtggtacctggaagaaaacgtggcaacacatggctcgcaggatcccggatcaatcaatcttcaagacgaaaccttcctggagagcaataagatgcacgcgattaacgggaaattgtatgctaacctccgcggtctgactatgtaccaaggggaacgggtggcctggtacatgctcgccatggggcaggatgtggatctccacaccatccattttcatgctgagagcttcttatatcgcaacggagagaactacagagccgatgttgtcgacctttttccgggaactttcgaggtggttgagatggttgcgagcaatcccggaacttggttgatgcactgtcatgtgacggatcatgtgcatgcaggaatggagacactgtttaccgtatttagtcgaaccgagcatctctcgccgctaaccgtcataaccaaggagacagagaaagcagtgccaccaagagatatcgaggagggaaacgtgaagatgctgggaatgcagattcccataaaaaatgtggaaatgctggctagtgtactagttgctatctcagtgacgctcctcctggtagtattggcactgggcggagtagtatggtatcagcataggcaaaggaaattacgccgaaacagacgcagtatccttgacgactcttttaaattgctaagtttcaagcaatag

SEQ ID NO: 296333 - DNA, 3486 bp, Artificial Sequence
  derived and/or modified sequence
atgtgggccatggagagcggacacctgctttgggcgctacttttcatgcagtccctctggccccaactgacagacggagcgacaagggtgtattatttgggcatacgggatgtgcagtggaactacgcaccaaagggacgcaacgtgattaccaaccagcctttagatagcgacatagtggcctctagcttcctcaaaagcgataagaataggattgggggtacttacaagaaaactatctacaaagagtacaaggacgacagctatacagatgaagtggctcaaccggcttggttagggttcttggggcctgtgttgcaggccgaggttggggatgtaattcttatacacttaaagaatttcgccacaaggccttacaccatccacccccatggggtgttttacgagaaagactctgaaggtagcctttaccccgacggatcctcaggacctctcaaggcagacgattctgtgccacccggagggtcacacatttacaattggaccatcccagaggggcatgcacccactgatgccgatccggcttgcctgacctggatctaccactctcatgtagatgcaccgagggacattgctacgggcctgatcggaccactgataacttgtaagcgcggtgctctggacgggaacagcccgccacagcgccaggacgtggaccatgatttcttcctgctgttttcagtggtggatgaaaatctttcctggcatctcaacgagaacatcgcaacctactgcagtgaccccgcttcagtggataaagaggacgaaaccttccaggaatccaacaggatgcatgccataaacgggttcgtattcggaaatctgcccgagctgaatatgtgcgcccaaaagcgagttgcttggcatctattcggaatgggcaatgaaatcgacgtacataccgccttctttcatggccagatgctgaccaccagggggcatcacaccgatgtcgccaatatctttccggcaacctttgtaacggccgaaatggttccctgggaacccggaacgtggttgatctcatgccaggtgaattctcacttcagagacggcatgcaggccctttacaaggtcaaatcgtgttctatggccccacctgtggacctgcttaccgggaaagtgcgtcagtactttatagaagctcatgagattcagtgggactacggacctatggggcatgatggatcaacgggaaaaaatctgcgtgagcccggatccattagcgacaagttcttccagaaatccagctcaaggatcggagggacttactggaaagtgcggtacgaggcgttccaagacgaaacattccaggaaaagatgcatctagaggaagatcgacacctagggatcctgggccctgttattcgggcagaagtaggcgatactattcaggtggtgttttataaccgagccagtcagccttttagcatgcagccacatggggtgttttacgagaaagactacgaagggacagtgtataatgatggctcctcctatccaggactggtggctaagccatttgaaaaggtgacctatcggtggacagttcctccccatgccggacccactgcccaggaccccgcttgtctcacctggatgtacttcagtgccgctgacccaattagagacacaaacagtggactcgtaggccctctgctcgtgtgcagggcgggagctctcggcgcagatggcaagcagaagggtgtcgataaggagttttttctacttttcactgtactggacgagaataaatcttggtattccaatgcaaaccaggccgcagcaatgctggacttccggctgctgtctgaggacattgaaggcttccaggactccaatcggatgcacgctattaacggattcttattcagcaacttgcccaggctcgatatgtgcaaaggtgataccgtggcctggcaccttctaggtctgggaacagaaaccgacgtgcatggagtgatgtttcaagggaacacagtccagctccagggaatgaggaagggcgcagctatgctgtttccacacacctttgtgatggcaataatgcaacccgacaacttgggtacattcgagatatactgccaggcaggatcccacagagaagctgggatgagggctatctataatgtgtctcagtgccctgggcaccaggctaccccgagacagaggtatcaggccgctagaatctactacatcatggccgaagaggtggaatgggactattgtccagacaggagctgggagcgtgaatggcacaatcagagtgagaaagattcctacggctacatcttcctatctaataaagatggcttgctgggaagtcgttataaaaaggccgtgttccgcgagtataccgacggcaccttccggatccctcgtcccaggacaggcccagaggagcacctgggaatcctagggcctctcattaaaggagaggtgggcgatatccttactgtcgtgtttaagaacaacgcgtccagaccttattctgtccatgcccacggcgttctggagagtacaacagtgtggccactggcggcagaacccggtgaggtcgttacataccagtggaacatcccagagcgttccggtcctggacccaatgattccgcatgcgtgagttggatatattattcagccgtagaccccataaaggacatgtattccggactagtcggccctctggccatctgtcagaaagggatcctggagcctcacgggggtagatccgatatggatagggaatttgctttgctcttccttatctttgatgagaacaagtcatggtatctggaagaaaatgtggcaacacacgggagtcaggatcctggctccatcaacctgcaggacgagacgtttctggaaagtaataagatgcacgctatcaacggaaagctttatgcgaacctgcgtgggctgaccatgtatcagggtgaaagggtggcgtggtatatgctggcgatgggtcaggatgtcgatttgcacacaattcacttccatgccgagagctttctgtataggaatggagagaattatcgcgcagacgtcgtggacctttttcccggtacctttgaggttgtcgaaatggtggcctcaaaccccggtacatggttgatgcattgccacgtgacagaccacgttcatgccggtatggagaccttgttcacggtgttcagtaggaccgagcatctctccccgctgaccgtgattactaaagagactgagaaggccgtgccacctcgtgatatcgaggaagggaacgtgaagatgttagggatgcagattccgattaagaatgttgaaatgctggcatcagtcctggtagcgatctccgtgacgctgttactggtcgtcctcgccctcggcggtgtggtgtggtatcagcataggcaacgtaagctcagaaggaatcgccgtagcattcttgacgattcttttaaactgctcagtttcaagcagtag

SEQ ID NO: 296334 - DNA, 3477 bp, Artificial Sequence
  derived and/or modified sequence
atggagagcggccacctgctgtgggccctgctgttcatgcagagcctgtggccccagctgaccgacggcgccaccagagtgtactacctgggcatcagagacgtgcagtggaactacgcccccaagggcagaaacgtgatcaccaaccagcccctggacagcgacatcgtggccagcagcttcctgaagagcgacaagaacagaatcggcggcacctacaagaagaccatctacaaggagtacaaggacgacagctacaccgacgaggtggcccagcccgcctggctgggcttcctgggccccgtgctgcaggccgaggtgggcgacgtgatcctgatccacctgaagaacttcgccaccagaccctacaccatccacccccacggcgtgttctacgagaaggacagcgagggcagcctgtaccccgacggcagcagcggccccctgaaggccgacgacagcgtgccccccggcggcagccacatctacaactggaccatccccgagggccacgcccccaccgacgccgaccccgcctgcctgacctggatctaccacagccacgtggacgcccccagagacatcgccaccggcctgatcggccccctgatcacctgcaagagaggcgccctggacggcaacagccccccccagagacaggacgtggaccacgacttcttcctgctgttcagcgtggtggacgagaacctgagctggcacctgaacgagaacatcgccacctactgcagcgaccccgccagcgtggacaaggaggacgagaccttccaggagagcaacagaatgcacgccatcaacggcttcgtgttcggcaacctgcccgagctgaacatgtgcgcccagaagagagtggcctggcacctgttcggcatgggcaacgagatcgacgtgcacaccgccttcttccacggccagatgctgaccaccagaggccaccacaccgacgtggccaacatcttccccgccaccttcgtgaccgccgagatggtgccctgggagcccggcacctggctgatcagctgccaggtgaacagccacttcagagacggcatgcaggccctgtacaaggtgaagagctgcagcatggccccccccgtggacctgctgaccggcaaggtgagacagtacttcatcgaggcccacgagatccagtgggactacggccccatgggccacgacggcagcaccggcaagaacctgagagagcccggcagcatcagcgacaagttcttccagaagagcagcagcagaatcggcggcacctactggaaggtgagatacgaggccttccaggacgagaccttccaggagaagatgcacctggaggaggacagacacctgggcatcctgggccccgtgatcagagccgaggtgggcgacaccatccaggtggtgttctacaacagagccagccagcccttcagcatgcagccccacggcgtgttctacgagaaggactacgagggcaccgtgtacaacgacggcagcagctaccccggcctggtggccaagcccttcgagaaggtgacctacagatggaccgtgcccccccacgccggccccaccgcccaggaccccgcctgcctgacctggatgtacttcagcgccgccgaccccatcagagacaccaacagcggcctggtgggccccctgctggtgtgcagagccggcgccctgggcgccgacggcaagcagaagggcgtggacaaggagttcttcctgctgttcaccgtgctggacgagaacaagagctggtacagcaacgccaaccaggccgccgccatgctggacttcagactgctgagcgaggacatcgagggcttccaggacagcaacagaatgcacgccatcaacggcttcctgttcagcaacctgcccagactggacatgtgcaagggcgacaccgtggcctggcacctgctgggcctgggcaccgagaccgacgtgcacggcgtgatgttccagggcaacaccgtgcagctgcagggcatgagaaagggcgccgccatgctgttcccccacaccttcgtgatggccatcatgcagcccgacaacctgggcaccttcgagatctactgccaggccggcagccacagagaggccggcatgagagccatctacaacgtgagccagtgccccggccaccaggccacccccagacagagataccaggccgccagaatctactacatcatggccgaggaggtggagtgggactactgccccgacagaagctgggagagagagtggcacaaccagagcgagaaggacagctacggctacatcttcctgagcaacaaggacggcctgctgggcagcagatacaagaaggccgtgttcagagagtacaccgacggcaccttcagaatccccagacccagaaccggccccgaggagcacctgggcatcctgggccccctgatcaagggcgaggtgggcgacatcctgaccgtggtgttcaagaacaacgccagcagaccctacagcgtgcacgcccacggcgtgctggagagcaccaccgtgtggcccctggccgccgagcccggcgaggtggtgacctaccagtggaacatccccgagagaagcggccccggccccaacgacagcgcctgcgtgagctggatctactacagcgccgtggaccccatcaaggacatgtacagcggcctggtgggccccctggccatctgccagaagggcatcctggagccccacggcggcagaagcgacatggacagagagttcgccctgctgttcctgatcttcgacgagaacaagagctggtacctggaggagaacgtggccacccacggcagccaggaccccggcagcatcaacctgcaggacgagaccttcctggagagcaacaagatgcacgccatcaacggcaagctgtacgccaacctgagaggcctgaccatgtaccagggcgagagagtggcctggtacatgctggccatgggccaggacgtggacctgcacaccatccacttccacgccgagagcttcctgtacagaaacggcgagaactacagagccgacgtggtggacctgttccccggcaccttcgaggtggtggagatggtggccagcaaccccggcacctggctgatgcactgccacgtgaccgaccacgtgcacgccggcatggagaccctgttcaccgtgttcagcagaaccgagcacctgagccccctgaccgtgatcaccaaggagaccgagaaggccgtgccccccagagacatcgaggagggcaacgtgaagatgctgggcatgcagatccccatcaagaacgtggagatgctggccagcgtgctggtggccatcagcgtgaccctgctgctggtggtgctggccctgggcggcgtggtgtggtaccagcacagacagagaaagctgagaagaaacagaagaagcatcctggacgacagcttcaagctgctgagcttcaagcagtag

SEQ ID NO: 296335 - DNA, 3486 bp, Artificial Sequence
  derived and/or modified sequence
atgtgggccatggagagcggccacctgctgtgggccctgctgttcatgcagagcctgtggccccagctgaccgacggcgccaccagagtgtactacctgggcatcagagacgtgcagtggaactacgcccccaagggcagaaacgtgatcaccaaccagcccctggacagcgacatcgtggccagcagcttcctgaagagcgacaagaacagaatcggcggcacctacaagaagaccatctacaaggagtacaaggacgacagctacaccgacgaggtggcccagcccgcctggctgggcttcctgggccccgtgctgcaggccgaggtgggcgacgtgatcctgatccacctgaagaacttcgccaccagaccctacaccatccacccccacggcgtgttctacgagaaggacagcgagggcagcctgtaccccgacggcagcagcggccccctgaaggccgacgacagcgtgccccccggcggcagccacatctacaactggaccatccccgagggccacgcccccaccgacgccgaccccgcctgcctgacctggatctaccacagccacgtggacgcccccagagacatcgccaccggcctgatcggccccctgatcacctgcaagagaggcgccctggacggcaacagccccccccagagacaggacgtggaccacgacttcttcctgctgttcagcgtggtggacgagaacctgagctggcacctgaacgagaacatcgccacctactgcagcgaccccgccagcgtggacaaggaggacgagaccttccaggagagcaacagaatgcacgccatcaacggcttcgtgttcggcaacctgcccgagctgaacatgtgcgcccagaagagagtggcctggcacctgttcggcatgggcaacgagatcgacgtgcacaccgccttcttccacggccagatgctgaccaccagaggccaccacaccgacgtggccaacatcttccccgccaccttcgtgaccgccgagatggtgccctgggagcccggcacctggctgatcagctgccaggtgaacagccacttcagagacggcatgcaggccctgtacaaggtgaagagctgcagcatggccccccccgtggacctgctgaccggcaaggtgagacagtacttcatcgaggcccacgagatccagtgggactacggccccatgggccacgacggcagcaccggcaagaacctgagagagcccggcagcatcagcgacaagttcttccagaagagcagcagcagaatcggcggcacctactggaaggtgagatacgaggccttccaggacgagaccttccaggagaagatgcacctggaggaggacagacacctgggcatcctgggccccgtgatcagagccgaggtgggcgacaccatccaggtggtgttctacaacagagccagccagcccttcagcatgcagccccacggcgtgttctacgagaaggactacgagggcaccgtgtacaacgacggcagcagctaccccggcctggtggccaagcccttcgagaaggtgacctacagatggaccgtgcccccccacgccggccccaccgcccaggaccccgcctgcctgacctggatgtacttcagcgccgccgaccccatcagagacaccaacagcggcctggtgggccccctgctggtgtgcagagccggcgccctgggcgccgacggcaagcagaagggcgtggacaaggagttcttcctgctgttcaccgtgctggacgagaacaagagctggtacagcaacgccaaccaggccgccgccatgctggacttcagactgctgagcgaggacatcgagggcttccaggacagcaacagaatgcacgccatcaacggcttcctgttcagcaacctgcccagactggacatgtgcaagggcgacaccgtggcctggcacctgctgggcctgggcaccgagaccgacgtgcacggcgtgatgttccagggcaacaccgtgcagctgcagggcatgagaaagggcgccgccatgctgttcccccacaccttcgtgatggccatcatgcagcccgacaacctgggcaccttcgagatctactgccaggccggcagccacagagaggccggcatgagagccatctacaacgtgagccagtgccccggccaccaggccacccccagacagagataccaggccgccagaatctactacatcatggccgaggaggtggagtgggactactgccccgacagaagctgggagagagagtggcacaaccagagcgagaaggacagctacggctacatcttcctgagcaacaaggacggcctgctgggcagcagatacaagaaggccgtgttcagagagtacaccgacggcaccttcagaatccccagacccagaaccggccccgaggagcacctgggcatcctgggccccctgatcaagggcgaggtgggcgacatcctgaccgtggtgttcaagaacaacgccagcagaccctacagcgtgcacgcccacggcgtgctggagagcaccaccgtgtggcccctggccgccgagcccggcgaggtggtgacctaccagtggaacatccccgagagaagcggccccggccccaacgacagcgcctgcgtgagctggatctactacagcgccgtggaccccatcaaggacatgtacagcggcctggtgggccccctggccatctgccagaagggcatcctggagccccacggcggcagaagcgacatggacagagagttcgccctgctgttcctgatcttcgacgagaacaagagctggtacctggaggagaacgtggccacccacggcagccaggaccccggcagcatcaacctgcaggacgagaccttcctggagagcaacaagatgcacgccatcaacggcaagctgtacgccaacctgagaggcctgaccatgtaccagggcgagagagtggcctggtacatgctggccatgggccaggacgtggacctgcacaccatccacttccacgccgagagcttcctgtacagaaacggcgagaactacagagccgacgtggtggacctgttccccggcaccttcgaggtggtggagatggtggccagcaaccccggcacctggctgatgcactgccacgtgaccgaccacgtgcacgccggcatggagaccctgttcaccgtgttcagcagaaccgagcacctgagccccctgaccgtgatcaccaaggagaccgagaaggccgtgccccccagagacatcgaggagggcaacgtgaagatgctgggcatgcagatccccatcaagaacgtggagatgctggccagcgtgctggtggccatcagcgtgaccctgctgctggtggtgctggccctgggcggcgtggtgtggtaccagcacagacagagaaagctgagaagaaacagaagaagcatcctggacgacagcttcaagctgctgagcttcaagcagtag

SEQ ID NO: 296336 - protein, 649 aa, Artificial Sequence
  derived and/or modified sequence
MDEEIVSEKQAEESHRQDSANLLIFILLLTLTILTIWLFKHRRARFLHETGLAMIYGLLVGLVLRYGIHVPSDVNNVTLSCEVQSSPTTLLVNVSGKFYEYMLKGEISSHELNNVQDNEMLRKVTFDPEVFFNILLPPIIFYAGYSLKRRHFFRNLGSILAYAFLGTAISCFVIGSIMYGCVTLMKVTGQLAGDFYFTDCLLFGAIVSATDPVTVLAIFHELQVDVELYALLFGESVLNDAVAIVLSSSIVAYQPAGDNSHTFDVTAMFKSIGIFLGIFSGSFAMGAATGVVTALVTKFTKLREFQLLETGLFFLMSWSTFLLAEAWGFTGVVAVLFCGITQAHYTYNNLSTESQHRTKQLFELLNFLAENFIFSYMGLTLFTFQNHVFNPTFVVGAFVAIFLGRAANIYPLSLLLNLGRRSKIGSNFQHMMMFAGLRGAMAFALAIRDTATYARQMMFSTTLLIVFFTVWVFGGGTTAMLSCLHIRVGVDSDQEHLGVPENERRTTKAESAWLFRMWYNFDHNYLKPLLTHSGPPLTTTLPACCGPIARCLTSPQAYENQEQLKDDDSDLILNDGDISLTYGDSTVNTEPATSSAPRRFMGNSSEDALDRELAFGDHELVIRGTRLVLPMDDSEPPLNLLDNTRHGPA

SEQ ID NO: 296337 - DNA, 1950 bp, Artificial Sequence
  derived and/or modified sequence
atggacgaggagatcgtgagcgagaagcaggccgaggagagccacagacaggacagcgccaacctgctgatcttcatcctgctgctgaccctgaccatcctgaccatctggctgttcaagcacagaagagccagattcctgcacgagaccggcctggccatgatctacggcctgctggtgggcctggtgctgagatacggcatccacgtgcccagcgacgtgaacaacgtgaccctgagctgcgaggtgcagagcagccccaccaccctgctggtgaacgtgagcggcaagttctacgagtacatgctgaagggcgagatcagcagccacgagctgaacaacgtgcaggacaacgagatgctgagaaaggtgaccttcgaccccgaggtgttcttcaacatcctgctgccccccatcatcttctacgccggctacagcctgaagagaagacacttcttcagaaacctgggcagcatcctggcctacgccttcctgggcaccgccatcagctgcttcgtgatcggcagcatcatgtacggctgcgtgaccctgatgaaggtgaccggccagctggccggcgacttctacttcaccgactgcctgctgttcggcgccatcgtgagcgccaccgaccccgtgaccgtgctggccatcttccacgagctgcaggtggacgtggagctgtacgccctgctgttcggcgagagcgtgctgaacgacgccgtggccatcgtgctgagcagcagcatcgtggcctaccagcccgccggcgacaacagccacaccttcgacgtgaccgccatgttcaagagcatcggcatcttcctgggcatcttcagcggcagcttcgccatgggcgccgccaccggcgtggtgaccgccctggtgaccaagttcaccaagctgagagagttccagctgctggagaccggcctgttcttcctgatgagctggagcaccttcctgctggccgaggcctggggcttcaccggcgtggtggccgtgctgttctgcggcatcacccaggcccactacacctacaacaacctgagcaccgagagccagcacagaaccaagcagctgttcgagctgctgaacttcctggccgagaacttcatcttcagctacatgggcctgaccctgttcaccttccagaaccacgtgttcaaccccaccttcgtggtgggcgccttcgtggccatcttcctgggcagagccgccaacatctaccccctgagcctgctgctgaacctgggcagaagaagcaagatcggcagcaacttccagcacatgatgatgttcgccggcctgagaggcgccatggccttcgccctggccatcagagacaccgccacctacgccagacagatgatgttcagcaccaccctgctgatcgtgttcttcaccgtgtgggtgttcggcggcggcaccaccgccatgctgagctgcctgcacatcagagtgggcgtggacagcgaccaggagcacctgggcgtgcccgagaacgagagaagaaccaccaaggccgagagcgcctggctgttcagaatgtggtacaacttcgaccacaactacctgaagcccctgctgacccacagcggcccccccctgaccaccaccctgcccgcctgctgcggccccatcgccagatgcctgaccagcccccaggcctacgagaaccaggagcagctgaaggacgacgacagcgacctgatcctgaacgacggcgacatcagcctgacctacggcgacagcaccgtgaacaccgagcccgccaccagcagcgcccccagaagattcatgggcaacagcagcgaggacgccctggacagagagctggccttcggcgaccacgagctggtgatcagaggcaccagactggtgctgcccatggacgacagcgagccccccctgaacctgctggacaacaccagacacggccccgcctag

SEQ ID NO: 296338 - DNA, 1950 bp, Artificial Sequence
  derived and/or modified sequence
atggacgaagagattgtgtcagaaaagcaagcagaagagagccatcgacaagactccgccaatttgcttatcttcatcctacttttaacattgaccattctgaccatctggcttttcaagcaccggcgggcccgattcctgcacgagactggccttgcgatgatttatggcctccttgtggggcttgtattgaggtatggcatacacgttccgagcgatgtgaataacgtaacgttatcttgcgaagtccagagctctcctaccaccctactggtgaacgtgagtggcaaattttatgaatacatgctgaaaggagaaatctctagccacgagctaaataatgtccaggacaatgagatgctgcgcaaggtcacatttgaccccgaggttttttttaatattcttctgcctcccattatattctacgctggatattccctaaagagacgtcatttttttcggaacttgggttccatcctcgcttatgcattcctcggtacagcaatcagctgctttgtaattggtagcattatgtacggatgtgtgactctgatgaaagtaacaggccagctagctggagatttttacttcacagactgtttattgtttggcgctatcgtgtcggctacggaccctgtcacagtactcgccatctttcacgaattacaagtcgatgtggagttatacgcgctcttgtttggtgaatctgtgttgaatgatgccgtggccatagtcctgtcatctagcatcgtggcctaccagccggccggggataactctcatacctttgatgtgacagccatgtttaagtcaatcggcatcttcctaggaatcttcagcggaagtttcgccatgggagccgccacgggcgttgtcacagcgttggtgaccaaattcaccaaacttagggaattccaactcttggaaactggcctgttttttctgatgtcttggtctacctttcttctggccgaggcgtggggcttcactggcgtcgtagccgtgctgttctgcggaattacacaggcccattatacctataacaacttgagcaccgagtcacagcatagaaccaagcagctttttgagttgctgaactttctggctgagaatttcatcttctcttacatgggcctgactctgttcacgttccagaatcacgtctttaaccctacattcgttgtgggagctttcgtggccatcttcctcggccgcgcagctaacatttacccactgtctttgctcctgaatttggggcggcgttccaagatcggctccaattttcaacatatgatgatgttcgccggcctccgcggcgcaatggctttcgctcttgctatcagggacacagctacctacgctcgccagatgatgttctctacgacactgctgatagttttcttcaccgtttgggtgtttggagggggcactaccgctatgctgtcttgccttcacatccgggtaggcgtggactccgaccaagaacatctcggtgtaccagagaacgagaggcgaacaactaaggccgagtcggcatggctgtttcgcatgtggtacaatttcgaccataactatttaaagcccttacttacccacagcgggccgcctttaaccactacactgcccgcctgctgcggtcctattgctaggtgcttgacatcgcctcaggcttacgagaatcaggaacaactgaaggatgatgactcagatctgatattgaatgacggcgatatttctctgacatacggggatagcaccgttaatacagaaccagcgacttcctctgccccaaggcgattcatgggcaactcttccgaggatgctctggatcgggagctggcttttggcgaccatgagctggtcatccgaggcaccagactggtgctgccaatggatgatagcgaaccgccccttaaccttctagacaatacacgacatggtccagcttag

SEQ ID NO: 296339 - DNA, 1950 bp, Artificial Sequence
  derived and/or modified sequence
atggatgaggagatcgtgtctgagaagcaggccgaggagagccaccggcaggacagcgccaacctgctgatcttcatcctgctgctgaccctgaccatcctgaccatctggctgttcaagcaccggcgggcccgcttcctgcacgagaccggcctggccatgatctacggcctgctggtgggcctggtgctgcgctatggcatccacgtgcccagtgatgtgaacaacgtgaccctgagctgtgaggtgcagagcagccccaccaccctgctggtgaatgtgtctgggaagttctatgagtacatgctgaagggggagatcagcagccatgagctgaacaacgtgcaggacaatgagatgctgaggaaggtgacctttgatcctgaggtgttcttcaacatcctgctgccccccatcatcttctacgccggctacagcctgaagagaagacacttcttcaggaacctgggcagcatcctggcctatgccttcctgggcacagccatcagctgcttcgtcatcggcagcatcatgtatggctgtgtgaccctgatgaaggtgacaggccagctggccggggacttctacttcacagactgcctgctgtttggagccatcgtgtctgccacagatcctgtgacagtgctggccatcttccacgagctgcaggtggatgtggagctgtatgccctgctgtttggagagagcgtgctgaatgatgctgtggccatcgtgctgagcagcagcatcgtggcctaccagcctgctggggacaacagccacacctttgatgtgacagccatgttcaagagcatcggcatcttcctgggcatcttcagcggcagctttgccatgggcgccgccactggagtggtgacagccctggtgaccaagttcaccaagctgcgggagttccagctgctggagaccggcctcttcttcctgatgtcctggagcaccttcctgctggccgaggcctggggcttcaccggggtggtggccgtgctcttctgtggcatcacccaggcccactacacctacaacaacctgagcacagagagccagcacaggaccaagcagctgtttgagctgctgaacttcctggccgagaacttcatcttctcctacatgggcctgaccctcttcaccttccagaaccacgtgttcaaccccacctttgtggtgggcgcctttgtggccatcttcctgggccgggccgccaacatctaccccctgagcctgctgctgaacctgggccgccgcagcaagattggcagcaacttccagcacatgatgatgtttgctggcctgcggggggccatggcctttgccctggccatccgggacacagccacctacgcccggcagatgatgttcagcaccaccctgctgattgtgttcttcaccgtgtgggtgtttggaggcggcaccacagccatgctgagctgcctgcacatccgggtgggcgtggacagcgaccaggagcacctgggcgtgcctgaaaatgaaagaaggaccaccaaggccgagagcgcctggctgttcaggatgtggtacaactttgaccacaactacctgaagcccctgctgacccacagcggcccccccctgaccaccaccctgcctgcctgctgcggccccatcgcccgctgcctgaccagcccccaggcctatgagaaccaggagcagctgaaggatgatgacagcgacctgatcctgaatgatggagacatcagcctgacctacggggacagcacagtgaacacagagcccgccaccagcagcgccccccggcgcttcatgggcaacagcagtgaagatgccctggaccgggagctggcctttggagaccacgagctggtgatccggggcacccggctggtgctgcccatggatgacagcgagccccccctgaacctgctggacaacaccaggcatggccctgcctag

SEQ ID NO: 296340 - DNA, 1950 bp, Artificial Sequence
  derived and/or modified sequence
atggacgaggagatcgtgagcgagaagcaggccgaggagagccaccgtcaggactccgccaatcttctcattttcattctgctgctgactctgaccatcttgacgatttggctgttcaagcacaggcgggcaagatttttgcatgagactggtctcgcaatgatatatggattgttggttggcctcgtactccggtatggcatccacgttccctcagatgtgaataatgtaacactgagctgtgaggtgcagtcaagtccaacaaccctgctagttaacgtctccgggaagttttatgagtacatgctcaagggggaaataagctctcatgaacttaacaacgtgcaagacaatgaaatgctccggaaggtgacctttgatcctgaggtgttctttaacatactgctgcccccaatcatcttctacgcgggttattctctgaaacggcgacatttcttccgcaacctaggttccatccttgcttatgcctttctcggcacggccatttcttgcttcgtaatcggctcaatcatgtacggctgtgtcaccctaatgaaggtcacagggcagctggcgggcgacttctacttcacggactgtctgctgtttggcgccattgtgtctgccacggacccagtgacagttctcgccatttttcacgaacttcaggtcgacgtggaactgtacgctctgctcttcggagagagcgttcttaacgacgccgtggccatagtgttatcaagcagcattgtagcctaccagcctgccggagataactcccacacctttgatgtcaccgctatgttcaaatctatcggcatctttttgggcattttttccggttctttcgcaatgggcgcggcaacaggcgtggtgaccgccctggtgacaaagttcactaagttgagggagttccagctgcttgagacagggctcttcttcctgatgagttggagtacgttcctcctggccgaagcctggggtttcaccggcgtggtcgcagtcctattctgtggcattacccaagcacactacacttataacaatctgtcgaccgagagccagcatcgcaccaaacagctcttcgagctgctaaactttctcgcagagaacttcatattctcatacatgggtttaactctcttcaccttccagaaccacgtgtttaaccccacctttgtggtcggggcctttgtcgccatcttcctgggacgggccgccaatatttatccgctctccctgcttctaaatctgggacgacggagcaagatcggctccaacttccagcacatgatgatgtttgcaggactgaggggggctatggctttcgcgctggcgatcagggacactgctacttacgcccgacagatgatgtttagcacaacccttctgatcgtctttttcaccgtgtgggtgtttgggggtggcacaacagctatgctaagctgcctacatattcgagtcggggttgattccgatcaggaacacctgggagtgcccgaaaacgaacgacggaccaccaaagctgaatctgcctggctgttccgcatgtggtacaatttcgatcataattatcttaaacctttgctgacccactctggcccacctcttaccaccacgctcccagcttgttgtgggcccatcgctaggtgcttaacctctccacaagcatatgaaaaccaagagcaactcaaggacgacgattccgatctgattctgaacgatggggatataagtctgacctacggtgactctacagtgaacaccgagcccgcaacaagttccgcgccacggagatttatgggaaatagctctgaggatgccctggatagggagttagcctttggagatcatgaactcgtgatccgaggcacacgtctggtcctgccgatggatgactccgagcccccactgaacttactggataatacgaggcacggtcccgcctag

SEQ ID NO: 296341 - DNA, 1950 bp, Artificial Sequence
  derived and/or modified sequence
atggacgaggagatcgtcagtgagaaacaggcggaggaatctcatcggcaggactccgctaacctgctgatctttatcctcctactcacactcaccatcctaacaatctggctctttaagcatagaagggcccgtttcttacacgagaccggcctggcgatgatatacggcctgttggttgggctggtcctgcgttacggaatccacgtcccatccgatgtcaataatgttacactgagttgcgaggtgcagagttctccgaccacccttctcgtaaacgtcagcggtaagttttacgagtatatgctcaagggagaaatcagttcgcacgagctaaacaatgtacaagacaacgaaatgctcagaaaagtgacatttgatccggaggtcttttttaacattcttcttccacccatcatcttttacgccggttacagtctcaaaagacggcacttcttccggaatctcgggtccattcttgcgtacgcatttctgggtaccgcaatatcttgtttcgttataggctctatcatgtacggctgtgtgacgctgatgaaggtaacgggtcagttggcaggagatttttattttaccgactgcttgttgttcggggctatcgtgagtgcaacagacccagtgacagtcctagccatcttccatgagctgcaggtggacgtggagctttacgcgctcctgtttggagagtccgtgctaaacgacgcagtggccatcgtgctcagctcttcaatcgtggcttatcaacctgctggcgataattcccatactttcgatgttaccgccatgtttaagtctatcggcatcttcctaggcattttctctgggagctttgccatgggagcagctaccggggtggtgaccgccctcgtgaccaaattcactaaactgcgcgaatttcaactgctagagacaggcctgttcttcctgatgagctggtctacgtttctgttagccgaggcctggggtttcactggcgtggtggcagtgctgttctgcggcattacccaggcccactatacttataataacctgagcacagaaagtcagcaccgtacaaaacaacttttcgagctgctgaacttcttggcggagaactttatcttcagttacatggggctgaccctattcacttttcagaaccatgtttttaatcccacctttgtcgtgggcgctttcgtggccatcttcctggggagagcggcaaatatctatcctctgtctctcttgctgaatctcggcagacgcagtaaaattggctccaatttccaacatatgatgatgttcgccggattgcgcggagctatggcctttgctttggccatacgcgacacagcaacctatgccagacagatgatgttttccaccacactcctaatcgtgttctttactgtctgggtgtttggcggaggaactactgctatgctgtcttgcctccatattagagtgggggtggattccgatcaggaacatctgggagtgccagaaaatgagcgaagaactacgaaagccgagtctgcgtggctctttcgcatgtggtacaattttgatcacaactacctgaaacctctcttaacacactcaggtcctccgctaaccaccacacttcctgcctgttgcgggcctattgctcggtgtctgacttccccccaggcatacgaaaaccaggagcagctcaaggacgatgactccgatctgatcctgaatgatggggatattagcttaacttatggagattctacagtcaacactgagccagctacttcttcagcccctcgtagatttatgggcaattctagtgaagacgcgctggacagagagctggccttcggggaccacgagttggtcattcgcggaacaaggcttgtattacctatggatgattccgaaccccctcttaatctgttggataatacaagacacgggccagcctag

SEQ ID NO: 296342 - protein, 323 aa, Artificial Sequence
  derived and/or modified sequence
MAEKFDCHYCRDPLQGKKYVQKDGHHCCLKCFDKFCANTCVECRKPIGADSKEVHYKNRFWHDTCFRCAKCLHPLANETFVAKDNKILCNKCTTREDSPKCKGCFKAIVAGDQNVEYKGTVWHKDCFTCSNCKQVIGTGSFFPKGEDFYCVTCHETKFAKHCVKCNKAITSGGITYQDQPWHADCFVCVTCSKKLAGQRFTAVEDQYYCVDCYKNFVAKKCAGCKNPITGKRTVSRVSHPVSKARKPPVCHGKRLPLTLFPSANLRGRHPGGERTCPSWVVVLYRKNRSLAAPRGPGLVKAPVWWPMKDNPGTTTASTAKNAP

SEQ ID NO: 296343 - protein, 204 aa, Artificial Sequence
  derived and/or modified sequence
MAEKFDCHYCRDPLQGKKYVQKDGHHCCLKCFDKFCANTCVECRKPIGADSKEVHYKNRFWHDTCFRCAKCLHPLANETFVAKDNKILCNKCTTREDSPKCKGCFKAIVAGDQNVEYKGTVWHKDCFTCSNCKQVIGTGSFFPKGEDFYCVTCHETKFAKHCVKCNKAITSGGITYQDQPWHADCFVCVTCSKKLAGQRFTAVE

SEQ ID NO: 296344 - protein, 207 aa, Artificial Sequence
  derived and/or modified sequence
MAEKFDCHYCRDPLQGKKYVQKDGHHCCLKCFDKFCANTCVECRKPIGADSKEVHYKNRFWHDTCFRCAKCLHPLANETFVAKDNKILCNKCTTREDSPKCKGCFKAIVAGDQNVEYKGTVWHKDCFTCSNCKQVIGTGSFFPKGEDFYCVTCHETKFAKHCVKCNKAITSGGITYQDQPWHADCFVCVTCSKKLAGQRFTAVEDQY

SEQ ID NO: 296345 - protein, 141 aa, Artificial Sequence
  derived and/or modified sequence
MAEKFDCHYCRDPLQGKKYVQKDGHHCCLKCFDKFCANTCVECRKPIGADSKEVHYKNRFWHDTCFRCAKCLHPLANETFVAKDNKILCNKCTTREDSPKCKGCFKAIVAGDQNVEYKGTVWHKDCFTCSNCKQVIGTGSF

SEQ ID NO: 296346 - protein, 205 aa, Artificial Sequence
  derived and/or modified sequence
MAEKFDCHYCRDPLQGKKYVQKDGHHCCLKCFDKFCANTCVECRKPIGADSKEVHYKNRFWHDTCFRCAKCLHPLANETFVAKDNKILCNKCTTREDSPKCKGCFKAIVAGDQNVEYKGTVWHKDCFTCSNCKQVIGTGSFFPKGEDFYCVTCHETKFAKHCVKCNKAITSGGITYQDQPWHADCFVCVTCSKKLAGQRFTAVED

SEQ ID NO: 296347 - protein, 155 aa, Artificial Sequence
  derived and/or modified sequence
MAEKFDCHYCRDPLQGKKYVQKDGHHCCLKCFDKFCANTCVECRKPIGADSKEVHYKNRFWHDTCFRCAKCLHPLANETFVAKDNKILCNKCTTREDSPKCKGCFKAIVAGDQNVEYKGTVWHKDCFTCSNCKQVIGTGSFFPKGEDFYCVTCHE

SEQ ID NO: 296348 - DNA, 2458 bp, Artificial Sequence
  derived and/or modified sequence
caaccatatccagcctttgccgaatacatcctatctgccacacatccagcgtgaggtccctccagctacaaggtgggcaccatggcggagaagtttgactgccactactgcagggatcccttgcaggggaagaagtatgtgcaaaaggatggccaccactgctgcctgaaatgctttgacaagttctgtgccaacacctgtgtggaatgccgcaagcccatcggtgcggactccaaggaggtgcactataagaaccgcttctggcatgacacctgcttccgctgtgccaagtgccttcaccccttggccaatgagacctttgtggccaaggacaacaagatcctgtgcaacaagtgcaccactcgggaggactcccccaagtgcaaggggtgcttcaaggccattgtggcaggagatcaaaacgtggagtacaaggggaccgtctggcacaaagactgcttcacctgtagtaactgcaagcaagtcatcgggactggaagcttcttccctaaaggggaggacttctactgcgtgacttgccatgagaccaagtttgccaagcattgcgtgaagtgcaacaaggccatcacatctggaggaatcacttaccaggatcagccctggcatgccgattgctttgtgtgtgttacctgctctaagaagctggctgggcagcgtttcaccgctgtggaggaccagtattactgcgtggattgctacaagaactttgtggccaagaagtgtgctggatgcaagaaccccatcactgggaaaaggactgtgtcaagagtgagccacccagtctctaaagctaggaagcccccagtgtgccacgggaaacgcttgcctctcaccctgtttcccagcgccaacctccggggcaggcatccgggtggagagaggacttgtccctcgtgggtggtggttctttatagaaaaaatcgaagcttagcagctcctcgaggcccgggtttggtaaaggctccagtgtggtggcctatgaaggacaatcctggcacgactactgcttccactgcaaaaaatgctccgtgaatctggccaacaagcgctttgttttccaccaggagcaagtgtattgtcccgactgtgccaaaaagctgtaaactgacaggggctcctgtcctgtaaaatggcatttgaatctcgttctttgtgtccttactttctgccctataccatcaataggggaagagtggtccttcccttctttaaagttctccttccgtcttttctcccattttacagtattactcaaataagggcacacagtgatcatattagcatttagcaaaaagcaaccctgcagcaaagtgaatttctgtccggctgcaatttaaaaatgaaaacttaggtagattgactcttctgcatgtttctcatagagcagaaaagtgctaatcatttagccacttagtgatgtaagcaagaagcataggagataaaacccccactgagatgcctctcatgcctcagctgggacccaccgtgtagacacacgacatgcaagagttgcagcggctgctccaactcactgctcaccctcttctgtgagcaggaaaagaaccctactgacatgcatggtttaacttcctcatcagaactctgcccttccttctgttcttttgtgctttcaaataactaacacgaacttccagaaaattaacatttgaacttagctgtaattctaaactgacctttccccgtactaacgtttggtttccccgtgtggcatgttttctgagcgttcctactttaaagcatggaacatgcaggtgatttgggaagtgtagaaagacctgagaaaacgagcctgtttcagaggaacatcgtcacaacgaatacttctggaagcttaacaaaactaaccctgctgtcctttttattgtttttaattaatatttttgttttaattgatagcaaaatagtttatgggtttggaaacttgcatgaaaatattttagccccctcagatgttcctgcagtgctgaaattcatcctacggaagtaaccgcaaaactctagagggggagttgagcaggcgccagggctgtcatcaacatggatatgacatttcacaacagtgactagttgaatcccttgtaacgtagtagttgtctgctctttgtccatgtgttaatgaggactgcaaagtcccttctgttgtgattcctaggacttttcctcaagaggaaatctggatttccacctaccgcttacctgaaatgcaggatcacctacttactgtattctacattattatatgacatagtataatgagacaatatcaaaagtaaacatgtaatgacaatacatactaacattcttgtaggagtggttagagaagctgatgcctcatttctacattctgtcattagctattatcatctaacgtttcagtgtatccttacagaaataaagcagcatatgaataacctgc

SEQ ID NO: 296349 - DNA, 2706 bp, Artificial Sequence
  derived and/or modified sequence
cccgcccctggctagccgcgcccgcccccgcgctcctgcttcctcccctctttccctccccgcctcccaggcgcgcacccctcccctcgcgcccctcccgcgccctacatccaccgcccggcggagggggctcagtccgcagccgccgccgccaccgccgcgcctcggcctcggtgcaggcagcggccgccgccgccgagacagctgcgcgggcgagcatccccacgcagcaccttggaagttgttttcaaccatatccagcctttgccgaatacatcctatctgccacacatccagcgtgaggtccctccagctacaaggtgggcaccatggcggagaagtttgactgccactactgcagggatcccttgcaggggaagaagtatgtgcaaaaggatggccaccactgctgcctgaaatgctttgacaagttctgtgccaacacctgtgtggaatgccgcaagcccatcggtgcggactccaaggaggtgcactataagaaccgcttctggcatgacacctgcttccgctgtgccaagtgccttcaccccttggccaatgagacctttgtggccaaggacaacaagatcctgtgcaacaagtgcaccactcgggaggactcccccaagtgcaaggggtgcttcaaggccattgtggcaggagatcaaaacgtggagtacaaggggaccgtctggcacaaagactgcttcacctgtagtaactgcaagcaagtcatcgggactggaagcttcttccctaaaggggaggacttctactgcgtgacttgccatgagaccaagtttgccaagcattgcgtgaagtgcaacaaggccatcacatctggaggaatcacttaccaggatcagccctggcatgccgattgctttgtgtgtgttacctgctctaagaagctggctgggcagcgtttcaccgctgtggaggaccagtattactgcgtggattgctacaagaactttgtggccaagaagtgtgctggatgcaagaaccccatcactgggaaaaggactgtgtcaagagtgagccacccagtctctaaagctaggaagcccccagtgtgccacgggaaacgcttgcctctcaccctgtttcccagcgccaacctccggggcaggcatccgggtggagagaggacttgtccctcgtgggtggtggttctttatagaaaaaatcgaagcttagcagctcctcgaggcccgggtttggtaaaggctccagtgtggtggcctatgaaggacaatcctggcacgactactgcttccactgcaaaaaatgctccgtgaatctggccaacaagcgctttgttttccaccaggagcaagtgtattgtcccgactgtgccaaaaagctgtaaactgacaggggctcctgtcctgtaaaatggcatttgaatctcgttctttgtgtccttactttctgccctataccatcaataggggaagagtggtccttcccttctttaaagttctccttccgtcttttctcccattttacagtattactcaaataagggcacacagtgatcatattagcatttagcaaaaagcaaccctgcagcaaagtgaatttctgtccggctgcaatttaaaaatgaaaacttaggtagattgactcttctgcatgtttctcatagagcagaaaagtgctaatcatttagccacttagtgatgtaagcaagaagcataggagataaaacccccactgagatgcctctcatgcctcagctgggacccaccgtgtagacacacgacatgcaagagttgcagcggctgctccaactcactgctcaccctcttctgtgagcaggaaaagaaccctactgacatgcatggtttaacttcctcatcagaactctgcccttccttctgttcttttgtgctttcaaataactaacacgaacttccagaaaattaacatttgaacttagctgtaattctaaactgacctttccccgtactaacgtttggtttccccgtgtggcatgttttctgagcgttcctactttaaagcatggaacatgcaggtgatttgggaagtgtagaaagacctgagaaaacgagcctgtttcagaggaacatcgtcacaacgaatacttctggaagcttaacaaaactaaccctgctgtcctttttattgtttttaattaatatttttgttttaattgatagcaaaatagtttatgggtttggaaacttgcatgaaaatattttagccccctcagatgttcctgcagtgctgaaattcatcctacggaagtaaccgcaaaactctagagggggagttgagcaggcgccagggctgtcatcaacatggatatgacatttcacaacagtgactagttgaatcccttgtaacgtagtagttgtctgctctttgtccatgtgttaatgaggactgcaaagtcccttctgttgtgattcctaggacttttcctcaagaggaaatctggatttccacctaccgcttacctgaaatgcaggatcacctacttactgtattctacattattatatgacatagtataatgagacaatatcaaaagtaaacatgtaatgacaatacatactaacattcttgtaggagtggttagagaagctgatgcctcatttctacattctgtcattagctattatcatctaacgtttcagtgtatccttacagaaataaagcagcatatgaataacctgc

SEQ ID NO: 296350 - DNA, 972 bp, Artificial Sequence
  derived and/or modified sequence
atggctgagaagtttgattgccattactgccgcgaccctctgcagggcaaaaaatacgttcagaaggatgggcaccattgctgtcttaagtgctttgataaattttgcgcaaacacatgcgtcgagtgtaggaaacctataggagcagatagtaaagaggttcattacaagaataggttttggcatgacacttgcttccgatgcgccaagtgcttgcaccctttggccaacgaaactttcgtggcaaaagacaataagattctctgcaataaatgtactacaagagaggactcccccaaatgtaaggggtgtttcaaagctattgtggctggggaccagaatgtggaatacaagggcacggtgtggcataaggactgtttcacatgcagcaactgcaaacaggtcataggcacaggttccttttttcctaagggagaagacttttactgtgtcacgtgccacgagacaaagtttgccaagcattgcgtaaagtgcaataaagccattacgagcggggggattacttatcaggaccagccctggcatgctgattgtttcgtgtgcgttacttgttctaaaaaactggccgggcagcggtttacggccgtggaagatcagtactactgtgtggactgctataaaaacttcgtggcgaaaaagtgcgcaggatgtaagaatcctatcactggcaagaggaccgtaagccgggtatctcacccagtaagcaaagccaggaagccccccgtgtgtcatggaaagagactccctctcacgcttttccctagtgcaaatctgagggggcggcaccccggaggggagaggacctgtcccagctgggtggttgtcctgtatcgcaagaatagatcactcgctgccccccggggtccgggcctggttaaagcacccgtgtggtggcctatgaaggataatcccgggaccacaacggcatcaacagccaaaaatgcaccctag

SEQ ID NO: 296351 - DNA, 972 bp, Artificial Sequence
  derived and/or modified sequence
atggcagaaaagttcgattgtcattattgcagggaccccctccagggcaaaaagtacgtgcagaaggacggccaccactgctgtctgaagtgcttcgacaaattttgtgccaatacatgcgtggaatgccgaaaaccaatcggggccgatagcaaggaggtccactacaagaataggttctggcacgacacctgtttccgctgcgcaaaatgtctacacccccttgccaacgagactttcgtggcaaaagacaacaagatcttgtgtaacaagtgcacaacacgcgaggacagccccaagtgcaagggatgcttcaaggctatcgtggcaggcgatcagaacgttgaatataagggaacagtgtggcataaggactgcttcacctgtagcaattgtaaacaggtaataggaactggtagttttttccccaaaggtgaggatttttattgtgttacatgccatgaaacgaagtttgccaaacactgtgttaaatgtaacaaagcaatcacatcagggggaatcacctaccaagatcagccatggcacgcagactgttttgtatgcgtgacctgtagcaaaaaactggccggtcaacggttcaccgcagtggaggaccagtactactgtgtagattgctacaagaacttcgtggctaagaagtgtgctggatgtaaaaacccgatcaccggaaaacgaacagtgtccagggtgtcccacccagtttcaaaagccaggaagcctccagtatgtcatggcaaaagactgccgctcacgctgttcccttcagccaatctgcgtggaaggcatcccgggggggaaagaacatgcccctcgtgggtcgtagttctgtaccgcaagaataggtctttggcagctccacggggccctgggctcgtgaaagcaccagtgtggtggcctatgaaagacaatcctgggacaactacagcctctaccgccaaaaatgccccctag

SEQ ID NO: 296352 - DNA, 972 bp, Artificial Sequence
  derived and/or modified sequence
atggccgagaagtttgactgccactactgccgggaccccctgcagggcaagaagtatgtgcagaaggatggccaccactgctgcctgaagtgctttgacaagttctgtgccaacacctgtgtggagtgcaggaagcccatcggggctgacagcaaggaggtgcactacaagaaccgcttctggcatgacacctgcttccgctgtgccaagtgcctgcaccccctggccaatgagacctttgtggccaaggacaacaagatcctgtgcaacaagtgcaccacccgggaggacagccccaagtgcaagggctgcttcaaggccatcgtggccggggaccagaatgtggagtacaagggcaccgtgtggcacaaggactgcttcacctgcagcaactgcaagcaggtgattggcaccggcagcttcttccccaagggggaggacttctactgtgtgacctgccacgagaccaagtttgccaagcactgtgtgaagtgcaacaaggccatcaccagcggcggcatcacctaccaggaccagccctggcatgctgactgctttgtgtgtgtgacctgcagcaagaagctggccggccagcgcttcaccgctgtggaggaccagtactactgtgtggactgctacaagaactttgtggccaagaagtgtgccggctgcaagaaccccatcaccgggaagaggacagtgtcccgggtgagccaccctgtgtccaaggccaggaagccccctgtgtgccacggcaagaggctgcccctgaccctcttccccagcgccaacctgcggggccgccaccctggaggagagaggacctgccccagctgggtggtggtgctgtacaggaagaacagaagcctggccgccccccggggccctggcctggtgaaggcccctgtgtggtggcccatgaaggacaaccctggcaccaccacagccagcacagccaagaatgccccctag

SEQ ID NO: 296353 - DNA, 972 bp, Artificial Sequence
  derived and/or modified sequence
atggccgagaagttcgactgccactactgccgggaccccctgcaggggaaaaagtacgtgcagaaggacggacatcattgttgcttgaaatgctttgataagttctgcgccaacacgtgtgtggagtgtagaaaaccaatcggcgcagattctaaggaagttcattacaaaaaccgcttctggcacgatacatgcttcagatgtgccaagtgcctgcatcctcttgccaatgagactttcgtggccaaggacaacaagattttgtgtaacaagtgcactaccagggaagattcacccaaatgtaagggttgttttaaggccatcgtagctggcgatcaaaacgtggagtataagggcactgtgtggcacaaagactgtttcacttgttccaattgtaaacaggttattggtactggttcatttttcccaaaaggggaagatttctattgtgtgacgtgtcacgaaaccaagtttgccaaacactgcgtgaagtgcaataaagccatcacaagtggcggaatcacctaccaggatcagccctggcacgcagattgtttcgtgtgcgtaacttgctcaaagaagctcgcggggcagcgctttacagccgtggaggaccagtattattgcgtcgactgttataaaaacttcgtggcaaagaagtgcgcggggtgcaaaaatcccattacaggcaagcggactgtatctagggtttcacatcctgtctccaaggctagaaaaccacctgtatgtcacgggaaacgactgcccctaaccttgtttccatcagccaacctgcgtggcaggcacccaggcggtgaacgtacctgtcctagctgggtcgtagtcctctatcgcaagaaccgatctcttgcagctccaaggggcccaggactggtgaaagcccccgtgtggtggcccatgaaggacaatcccggaaccaccacagccagcaccgctaagaatgctccctag

SEQ ID NO: 296354 - DNA, 972 bp, Artificial Sequence
  derived and/or modified sequence
atggccgagaagttcgactgccactactgccgggaccccctgcaggggaagaaatatgtgcagaaagacggacaccactgttgcctcaaatgttttgataaattttgcgcaaacacatgcgttgaatgcagaaagcctatcggtgccgactcgaaagaagtccactacaagaataggttttggcatgacacttgttttcggtgcgccaagtgtttacacccactggcaaacgagacatttgtggccaaagataataagatcttatgcaataagtgcaccacccgtgaggactccccaaaatgcaagggctgctttaaggcaattgtagccggcgaccagaatgtcgaatacaaagggacagtctggcacaaggattgttttacttgtagtaactgtaaacaggtgatcggaactgggagcttcttccctaagggagaagatttctactgcgttacttgtcacgagacaaagtttgcaaaacactgtgtgaagtgcaacaaagctatcacctcagggggaatcacttaccaagaccaaccatggcatgctgactgcttcgtatgcgtcacgtgtagcaagaagctggccggccagcggtttacagcagtggaggatcagtattattgcgtagattgctacaaaaacttcgtcgccaagaagtgtgcgggatgtaaaaaccccatcacgggcaagcgcacggtgagcagggtgagccatcccgttagcaaagcccggaaacccccagtgtgccatgggaagagactgcccctcaccctgtttcctagtgcaaaccttcgcggcagacacccagggggagagcgcacctgcccatcctgggttgttgtcctttaccgtaagaacaggtctcttgcggctcctcgcgggccaggactagtgaaggcacccgtatggtggcccatgaaggataaccccggcactaccaccgcctccacagcgaaaaatgctccatag

SEQ ID NO: 296355 - DNA, 972 bp, Artificial Sequence
  derived and/or modified sequence
atggcagagaagtttgactgccattactgccgagacccactgcagggtaagaagtatgtgcagaaggacggtcatcactgttgcttaaaatgctttgataaattctgcgctaacacctgtgtggaatgtcggaagccaatcggtgcggattctaaggaagttcattacaagaatagattttggcatgatacatgctttaggtgcgcgaagtgcctgcatcctctcgcaaatgaaaccttcgtggcaaaagataacaagatcctctgtaacaagtgcaccacccgtgaggacagtccgaaatgtaagggctgcttcaaagccattgtggcaggggatcagaacgtggagtacaaagggactgtttggcacaaggactgctttacctgctcaaactgcaagcaggtcatcggaaccggctcattttttcctaagggggaagacttctattgtgttacatgccatgagaccaaatttgccaagcattgtgtcaagtgcaacaaagccatcacttcgggtggaatcacctaccaggaccagccttggcacgcagactgtttcgtttgcgtgacttgctctaaaaaactcgctggccagagatttaccgccgtggaggaccagtactactgcgtagactgttacaagaatttcgtagcaaagaaatgtgccggatgtaagaacccaatcaccggtaagagaactgtctctagagttagccatcctgtaagtaaggctcgcaagcccccagtttgccatggcaaacgactgcctttaaccctcttcccctctgctaatttgcgcggtcgtcacccaggaggagagcgcacatgtccatcctgggtggtggtcctgtaccgcaaaaacaggagcctcgccgctccccgaggcccaggcctggtcaaggctcctgtgtggtggcctatgaaggacaatccgggaaccaccacagctagcaccgctaaaaatgccccatag

SEQ ID NO: 296356 - DNA, 972 bp, Artificial Sequence
  derived and/or modified sequence
atggccgagaagtttgattgccactactgtcgggaccctcttcaaggcaagaaatatgtgcagaaagatgggcaccactgttgtctgaagtgtttcgataagttttgcgccaatacttgtgtggagtgccggaaacccataggggcagattctaaagaggtccattataaaaatcggttctggcatgatacttgctttcggtgcgccaaatgcctacaccctctcgcaaacgaaacgtttgtggcaaaggacaacaaaatcctctgtaataaatgcaccacccgcgaggacagtccaaaatgtaagggctgtttcaaggctatcgtggccggtgatcaaaacgtcgagtataaagggacagtgtggcacaaggattgttttacgtgctctaattgtaaacaagttattggaaccgggagtttctttcccaagggcgaggatttctattgcgtgacttgtcacgagactaagttcgcaaaacactgtgtgaagtgcaataaagcaattacaagcgggggaatcacctaccaggatcagccatggcatgccgactgtttcgtttgtgtgacatgctctaagaaattggctggacagcgcttcacagccgtcgaggaccagtactactgtgtggattgttacaagaatttcgtggctaagaagtgcgccggttgtaagaatccaatcactggcaaaaggacggtatccagggtcagccaccccgtctccaaggccaggaagccccctgtttgtcatgggaaacgcctgcctttgacactgtttcctagcgcaaatctgcgcggaagacatccgggaggcgaacgaacctgtccctcctgggtggtggtcctctaccggaagaaccgatctctggcagcgccacggggtccagggctcgtgaaggcaccagtgtggtggcccatgaaagataatccaggcactacaaccgcgtctaccgccaagaacgccccatag

SEQ ID NO: 296357 - DNA, 972 bp, Artificial Sequence
  derived and/or modified sequence
atggccgagaagttcgactgccactactgcagagaccccctgcagggcaagaagtacgtgcagaaggacggccaccactgctgcctgaagtgcttcgacaagttctgcgccaacacctgcgtggagtgcagaaagcccatcggcgccgacagcaaggaggtgcactacaagaacagattctggcacgacacctgcttcagatgcgccaagtgcctgcaccccctggccaacgagaccttcgtggccaaggacaacaagatcctgtgcaacaagtgcaccaccagagaggacagccccaagtgcaagggctgcttcaaggccatcgtggccggcgaccagaacgtggagtacaagggcaccgtgtggcacaaggactgcttcacctgcagcaactgcaagcaggtgatcggcaccggcagcttcttccccaagggcgaggacttctactgcgtgacctgccacgagaccaagttcgccaagcactgcgtgaagtgcaacaaggccatcaccagcggcggcatcacctaccaggaccagccctggcacgccgactgcttcgtgtgcgtgacctgcagcaagaagctggccggccagagattcaccgccgtggaggaccagtactactgcgtggactgctacaagaacttcgtggccaagaagtgcgccggctgcaagaaccccatcaccggcaagagaaccgtgagcagagtgagccaccccgtgagcaaggccagaaagccccccgtgtgccacggcaagagactgcccctgaccctgttccccagcgccaacctgagaggcagacaccccggcggcgagagaacctgccccagctgggtggtggtgctgtacagaaagaacagaagcctggccgcccccagaggccccggcctggtgaaggcccccgtgtggtggcccatgaaggacaaccccggcaccaccaccgccagcaccgccaagaacgccccctag

SEQ ID NO: 296358 - DNA, 774 bp, Artificial Sequence
  derived and/or modified sequence
atggccgaaaaatttgattgccattactgcagagaccccttacagggtaagaaatatgtccagaaggatggccatcattgctgcttgaagtgcttcgacaagttctgcgcaaatacctgtgtcgagtgcagaaagcccattggcgccgatagtaaagaggtccactacaagaaccgcttttggcatgatacctgcttcagatgtgctaagtgcctgcatcctctcgctaacgaaacctttgtggccaaagataacaagattctctgtaacaaatgtactaccagagaagactcccccaagtgtaagggctgcttcaaagcaattgtcgccggtgatcagaacgtcgaatacaaggggaccgtctggcacaaagactgtttcacctgctcgaattgcaaacaggtgattggaacgggcagtttcttccccaaaggcgaggacttctactgtgtgacctgccatgagaccaaattcgccaaacattgtgtaaagtgcaacaaagctattaccagcggaggaattacctaccaagatcagccatggcacgcagattgttttgtgtgcgtgacttgctccaagaagctggctgggcaacggtttaccgccgtagaggaccagtactactgcgtcgactgctataagaacttcgtggccaagaaatgcgcaggctgcaaaaatccaattaccggatttggaaagggatcaagtgtagtcgcctacgaagggcagtcgtggcacgattattgctttcactgcaagaaatgtagcgtgtag

SEQ ID NO: 296359 - DNA, 843 bp, Artificial Sequence
  derived and/or modified sequence
atggctgaaaagttcgactgccattactgccgcgaccctctgcagggaaaaaaatacgtgcaaaaggacgggcatcattgctgtcttaaatgcttcgacaagttttgtgccaacacatgtgtcgagtgccggaagcccattggtgctgacagcaaggaggtgcactacaagaatcgcttttggcacgacacttgctttcgatgcgcaaagtgcctgcacccactcgcaaacgagacgtttgtggctaaggacaacaagatcctgtgcaataaatgtaccactcgtgaggactctcctaaatgtaaagggtgctttaaggccatcgtggcaggcgatcaaaatgtggagtacaagggaacagtgtggcataaagattgttttacctgctccaattgtaagcaggtgatcggtaccggcagtttttttcctaagggcgaggatttctactgtgtgacgtgtcatgaaacgaagttcgcgaagcactgtgtcaaatgcaacaaagctatcacttctggcggcattacctaccaggaccagccctggcacgccgattgtttcgtgtgtgtgacctgcagtaagaagctcgccggtcagagatttactgccgtggaggaccagtattactgtgtcgactgctacaaaaattttgtagcaaagaagtgcgcaggctgcaaaaaccctattacaggatttggaaagggaagcagcgtcgtggcatatgaggggcagagctggcatgactactgcttccattgcaaaaagtgcagcgtgaaccttgccaataagagattcgtgttccaccaggaacaagtgtactgccctgattgcgctaagaagttatag

SEQ ID NO: 296360 - DNA, 843 bp, Artificial Sequence
  derived and/or modified sequence
atggccgagaagtttgattgccattattgcagggaccccctgcagggaaagaagtacgtgcagaaggacgggcaccattgctgcctgaaatgtttcgacaaattctgcgccaatacatgtgtggagtgtagaaagcctatcggggcagacagcaaggaggtccattacaaaaaccgattctggcatgacacctgcttcaggtgcgccaagtgcctgcatcccttagccaatgaaacgttcgtagctaaggacaacaagatcctgtgtaataaatgcaccactcgggaggactcccctaaatgcaaaggctgtttcaaggcaattgtagccggcgaccagaatgtagagtacaaaggcaccgtgtggcacaaggactgcttcacctgctccaattgtaagcaggtgatcgggacagggtcctttttccccaagggcgaggacttctactgtgtgacttgccacgaaacaaagtttgcaaaacattgcgtgaagtgtaacaaggccattacaagcggcggtattacataccaagatcagccttggcatgccgactgctttgtatgtgtgacttgcagtaagaaactcgccggacagaggttcaccgccgttgaagaccaatattactgtgtagattgctataaaaacttcgtagcaaaaaaatgtgcaggatgcaagaatcctatcactggctttggtaagggctctagtgtagtggcatacgaaggccagagttggcatgattattgcttccactgtaagaagtgctcagtgaatctcgcaaacaagcgctttgtgtttcatcaggagcaggtgtactgtcctgattgcgcgaagaagttgtag

SEQ ID NO: 296361 - DNA, 615 bp, Artificial Sequence
  derived and/or modified sequence
atggctgagaaatttgactgccattactgcagagatccccttcagggcaagaagtacgtgcaaaaggacgggcaccattgttgcctgaagtgcttcgataagttctgcgccaacacatgcgtggaatgccggaagccaatcggcgccgatagtaaggaagtccactacaagaatagattctggcacgatacctgctttcggtgcgctaagtgcctgcacccactggccaatgagacctttgtggccaaagacaataagattctgtgcaacaaatgtaccacgagagaggattcgcccaagtgtaagggctgtttcaaagctatagtagcgggggaccagaatgtagaatataagggcacggtctggcacaaggactgtttcacttgctccaactgcaagcaggtcatcggcaccggctctttttttccaaaaggggaggatttctattgtgtgacttgccacgagaccaaattcgcaaagcactgtgttaagtgcaataaggccatcaccagcggcggcataacgtatcaggaccagccgtggcatgctgactgcttcgtctgcgtcacttgcagtaaaaagttagcgggccagcgatttacagccgtagaatag

SEQ ID NO: 296362 - DNA, 624 bp, Artificial Sequence
  derived and/or modified sequence
atggccgagaagtttgattgccactactgtcgggatcctctgcaagggaagaaatacgtgcaaaaggacgggcatcactgctgcctgaaatgtttcgacaagttttgcgccaatacttgcgtcgaatgccggaaacctattggagctgatagtaaggaggtgcactacaagaaccggttttggcacgacacctgctttaggtgcgccaagtgtctgcaccctcttgctaacgaaacctttgtggcaaaagataacaaaattctgtgtaacaaatgtactacccgggaagactcaccaaaatgtaagggatgctttaaggctatagtggcaggggatcaaaatgtcgaatacaagggaacggtctggcataaggattgcttcacatgtagtaattgtaagcaggtaattggtacgggttcattcttccctaagggagaggacttttactgtgtgacctgtcatgaaactaagttcgctaagcattgtgtaaagtgtaacaaggcgattaccagcgggggtatcacctatcaggatcaaccatggcacgctgactgtttcgtctgcgtgacctgctctaagaaactcgccggtcagcggtttacagccgttgaggatcaatactag

SEQ ID NO: 296363 - DNA, 624 bp, Artificial Sequence
  derived and/or modified sequence
atggctgagaagtttgattgtcattactgtcgtgatcccctacaggggaaaaaatatgtacaaaaagacggacaccactgttgcctcaagtgcttcgataagttttgcgccaacacctgtgtcgaatgccgcaagccaattggggctgactctaaagaggtccattacaaaaatcgcttctggcacgacacctgcttcaggtgtgcaaagtgcttgcatccccttgccaatgagactttcgtggccaaagataacaagatcctttgcaataagtgcacaacaagagaagattcccctaagtgtaaaggatgtttcaaggctatcgtggcgggagatcagaacgtggagtacaaaggaacggtctggcataaggactgtttcacctgttcaaactgtaagcaggtaattggtacaggctcttttttccccaaaggagaggacttctactgtgttacgtgccatgaaaccaaatttgcaaaacattgcgtaaagtgtaataaagccatcacttcaggcggcatcacctatcaggatcagccctggcacgctgattgttttgtatgcgtgacctgcagtaagaaactggctggtcaacggtttacagccgtcgaagatcagtactag

SEQ ID NO: 296364 - DNA, 618 bp, Artificial Sequence
  derived and/or modified sequence
atggcagaaaaattcgactgtcactactgccgggatccactacaaggcaaaaaatatgtgcagaaggacggtcatcattgttgtctgaagtgcttcgataagttctgtgccaatacttgtgtggaatgtcggaaacctataggagccgacagcaaggaggtgcattacaagaaccgcttttggcacgacacctgtttcaggtgtgccaagtgtctgcacccactcgctaatgaaaccttcgttgccaaggataataagatcctgtgtaacaagtgcaccactagggaagattctccaaaatgtaaaggctgcttcaaggcgatagtggctggagatcagaatgtcgagtacaaaggtactgtctggcacaaggattgctttacctgtagcaactgcaagcaggtgattggaacaggttcattttttccaaagggggaggacttctactgtgtgacctgccatgagacaaagttcgccaagcattgcgttaagtgcaataaggcgatcacctccgggggaatcacttatcaggaccaaccctggcatgccgactgtttcgtatgcgtgacctgcagcaaaaagctggctggacagagattcacagccgtggaggactag

SEQ ID NO: 296365 - DNA, 843 bp, Artificial Sequence
  derived and/or modified sequence
atggccgagaaatttgattgccactattgccgcgacccacttcaggggaaaaaatatgtgcagaaagacgggcaccactgctgcttgaagtgcttcgataaattttgtgccaatacttgcgttgagtgccgcaagcccattggagcagattcaaaagaagtgcactacaaaaatagattttggcatgacacatgttttcgctgcgccaagtgtctacaccctctcgccaacgagacctttgtggccaaagacaacaagattttgtgcaataaatgtactacacgagaagacagccccaaatgtaaaggatgctttaaagctattgtggcaggggatcagaatgtggagtacaaaggcacagtgtggcacaaggactgttttacctgtagcaactgcaagcaggtgatcggtaccgggtcattctttccgaagggagaggacttctattgtgttacatgccatgaaaccaagttcgctaagcattgcgttaagtgtaacaaggcgatcacctccggggggataacctaccaggaccagccctggcatgcagactgtttcgtctgtgtgacatgctctaaaaagctggccggacagcggttcacagctgttgaagaccaatattactgtgttgactgctataaaaattttgttgccaaaaaatgcgccggctgcaagaaccccataacgggcttcggtaaaggaagctcagtggtagcgtacgagggtcagagctggcacgactattgctttcactgtaagaagtgttctgttaacctggccaacaagcgttttgtattccatcaggaacaagtctactgccctgactgcgctaaaaaactatag

SEQ ID NO: 296366 - DNA, 783 bp, Artificial Sequence
  derived and/or modified sequence
atggccgagaagtttgattgctgcctcaaatgtttcgacaaattttgtgcgaatacttgcgtcgagtgccgaaaaccaatcggagctgatagtaaagaggttcattacaagaaccggttctggcatgatacatgttttcgctgcgcgaaatgtcttcaccctttagcaaacgaaactttcgtggcgaaggataacaagattctctgtaacaagtgtactaccagggaagactcaccaaaatgtaaaggctgcttcaaggcaattgtagccggagaccagaacgtggagtataagggcacagtgtggcacaaagattgtttcacgtgcagcaactgcaagcaagttatcggaacaggcagtttttttcccaagggagaggacttttactgcgtgacatgtcatgaaacgaagtttgctaaacattgcgtcaagtgcaacaaagcgatcaccagtgggggaataacttatcaggaccagccatggcatgcggactgtttcgtttgtgtcacatgtagtaagaagttagccggccagcggtttacagccgtcgaagaccagtattattgcgtcgattgctataagaactttgtcgctaagaaatgcgcaggctgtaaaaaccctataaccggcttcggaaaagggtcaagcgtcgtcgcttatgagggtcagagctggcatgactattgcttccactgcaaaaaatgttccgtcaatctggcaaacaagcggttcgtgtttcatcaagaacaagtgtattgcccagattgcgccaagaaactgtag

SEQ ID NO: 296367 - DNA, 843 bp, Artificial Sequence
  derived and/or modified sequence
atggccgaaaagtttgattgccattactgtcgggacccactacaaggcaaaaaatatgtgcaaaaggacggccaccattgctgcttgaagtgtttcgacaagttttgcgcaaatacctgtgttgaatgtcgaaaacccatcggggcggactccaaggaagtacattacaaaaaccgcttctggcatgacacttgttttcgctgtgccaaatgcctccaccccctcgctaacgagacgttcgtggccaaagataacaaaatcctgtgtaacaagtgtactactcgagaagactcgcccaagtgcaaaggctgctttaaagctatcgtggccggtgatcaaaacgtcgagtataaaggtacggtgtggcacaaggactgcttcacctgtagtaattgtaagcaggtgattggcactggcagcttcttccccaagggagaggacttctactgtgtgacatgccacgagaccaaattcgctaaacactgtgtcaaatgcaacaaagccatcaccagtggcggaattacttaccaagaccagccatggcacgcagattgtttcgtgtgtgtgacctgtagtaagaaattagcagggcagaggtttacggccgttgaagaccagtattactgcgtggattgctacaagaattttgtggctaaaaagtgtgccgggtgtaaaaatcctataacagggttcgggaagggatcgtccgtggttgcatacgaaggccagtcctggcacgattactgctttcactgcaaaaaatgcagcgtaaacttagccaacaaacgtttcgtgttccaccaggagcaggtgtattgccctgactgtgcgaagaaattgtag

SEQ ID NO: 296368 - DNA, 774 bp, Artificial Sequence
  derived and/or modified sequence
atggccgagaagtttgactgccactactgccgggaccccctgcagggcaagaagtatgtgcagaaggatggccaccactgctgcctgaagtgctttgacaagttctgtgccaacacctgtgtggagtgcaggaagcccatcggggctgacagcaaggaggtgcactacaagaaccgcttctggcatgacacctgcttccgctgtgccaagtgcctgcaccccctggccaatgagacctttgtggccaaggacaacaagatcctgtgcaacaagtgcaccacccgggaggacagccccaagtgcaagggctgcttcaaggccatcgtggccggggaccagaatgtggagtacaagggcaccgtgtggcacaaggactgcttcacctgcagcaactgcaagcaggtgattggcaccggcagcttcttccccaagggggaggacttctactgtgtgacctgccacgagaccaagtttgccaagcactgtgtgaagtgcaacaaggccatcaccagcggcggcatcacctaccaggaccagccctggcatgctgactgctttgtgtgtgtgacctgcagcaagaagctggccggccagcgcttcaccgctgtggaggaccagtactactgtgtggactgctacaagaactttgtggccaagaagtgtgccggctgcaagaaccccatcactggatttgggaagggcagctctgtggtggcctatgagggccagagctggcatgactactgcttccactgcaagaagtgcagcgtgtag

SEQ ID NO: 296369 - DNA, 843 bp, Artificial Sequence
  derived and/or modified sequence
atggccgagaagtttgactgccactactgccgggaccccctgcagggcaagaagtatgtgcagaaggatggccaccactgctgcctgaagtgctttgacaagttctgtgccaacacctgtgtggagtgcaggaagcccatcggggctgacagcaaggaggtgcactacaagaaccgcttctggcatgacacctgcttccgctgtgccaagtgcctgcaccccctggccaatgagacctttgtggccaaggacaacaagatcctgtgcaacaagtgcaccacccgggaggacagccccaagtgcaagggctgcttcaaggccatcgtggccggggaccagaatgtggagtacaagggcaccgtgtggcacaaggactgcttcacctgcagcaactgcaagcaggtgattggcaccggcagcttcttccccaagggggaggacttctactgtgtgacctgccacgagaccaagtttgccaagcactgtgtgaagtgcaacaaggccatcaccagcggcggcatcacctaccaggaccagccctggcatgctgactgctttgtgtgtgtgacctgcagcaagaagctggccggccagcgcttcaccgctgtggaggaccagtactactgtgtggactgctacaagaactttgtggccaagaagtgtgccggctgcaagaaccccatcactggatttgggaagggcagctctgtggtggcctatgagggccagagctggcatgactactgcttccactgcaagaagtgcagcgtgaacctggccaacaagagatttgtgttccaccaggagcaggtgtactgcccagactgtgccaagaagctgtag

SEQ ID NO: 296370 - DNA, 615 bp, Artificial Sequence
  derived and/or modified sequence
atggccgagaagtttgactgccactactgccgggaccccctgcagggcaagaagtatgtgcagaaggatggccaccactgctgcctgaagtgctttgacaagttctgtgccaacacctgtgtggagtgcaggaagcccatcggggctgacagcaaggaggtgcactacaagaaccgcttctggcatgacacctgcttccgctgtgccaagtgcctgcaccccctggccaatgagacctttgtggccaaggacaacaagatcctgtgcaacaagtgcaccacccgggaggacagccccaagtgcaagggctgcttcaaggccatcgtggccggggaccagaatgtggagtacaagggcaccgtgtggcacaaggactgcttcacctgcagcaactgcaagcaggtgattggcaccggcagcttcttccccaagggggaggacttctactgtgtgacctgccacgagaccaagtttgccaagcactgtgtgaagtgcaacaaggccatcaccagcggcggcatcacctaccaggaccagccctggcatgctgactgctttgtgtgtgtgacctgcagcaagaagctggccggccagcgcttcaccgctgtggagtag

SEQ ID NO: 296371 - DNA, 624 bp, Artificial Sequence
  derived and/or modified sequence
atggccgagaagtttgactgccactactgccgggaccccctgcagggcaagaagtatgtgcagaaggatggccaccactgctgcctgaagtgctttgacaagttctgtgccaacacctgtgtggagtgcaggaagcccatcggggctgacagcaaggaggtgcactacaagaaccgcttctggcatgacacctgcttccgctgtgccaagtgcctgcaccccctggccaatgagacctttgtggccaaggacaacaagatcctgtgcaacaagtgcaccacccgggaggacagccccaagtgcaagggctgcttcaaggccatcgtggccggggaccagaatgtggagtacaagggcaccgtgtggcacaaggactgcttcacctgcagcaactgcaagcaggtgattggcaccggcagcttcttccccaagggggaggacttctactgtgtgacctgccacgagaccaagtttgccaagcactgtgtgaagtgcaacaaggccatcaccagcggcggcatcacctaccaggaccagccctggcatgctgactgctttgtgtgtgtgacctgcagcaagaagctggccggccagcgcttcaccgctgtggaggaccagtactag

SEQ ID NO: 296372 - DNA, 618 bp, Artificial Sequence
  derived and/or modified sequence
atggccgagaagtttgactgccactactgccgggaccccctgcagggcaagaagtatgtgcagaaggatggccaccactgctgcctgaagtgctttgacaagttctgtgccaacacctgtgtggagtgcaggaagcccatcggggctgacagcaaggaggtgcactacaagaaccgcttctggcatgacacctgcttccgctgtgccaagtgcctgcaccccctggccaatgagacctttgtggccaaggacaacaagatcctgtgcaacaagtgcaccacccgggaggacagccccaagtgcaagggctgcttcaaggccatcgtggccggggaccagaatgtggagtacaagggcaccgtgtggcacaaggactgcttcacctgcagcaactgcaagcaggtgattggcaccggcagcttcttccccaagggggaggacttctactgtgtgacctgccacgagaccaagtttgccaagcactgtgtgaagtgcaacaaggccatcaccagcggcggcatcacctaccaggaccagccctggcatgctgactgctttgtgtgtgtgacctgcagcaagaagctggccggccagcgcttcaccgctgtggaggactag

SEQ ID NO: 296373 - DNA, 783 bp, Artificial Sequence
  derived and/or modified sequence
atggccgagaagtttgactgctgcctgaagtgctttgacaagttctgtgccaacacctgtgtggagtgcaggaagcccatcggggctgacagcaaggaggtgcactacaagaaccgcttctggcatgacacctgcttccgctgtgccaagtgcctgcaccccctggccaatgagacctttgtggccaaggacaacaagatcctgtgcaacaagtgcaccacccgggaggacagccccaagtgcaagggctgcttcaaggccatcgtggccggggaccagaatgtggagtacaagggcaccgtgtggcacaaggactgcttcacctgcagcaactgcaagcaggtgattggcaccggcagcttcttccccaagggggaggacttctactgtgtgacctgccacgagaccaagtttgccaagcactgtgtgaagtgcaacaaggccatcaccagcggcggcatcacctaccaggaccagccctggcatgctgactgctttgtgtgtgtgacctgcagcaagaagctggccggccagcgcttcaccgctgtggaggaccagtactactgtgtggactgctacaagaactttgtggccaagaagtgtgccggctgcaagaaccccatcactggatttgggaagggcagctctgtggtggcctatgagggccagagctggcatgactactgcttccactgcaagaagtgcagcgtgaacctggccaacaagagatttgtgttccaccaggagcaggtgtactgcccagactgtgccaagaagctgtag

SEQ ID NO: 296374 - DNA, 774 bp, Artificial Sequence
  derived and/or modified sequence
atggccgagaagttcgactgccactactgccgggaccccctgcagggcaaaaagtacgtgcaaaaggacggacaccactgttgcctcaagtgctttgataagttctgcgctaacacatgcgtggaatgcagaaaaccgatcggtgctgattcgaaggaggtccattacaagaacaggttttggcatgatacctgcttccgctgcgccaagtgcctccaccccttagctaatgagacgtttgttgcaaaggataataagattctttgtaacaagtgtaccacccgagaagattcacccaagtgtaaggggtgcttcaaagctatcgtggcaggggatcagaacgtggagtacaagggcaccgtgtggcataaagattgctttacctgtagtaactgtaaacaggtgattggtacaggcagcttttttccaaaaggggaggacttttattgtgtaacctgccatgaaacaaagtttgccaaacattgtgtgaaatgcaacaaagcaataacttcggggggcataacctatcaggaccagccgtggcacgcagactgttttgtgtgtgtgacatgtagcaaaaagctcgctggacagcgatttactgctgtcgaggatcagtattactgtgtagactgctataaaaattttgttgccaaaaaatgtgctggctgtaaaaatccgattacggggtttggaaaaggtagctctgtagtcgcgtacgagggacagtcatggcatgactactgctttcattgcaagaaatgcagcgtgtag

SEQ ID NO: 296375 - DNA, 843 bp, Artificial Sequence
  derived and/or modified sequence
atggccgagaagttcgactgccactactgccgggaccccctgcaggggaagaaatatgtccagaaggatgggcaccactgttgcctcaagtgctttgacaagttctgcgctaacacgtgtgtcgagtgcaggaagcctattggcgctgacagcaaggaagtccactacaagaataggttctggcatgatacttgcttcagatgcgccaaatgcttgcatccccttgctaatgaaacattcgtggccaaggataataaaatcctctgcaataagtgtacaaccagagaagactcaccgaagtgtaagggctgcttcaaggctatcgttgcaggtgatcagaacgttgagtacaaaggcacagtctggcataaggactgctttacttgttctaattgtaaacaggtgattggaactggcagttttttcccgaagggggaggacttttactgcgtcacctgccatgagaccaaatttgccaagcactgcgtgaaatgcaataaggcaattacctctggcggaattacataccaagatcaaccctggcacgccgactgtttcgtctgcgtaacctgttcaaagaaattggctggccaacggttcacggcagttgaggaccagtactactgcgtcgactgctacaagaacttcgtagccaagaagtgcgccggttgcaagaaccccattacagggtttggcaaagggagctcagttgtcgcttatgagggacagtcttggcacgactactgcttccattgcaaaaagtgcagtgtcaacttagcgaacaagagatttgtcttccatcaggagcaggtgtactgtcctgactgcgcaaagaaactgtag

SEQ ID NO: 296376 - DNA, 843 bp, Artificial Sequence
  derived and/or modified sequence
atggccgagaagttcgactgccactactgccgggaccccctgcagggaaagaagtatgtgcagaaagacggccatcattgctgcctcaagtgctttgataagttttgcgccaacacctgcgtggaatgtcgcaaaccgatcggcgctgatagcaaagaggtgcattacaaaaacaggttttggcacgacacctgcttccgctgcgcgaagtgtctgcaccctttggccaatgagactttcgtggctaaagacaataagattctctgcaacaaatgcaccactcgggaagactcccctaagtgtaagggctgcttcaaggccattgtagcaggcgatcaaaacgtggagtataaaggtacagtgtggcataaagattgcttcacatgtagtaactgtaagcaagtcatcggtaccggctcattcttcccaaagggggaagacttttattgtgtgacatgccatgagacgaagttcgccaagcattgcgtgaaatgcaacaaagcgattacctccggcggcataacctaccaagaccagccttggcacgcagattgctttgtgtgtgtaacatgcagcaaaaaattggccgggcaacgtttcactgcggtcgaggaccagtattactgtgtcgattgttacaaaaatttcgtggccaaaaaatgcgcgggctgtaagaacccaatcacgggcttcggcaaaggttcctccgtggttgcttatgaaggacagtcctggcacgactactgctttcattgtaaaaaatgttcagtcaacctggcaaacaagcgatttgtgttccaccaggagcaagtgtactgtccagactgtgcgaagaagctgtag

SEQ ID NO: 296377 - DNA, 615 bp, Artificial Sequence
  derived and/or modified sequence
atggccgagaagttcgactgccactactgccgggaccccctgcagggtaagaagtacgtgcagaaggacggacatcactgttgtctgaagtgtttcgacaaattttgcgctaacacctgtgtggaatgccggaagccaatcggcgcagactccaaggaagtccattacaagaatcgattctggcacgatacctgtttccgttgcgcaaaatgtctgcatcccctggccaatgagaccttcgtggctaaagacaataagattttgtgcaataaatgtaccacccgtgaggattccccaaagtgcaagggctgctttaaagcaatcgtggccggcgaccagaacgtcgagtacaagggcactgtttggcacaaggactgctttacatgctctaattgcaagcaggtgatcggcacaggcagttttttccccaaaggcgaggacttctattgcgttacctgtcatgagaccaaattcgccaaacattgtgtaaaatgcaacaaagcaattacatccggcggtatcacataccaggaccagccctggcacgctgattgtttcgtctgtgtgacttgcagcaagaaactagctggccagagattcacagctgtggagtag

SEQ ID NO: 296378 - DNA, 624 bp, Artificial Sequence
  derived and/or modified sequence
atggccgagaagttcgactgccactactgccgggaccccctgcagggcaagaagtacgttcagaaggatggccaccactgctgcctgaaatgtttcgacaaattttgcgccaatacctgcgtcgaatgtcggaagcctatcggcgcagattcaaaagaggtccactacaagaatcggttttggcacgatacctgtttccggtgcgctaagtgcctgcatcccctggcaaacgagactttcgtggctaaagacaacaaaattctgtgcaataagtgtaccacaagagaggattcgcctaagtgtaaaggctgttttaaggctattgtggcaggagaccaaaacgtggagtacaagggtaccgtgtggcacaaagattgtttcacatgtagcaattgtaagcaggtgatcggcacgggatccttctttcctaagggggaagatttctattgtgtgacctgtcacgaaactaagtttgcaaagcattgcgtgaagtgtaataaagcaatcaccagcgggggaattacctaccaagaccagccttggcatgcagattgcttcgtttgtgtcacctgctccaagaagttggccggccaaaggttcaccgctgttgaggaccagtactag

SEQ ID NO: 296379 - DNA, 624 bp, Artificial Sequence
  derived and/or modified sequence
atggccgagaagttcgactgccactactgccgggaccccctgcaggggaagaaatacgtgcaaaaggatggccaccactgctgccttaagtgttttgataaattttgcgcaaacacatgcgtggagtgcagaaaacctattggcgctgatagcaaggaagtgcattacaagaaccgattttggcatgatacttgcttcaggtgcgctaagtgcctgcaccccctcgccaacgaaactttcgtagcaaaagataataaaatcctttgtaataagtgcaccacccgcgaggattctccgaagtgcaaaggctgttttaaagccattgtggccggggatcagaacgtcgagtacaagggaacggtgtggcataaggactgtttcacatgttccaattgcaaacaggtaatcggcactgggtcatttttccccaagggtgaagatttctattgtgtcacatgtcacgagacaaagttcgcaaagcattgtgtcaaatgcaataaggcaattacaagcggtggtataacctatcaggatcaaccctggcacgcagattgttttgtgtgcgtgacctgttcaaagaaactagctggccagcggttcaccgctgtggaggaccagtattag

SEQ ID NO: 296380 - DNA, 618 bp, Artificial Sequence
  derived and/or modified sequence
atggccgagaagttcgactgccactactgccgggaccccctgcagggaaaaaagtacgttcagaaggatgggcatcactgctgcctgaagtgtttcgacaagttttgtgccaacacctgcgtggaatgcagaaaacctatcggggcagattctaaggaggtgcattacaaaaacagattctggcatgacacatgcttccgttgcgccaagtgtctgcatccattggcgaacgaaacttttgtcgcaaaagacaacaaaattctctgtaacaagtgcactacgagggaggattcaccaaagtgcaagggatgctttaaagctattgtggcgggcgatcaaaacgttgaatacaaaggcacggtttggcacaaagactgttttacatgctcaaactgcaagcaggtgattgggacaggaagttttttcccgaagggtgaggacttctactgtgtgacctgccatgaaacaaagtttgccaaacactgtgttaagtgtaataaggcgattacatccggaggaattacatatcaagaccagccgtggcatgccgattgctttgtgtgcgtcacgtgcagtaagaaactcgccggccagagattcacagctgtggaagattag

SEQ ID NO: 296381 - DNA, 843 bp, Artificial Sequence
  derived and/or modified sequence
atggccgagaagttcgactgccactactgccgggaccccctgcagggcaaaaagtacgtccagaaggatggtcaccactgttgtcttaagtgctttgacaaattctgtgccaatacctgcgtcgagtgcaggaaacccatcggagccgacagtaaggaggttcactataaaaacaggttctggcacgacacatgtttcaggtgcgccaagtgtctgcacccccttgctaacgaaactttcgtggcaaaggataacaagattttgtgcaacaagtgtaccactcgcgaagactctcctaaatgcaagggctgtttcaaggctatcgtggcaggggatcagaacgtggagtataagggaaccgtgtggcacaaagactgtttcacctgttcaaactgcaagcaagtcattgggactggctcttttttccctaagggcgaagatttttattgtgtcacctgccacgaaacaaagttcgcaaagcactgtgttaagtgtaacaaggccatcaccagtggtggcatcacctaccaggaccagccttggcatgctgattgcttcgtctgtgtgacatgctccaagaaactggctggacagagatttacagccgtggaggaccaatattactgtgtggactgctataagaattttgtcgccaaaaagtgcgccgggtgcaaaaatcccatcactgggtttggcaagggaagctcagtcgtggcctacgaggggcaaagctggcatgactattgcttccattgcaagaaatgttcagtgaatctggccaacaagagatttgtgtttcatcaggagcaggtttattgtcctgattgcgctaagaagctctag

SEQ ID NO: 296382 - DNA, 783 bp, Artificial Sequence
  derived and/or modified sequence
atggccgagaagttcgactgctgcctgaagtgcttcgacaagttctgcgcaaacacctgcgtcgaatgtcggaagcctataggcgctgattctaaagaagtacactacaagaaccgcttctggcatgacacttgcttccggtgtgctaaatgtctacaccccctggctaatgagacattcgttgcaaaagataacaaaatactgtgcaacaagtgcaccacaagggaagactcaccaaaatgcaagggctgtttcaaggccattgtagcaggggatcagaacgttgagtataaaggcacggtgtggcacaaagactgctttacctgtagcaactgcaaacaggttatcgggactgggtcattcttcccgaagggtgaggatttctattgcgtcacgtgtcatgaaaccaaatttgcaaagcactgcgtcaaatgtaataaagctattacttctggaggaataacctaccaagatcagccctggcacgccgactgtttcgtctgcgtgacatgctccaagaagctggctggacagcgcttcacagctgtagaagaccagtattattgcgtggactgttataagaactttgtggctaaaaaatgcgccggctgcaagaatcctatcaccggcttcggcaagggcagttcagtggtcgcatacgaaggccaatcctggcacgattactgcttccattgtaagaagtgcagcgtcaatctcgctaacaagagatttgttttccaccaggagcaggtgtactgccctgactgtgccaaaaagctgtag

SEQ ID NO: 296383 - DNA, 843 bp, Artificial Sequence
  derived and/or modified sequence
atggccgagaagttcgactgccactactgccgggaccccctgcagggcaagaaatatgtccagaaagacgggcaccattgctgtctgaagtgttttgataaattttgcgcgaacacatgcgttgagtgcaggaaaccaatcggcgcagactctaaggaggtccactataaaaatagattttggcatgacacttgcttcaggtgtgcaaagtgtcttcatcctctggcgaatgaaacattcgtagccaaggacaataaaatcttatgcaacaaatgcaccacccgagaggatagtccaaaatgtaagggctgcttcaaggctatagtggccggcgatcagaatgtcgaatacaaggggaccgtatggcacaaagactgctttacctgtagcaattgtaaacaggtgatcggcactggaagctttttccccaagggagaagacttctattgcgttacttgccatgagactaaattcgcgaagcactgcgtgaaatgtaacaaggctattacttccggaggtattacttatcaggatcagccatggcacgccgattgcttcgtgtgtgtgacctgttctaagaaacttgcggggcagcggtttacagcagtggaggaccaatactattgcgtcgactgctataaaaattttgtggcgaagaaatgtgccggttgtaaaaatcccattacgggattcggaaagggctcttctgttgtcgcttatgagggccaaagctggcatgattactgtttccactgtaaaaagtgtagcgtgaacctggctaataaaagatttgtttttcatcaagagcaggtgtattgtccagattgtgcgaagaaattatag

SEQ ID NO: 296384 - DNA, 774 bp, Artificial Sequence
  derived and/or modified sequence
atggctgagaagttcgactgtcattattgcagggatccgctccagggcaagaagtacgttcagaaggatggacatcattgctgcctaaaatgtttcgacaaattctgcgctaacacatgcgtggagtgtaggaaaccaatcggagcggacagtaaagaggtccactacaagaatcgcttctggcacgatacatgctttagatgtgcaaagtgcctgcacccgctcgctaatgagacattcgtggctaaagataataagatcctatgcaacaaatgtactaccagagaggattcgcctaagtgcaaggggtgtttcaaggcaatagtggccggtgaccagaatgtcgagtacaagggcaccgtgtggcacaaggactgctttacatgttcgaattgtaagcaagtgatcggcactggttctttcttccctaagggagaagatttctattgtgtaacttgtcacgagacaaagttcgcaaaacattgtgtgaaatgcaacaaggctattacctccgggggtattacctatcaggaccaaccctggcacgcagattgcttcgtctgcgtgacctgttctaagaagctcgccggacaacgcttcaccgccgtggaagaccagtattactgtgtggactgttacaagaattttgtggccaagaaatgcgctggctgcaagaatccaatcacaggcttcgggaaggggtcctctgtggtggcctatgagggccaatcctggcacgattattgcttccattgcaaaaaatgtagcgtatag

SEQ ID NO: 296385 - DNA, 843 bp, Artificial Sequence
  derived and/or modified sequence
atggctgagaagtttgactgccattactgccgagaccccctgcaggggaagaagtatgtgcagaaggacggacaccattgctgccttaagtgtttcgataagttctgcgctaacacttgtgttgagtgccgcaaacccatcggcgctgatagtaaggaggtgcactataaaaataggttttggcatgatacttgctttcgatgcgctaaatgcctgcaccctctggctaatgagacttttgttgccaaggataataagattctgtgcaacaagtgcactactagagaagactcccctaagtgtaagggttgttttaaggccatcgtggctggtgaccaaaatgtagaatataagggaacggtgtggcataaggattgtttcacctgttcgaattgcaagcaggtcatcggaactggaagcttttttcctaagggggaagatttttactgcgtgacctgccacgagactaagtttgctaagcactgcgtgaagtgtaataaggcgataacatcaggcggaattacttatcaggaccagccatggcatgccgactgttttgtttgtgtcacatgttccaagaagctggccggacaacgctttactgccgtggaagatcaatactattgtgtggactgttataagaattttgttgccaaaaagtgtgccggatgtaagaaccccattaccggtttcggcaaggggtccagcgtggtcgcttatgaaggtcaatcatggcatgattactgcttccactgcaagaagtgttctgtgaacctggcgaataaaagattcgtgtttcaccaggaacaggtttactgccccgattgcgcaaagaagctgtag

SEQ ID NO: 296386 - DNA, 843 bp, Artificial Sequence
  derived and/or modified sequence
atggccgaaaaattcgattgccattactgccgcgatcctctgcaggggaagaagtatgtgcagaaggacggccatcactgttgtcttaaatgttttgacaaattctgtgctaatacctgtgtggagtgtcgaaagccaatcggtgccgactctaaggaagttcactataagaaccgattttggcacgatacctgctttaggtgcgcaaaatgtcttcatcccctggccaacgaaacatttgttgccaaagataacaagatcctatgtaacaagtgcaccacacgagaggatagcccaaaatgtaaggggtgcttcaaggcaatcgtggctggggaccagaacgtggaatacaaagggactgtctggcacaaggattgtttcacctgctcaaattgtaaacaggtaatcggtaccggctccttctttcctaaaggcgaagacttttactgtgttacgtgccacgaaaccaagttcgccaagcactgtgtgaagtgcaataaggctattacttctgggggtattacataccaagatcagccatggcacgctgactgttttgtatgtgtgacctgttcaaaaaagttggcagggcagagatttactgctgtcgaagatcaatattactgtgttgactgctataagaacttcgtcgccaaaaagtgcgctggttgcaaaaaccccataaccggatttggcaaaggatcaagtgttgtagcatacgagggccaatcctggcatgactactgctttcactgtaagaaatgtagcgtcaacctggcgaataaaaggtttgtctttcaccaagagcaggtgtactgccctgattgcgcaaaaaagttgtag

SEQ ID NO: 296387 - DNA, 615 bp, Artificial Sequence
  derived and/or modified sequence
atggctgaaaagttcgactgccattattgtcgggatccactgcaagggaagaaatacgtgcagaaagacgggcatcactgctgcctgaaatgtttcgacaaattttgcgccaacacatgtgtagagtgtcggaagccaattggggctgattccaaggaggtgcactataagaatcgtttttggcacgacacttgttttcgctgtgccaagtgtctgcacccgctcgcaaatgaaactttcgtggcgaaggataacaaaatcctgtgtaataagtgtactaccagagaagattctcctaaatgcaaagggtgttttaaggctatcgtggcgggtgaccaaaacgtagaatacaaggggaccgtgtggcataaagactgctttacctgtagtaactgcaaacaagtcattgggactggcagttttttccctaaaggcgaggatttttactgtgtgacgtgtcatgaaacaaagtttgctaaacattgtgtgaagtgcaataaagcgattacgtcaggagggattacataccaagatcagccctggcatgccgactgctttgtatgcgtcacatgtagtaagaagctcgctggacagaggtttaccgcagtggaatag

SEQ ID NO: 296388 - DNA, 624 bp, Artificial Sequence
  derived and/or modified sequence
atggccgagaagtttgattgccactactgcagggatcccctccagggaaagaagtacgttcaaaaggacggtcatcattgctgtctcaagtgctttgacaagttctgtgcgaacacttgtgtcgagtgccggaagcccataggagctgacagtaaagaagttcattacaagaaccgtttctggcatgatacatgctttcgctgtgccaaatgtctccatccccttgccaatgagacctttgtagctaaggacaacaagatcttatgtaacaaatgtactacccgagaggattcaccaaaatgcaagggatgcttcaaggccatcgtggcaggagaccagaatgtagaatacaaaggcactgtctggcataaagactgtttcacatgttctaactgtaagcaggtaattggcacaggctcttttttccctaagggcgaggatttctattgtgtgacatgtcatgaaaccaagttcgcgaagcattgcgtgaaatgtaacaaggcaatcacctccgggggtatcacctaccaagatcaaccatggcacgctgactgcttcgtctgtgtaacgtgtagtaagaagctcgcagggcaaaggttcactgcagtggaggaccaatattag

SEQ ID NO: 296389 - DNA, 624 bp, Artificial Sequence
  derived and/or modified sequence
atggctgagaagttcgattgccactactgccgcgaccccctccaaggcaaaaagtatgtgcaaaaggacgggcatcattgttgcctgaagtgctttgataagttctgtgcaaatacatgcgtcgagtgccgaaagccaattggggctgatagtaaagaagtgcattacaagaaccgcttctggcatgacacttgtttccgatgcgccaaatgtctccaccctctggcaaatgaaactttcgtcgcaaaagataataagatcctttgtaataagtgtaccactagagaggatagccctaagtgtaagggttgtttcaaggcaatagtggcgggtgatcaaaacgttgaatataaaggcactgtgtggcacaaagactgctttacatgtagtaattgcaagcaggtgattggaacaggctccttttttccgaagggggaagatttctactgtgtgacctgccacgaaaccaagttcgctaaacattgtgtgaaatgcaacaaggcaattacttccggagggattacgtatcaggaccagccatggcacgcggactgttttgtgtgcgtaacgtgttcgaagaaactcgctggacagcgtttcaccgccgtggaagatcagtattag

SEQ ID NO: 296390 - DNA, 618 bp, Artificial Sequence
  derived and/or modified sequence
atggccgagaagtttgactgtcactattgccgggacccgcttcaggggaagaagtacgttcagaaggacggtcaccactgttgcttaaagtgtttcgataaattttgcgccaacacctgtgttgagtgcaggaagccaatcggggctgacagtaaggaagtccattacaagaaccggttctggcacgatacatgttttcggtgtgccaagtgcctgcacccgctggcgaacgagacctttgttgccaaagataataagatattatgcaacaaatgtactacgcgcgaagattctccaaaatgtaaaggatgcttcaaagctatcgtggctggggatcaaaatgttgagtacaaagggactgtctggcacaaagattgttttacatgttcaaattgcaagcaggtgattggcactggctcgttcttcccaaagggcgaggacttctattgtgtgacatgtcatgaaacaaagtttgctaaacactgcgtcaaatgcaacaaagcgattacttccggcggtatcacgtaccaggatcagccctggcacgcagactgttttgtatgcgtaacctgcagcaaaaagcttgcaggacaacgcttcaccgcagttgaagattag

SEQ ID NO: 296391 - DNA, 843 bp, Artificial Sequence
  derived and/or modified sequence
atggccgaaaagttcgattgccattactgtagggatcccctccagggcaagaaatacgttcagaaggacgggcaccattgctgtctgaagtgtttcgacaaattttgcgccaatacatgcgtcgaatgtcgaaagcccatcggtgccgatagcaaggaagtgcactataagaaccgattttggcatgatacatgttttcggtgcgcaaagtgtctccacccattggccaatgaaactttcgttgccaaggataataagatcctgtgcaataagtgtacaactcgcgaagactcccctaaatgtaagggatgcttcaaagctattgtggcaggcgatcaaaatgttgagtataagggcacagtttggcacaaggattgctttacgtgcagcaattgcaaacaggtgatcgggacaggttctttctttccgaaaggtgaagacttctactgtgtgacctgccacgagaccaagtttgccaaacattgcgtgaaatgcaacaaagccatcaccagtggcggtatcacgtatcaggaccaaccctggcacgccgactgctttgtttgcgtaacctgcagcaaaaagctggccggtcaacgcttcaccgccgtcgaagaccagtattattgtgtggattgctacaagaactttgtcgcgaaaaagtgcgccggatgcaaaaacccgataactgggttcggcaaggggagcagtgttgtagcctatgaagggcagtcctggcacgattactgcttccattgtaaaaagtgtagtgtgaatctagcaaacaagaggtttgtgttccatcaggagcaggtctattgtcccgattgtgctaaaaagctgtag

SEQ ID NO: 296392 - DNA, 783 bp, Artificial Sequence
  derived and/or modified sequence
atggctgaaaagttcgattgctgtctcaaatgcttcgataagttttgcgctaacacttgcgtcgagtgccgtaaacccattggcgcagactcaaaggaagttcattacaaaaacaggttctggcatgatacctgctttcgctgcgctaagtgcttgcaccccctggctaacgaaacttttgtggccaaggataacaagattttgtgtaataaatgtaccactcgcgaggactcccctaaatgtaagggatgcttcaaagctattgtcgccggtgaccagaacgttgaatataaaggaactgtgtggcacaaggattgtttcacttgcagcaactgtaagcaagtaattggtactgggtcgtttttcccaaaaggggaggacttctattgtgtgacttgtcacgaaacgaagttcgcaaagcactgcgtgaagtgtaataaagcgattacttctggaggaatcacctatcaggaccagccctggcatgcagactgcttcgtgtgcgtgacctgcagcaaaaagcttgcaggtcagcgctttaccgccgtcgaagaccagtattactgcgtcgactgttacaagaactttgtagctaagaaatgcgccggttgtaagaaccctattaccggattcggtaaaggttccagtgtcgttgcctacgagggacaaagttggcatgactactgtttccattgcaaaaagtgttcagtgaacctggccaataaacggtttgtgtttcaccaggagcaggtgtactgtcccgactgtgcgaaaaagctgtag

SEQ ID NO: 296393 - DNA, 843 bp, Artificial Sequence
  derived and/or modified sequence
atggccgagaagttcgattgccattactgccgggacccgctgcagggaaagaagtacgtccagaaggacgggcatcactgttgcctcaaatgctttgataaattttgtgcaaatacctgtgtggaatgtaggaaacccatcggcgcagactcaaaggaagtgcactacaagaatagattttggcacgacacttgcttccgatgcgcgaaatgtttgcacccgcttgccaacgagaccttcgtagcaaaggacaataagatactttgtaataaatgtacgactcgggaggatagtcccaagtgtaagggatgcttcaaggcaattgttgcaggggatcagaacgtggagtacaaggggaccgtgtggcataaggactgtttcacttgttcaaactgtaaacaggtcatcggaactggcagcttctttcctaagggggaagatttctactgcgtcacctgccacgaaacaaagttcgcaaaacattgcgtgaagtgcaacaaggccataacatcagggggtattacataccaggaccagccctggcatgctgattgctttgtttgcgtgacctgttccaaaaaattagctggacaacggttcaccgccgtggaggaccagtattattgtgtggattgttacaagaatttcgtagccaagaagtgcgctggctgcaagaatccaatcaccggttttggcaaagggagctctgtggtagcttacgagggccaatcatggcacgactactgcttccactgcaagaagtgctcagtaaatttggcgaacaaacgcttcgtgttccaccaagagcaggtgtactgccctgactgtgcaaagaagctgtag

SEQ ID NO: 296394 - DNA, 774 bp, Artificial Sequence
  derived and/or modified sequence
atggccgagaagttcgactgccactactgcagagaccccctgcagggcaagaagtacgtgcagaaggacggccaccactgctgcctgaagtgcttcgacaagttctgcgccaacacctgcgtggagtgcagaaagcccatcggcgccgacagcaaggaggtgcactacaagaacagattctggcacgacacctgcttcagatgcgccaagtgcctgcaccccctggccaacgagaccttcgtggccaaggacaacaagatcctgtgcaacaagtgcaccaccagagaggacagccccaagtgcaagggctgcttcaaggccatcgtggccggcgaccagaacgtggagtacaagggcaccgtgtggcacaaggactgcttcacctgcagcaactgcaagcaggtgatcggcaccggcagcttcttccccaagggcgaggacttctactgcgtgacctgccacgagaccaagttcgccaagcactgcgtgaagtgcaacaaggccatcaccagcggcggcatcacctaccaggaccagccctggcacgccgactgcttcgtgtgcgtgacctgcagcaagaagctggccggccagagattcaccgccgtggaggaccagtactactgcgtggactgctacaagaacttcgtggccaagaagtgcgccggctgcaagaaccccatcaccggcttcggcaagggcagcagcgtggtggcctacgagggccagagctggcacgactactgcttccactgcaagaagtgcagcgtgtag

SEQ ID NO: 296395 - DNA, 843 bp, Artificial Sequence
  derived and/or modified sequence
atggccgagaagttcgactgccactactgcagagaccccctgcagggcaagaagtacgtgcagaaggacggccaccactgctgcctgaagtgcttcgacaagttctgcgccaacacctgcgtggagtgcagaaagcccatcggcgccgacagcaaggaggtgcactacaagaacagattctggcacgacacctgcttcagatgcgccaagtgcctgcaccccctggccaacgagaccttcgtggccaaggacaacaagatcctgtgcaacaagtgcaccaccagagaggacagccccaagtgcaagggctgcttcaaggccatcgtggccggcgaccagaacgtggagtacaagggcaccgtgtggcacaaggactgcttcacctgcagcaactgcaagcaggtgatcggcaccggcagcttcttccccaagggcgaggacttctactgcgtgacctgccacgagaccaagttcgccaagcactgcgtgaagtgcaacaaggccatcaccagcggcggcatcacctaccaggaccagccctggcacgccgactgcttcgtgtgcgtgacctgcagcaagaagctggccggccagagattcaccgccgtggaggaccagtactactgcgtggactgctacaagaacttcgtggccaagaagtgcgccggctgcaagaaccccatcaccggcttcggcaagggcagcagcgtggtggcctacgagggccagagctggcacgactactgcttccactgcaagaagtgcagcgtgaacctggccaacaagagattcgtgttccaccaggagcaggtgtactgccccgactgcgccaagaagctgtag

SEQ ID NO: 296396 - DNA, 615 bp, Artificial Sequence
  derived and/or modified sequence
atggccgagaagttcgactgccactactgcagagaccccctgcagggcaagaagtacgtgcagaaggacggccaccactgctgcctgaagtgcttcgacaagttctgcgccaacacctgcgtggagtgcagaaagcccatcggcgccgacagcaaggaggtgcactacaagaacagattctggcacgacacctgcttcagatgcgccaagtgcctgcaccccctggccaacgagaccttcgtggccaaggacaacaagatcctgtgcaacaagtgcaccaccagagaggacagccccaagtgcaagggctgcttcaaggccatcgtggccggcgaccagaacgtggagtacaagggcaccgtgtggcacaaggactgcttcacctgcagcaactgcaagcaggtgatcggcaccggcagcttcttccccaagggcgaggacttctactgcgtgacctgccacgagaccaagttcgccaagcactgcgtgaagtgcaacaaggccatcaccagcggcggcatcacctaccaggaccagccctggcacgccgactgcttcgtgtgcgtgacctgcagcaagaagctggccggccagagattcaccgccgtggagtag

SEQ ID NO: 296397 - DNA, 624 bp, Artificial Sequence
  derived and/or modified sequence
atggccgagaagttcgactgccactactgcagagaccccctgcagggcaagaagtacgtgcagaaggacggccaccactgctgcctgaagtgcttcgacaagttctgcgccaacacctgcgtggagtgcagaaagcccatcggcgccgacagcaaggaggtgcactacaagaacagattctggcacgacacctgcttcagatgcgccaagtgcctgcaccccctggccaacgagaccttcgtggccaaggacaacaagatcctgtgcaacaagtgcaccaccagagaggacagccccaagtgcaagggctgcttcaaggccatcgtggccggcgaccagaacgtggagtacaagggcaccgtgtggcacaaggactgcttcacctgcagcaactgcaagcaggtgatcggcaccggcagcttcttccccaagggcgaggacttctactgcgtgacctgccacgagaccaagttcgccaagcactgcgtgaagtgcaacaaggccatcaccagcggcggcatcacctaccaggaccagccctggcacgccgactgcttcgtgtgcgtgacctgcagcaagaagctggccggccagagattcaccgccgtggaggaccagtactag

SEQ ID NO: 296398 - DNA, 618 bp, Artificial Sequence
  derived and/or modified sequence
atggccgagaagttcgactgccactactgcagagaccccctgcagggcaagaagtacgtgcagaaggacggccaccactgctgcctgaagtgcttcgacaagttctgcgccaacacctgcgtggagtgcagaaagcccatcggcgccgacagcaaggaggtgcactacaagaacagattctggcacgacacctgcttcagatgcgccaagtgcctgcaccccctggccaacgagaccttcgtggccaaggacaacaagatcctgtgcaacaagtgcaccaccagagaggacagccccaagtgcaagggctgcttcaaggccatcgtggccggcgaccagaacgtggagtacaagggcaccgtgtggcacaaggactgcttcacctgcagcaactgcaagcaggtgatcggcaccggcagcttcttccccaagggcgaggacttctactgcgtgacctgccacgagaccaagttcgccaagcactgcgtgaagtgcaacaaggccatcaccagcggcggcatcacctaccaggaccagccctggcacgccgactgcttcgtgtgcgtgacctgcagcaagaagctggccggccagagattcaccgccgtggaggactag

SEQ ID NO: 296399 - DNA, 783 bp, Artificial Sequence
  derived and/or modified sequence
atggccgagaagttcgactgctgcctgaagtgcttcgacaagttctgcgccaacacctgcgtggagtgcagaaagcccatcggcgccgacagcaaggaggtgcactacaagaacagattctggcacgacacctgcttcagatgcgccaagtgcctgcaccccctggccaacgagaccttcgtggccaaggacaacaagatcctgtgcaacaagtgcaccaccagagaggacagccccaagtgcaagggctgcttcaaggccatcgtggccggcgaccagaacgtggagtacaagggcaccgtgtggcacaaggactgcttcacctgcagcaactgcaagcaggtgatcggcaccggcagcttcttccccaagggcgaggacttctactgcgtgacctgccacgagaccaagttcgccaagcactgcgtgaagtgcaacaaggccatcaccagcggcggcatcacctaccaggaccagccctggcacgccgactgcttcgtgtgcgtgacctgcagcaagaagctggccggccagagattcaccgccgtggaggaccagtactactgcgtggactgctacaagaacttcgtggccaagaagtgcgccggctgcaagaaccccatcaccggcttcggcaagggcagcagcgtggtggcctacgagggccagagctggcacgactactgcttccactgcaagaagtgcagcgtgaacctggccaacaagagattcgtgttccaccaggagcaggtgtactgccccgactgcgccaagaagctgtag

SEQ ID NO: 296400 - protein, 431 aa, Artificial Sequence
  derived and/or modified sequence
MAATDIARQVGEGCRTVPLAGHVGFDSLPDQLVNKSVSQGFCFNILCVGETGLGKSTLMDTLFNTKFEGEPATHTQPGVQLQSNTYDLQESNVRLKLTIVSTVGFGDQINKEDSYKPIVEFIDAQFEAYLQEELKIRRVLHTYHDSRIHVCLYFIAPTGHSLKSLDLVTMKKLDSKVNIIPIIAKADAISKSELTKFKIKITSELVSNGVQIYQFPTDDESVAEINGTMNAHLPFAVIGSTEELKIGNKMMRARQYPWGTVQVENEAHCDFVKLREMLIRVNMEDLREQTHTRHYELYRRCKLEEMGFKDTDPDSKPFSLQETYEAKRNEFLGELQKKEEEMRQMFVQRVKEKEAELKEAEKELHEKFDRLKKLHQDEKKKLEDKKKSLDDEVNAFKQRKTAAELLQSQGSQAGGSQTLKRDKEKKNLGFL

SEQ ID NO: 296401 - DNA, 1296 bp, Artificial Sequence
  derived and/or modified sequence
atggcagccaccgatatcgcacggcaggtgggggaaggatgtcgtaccgtgcccctggccggacatgtggggttcgatagcctacccgaccagttggtaaataaatcggtctcccagggcttctgcttcaacatcctgtgcgtgggcgagaccggtctcggcaagtcaactctgatggataccctgttcaacacaaagtttgaaggcgagcctgctacccacacacagccaggagtccagttgcagtcaaacacatacgatctacaggagtcaaacgtgaggttgaaactaacgatcgtgagcactgtcggctttggcgaccagatcaacaaagaagactcctataaaccaattgttgaatttatcgacgcccagtttgaggcctatctgcaagaggaactcaaaatccgaagagttctacatacttaccacgactcccgaatccacgtgtgtctgtacttcatcgcgcctacaggccattcactgaagagtctggatttggttaccatgaagaaactggactccaaagtgaacattattccgattatcgcaaaggcagacgctatctccaagagcgaattgacaaagttcaaaataaaaatcacttctgagctcgttagtaacggagtgcagatatatcagtttccaaccgacgatgaatcagtggccgagataaatggtacaatgaatgcacaccttccttttgctgttatcggctctaccgaggagcttaagattggcaataagatgatgagggcccggcagtacccttgggggaccgtacaggtggaaaacgaagctcactgtgactttgtgaaactgagggagatgctaatccgggtgaatatggaagatcttcgtgagcagacccacacacggcactatgagttgtaccgaaggtgtaagttagaggaaatggggttcaaggataccgaccccgactcgaagccattcagccttcaggagacatacgaagccaagaggaatgagttcctaggcgaactgcagaagaaggaggaagaaatgcggcagatgtttgtgcaaagggtgaaagagaaggaagctgagctgaaagaggccgagaaggaactccatgagaaatttgataggcttaagaagctgcaccaggatgagaagaagaagctggaagacaagaagaagtcactcgacgatgaagtgaacgcattcaagcagagaaagactgcggccgagctgctacaaagtcaggggtctcaggctggagggagccagacacttaagagggataaggaaaagaagaacctggggtttctctag

SEQ ID NO: 296402 - DNA, 1296 bp, Artificial Sequence
  derived and/or modified sequence
atggccgccacagacatcgcccggcaggtgggggagggctgcaggacagtgcccctggccggccacgtgggctttgacagcctgcctgaccagctggtgaacaagtctgtgtcccagggcttctgcttcaacatcctgtgtgtgggggagaccggcctgggcaagagcaccctgatggacaccctcttcaacaccaagtttgaaggagagcccgccacccacacccagcccggggtgcagctgcagagcaacacctatgacctgcaggagagcaatgtgcggctgaagctgaccatcgtgtccacagtgggctttggagaccagatcaacaaggaggacagctacaagcccatcgtggagttcattgatgcccagtttgaggcctacctgcaggaggagctgaagatcagaagagtgctgcacacctaccatgacagccgcatccacgtgtgcctgtacttcatcgcccccaccggccacagcctgaagagcctggacctggtgaccatgaagaagctggacagcaaggtgaacatcatccccatcatcgccaaggcagatgccatcagcaagtctgagctgaccaagttcaagatcaagatcaccagcgagctggtgtccaatggagtgcagatctaccagttccccacagatgatgaatctgtggccgagatcaatggcaccatgaatgcccacctgccctttgctgtgattggcagcacagaggagctgaagattggcaacaagatgatgagggcccggcagtacccctggggcaccgtgcaggtggagaatgaggcccactgtgactttgtgaagctgcgggagatgctgatccgggtgaacatggaggacctgcgggagcagacccacaccaggcactatgagctgtaccgccgctgcaagctggaggagatgggcttcaaggacacagatcctgacagcaagcccttcagcctgcaggagacctatgaggccaagagaaatgagttcctgggggagctgcagaagaaggaggaggagatgaggcagatgtttgtgcagagggtgaaggagaaggaggccgagctgaaggaggccgagaaggagctgcacgagaagtttgaccggctgaagaagctgcaccaggatgagaagaagaagctggaggacaagaagaagagcctggatgatgaggtgaatgccttcaagcagaggaagacagctgctgagctgctgcagagccagggcagccaggccggcggcagccagaccctgaagagggacaaggagaagaagaacctgggcttcctgtag

SEQ ID NO: 296403 - DNA, 1296 bp, Artificial Sequence
  derived and/or modified sequence
atggccgccaccgacatcgcccggcaggtgggcgagggctgccggacagtaccactggccggtcatgtgggctttgatagcttgcccgaccaattggtgaacaagtccgtgtctcaagggttttgcttcaatatactgtgtgtcggagagacgggcctggggaaaagtacactgatggatacactattcaatacgaaattcgagggtgagcctgcaactcacacacagcccggggtgcaactgcagtcaaacacttacgatttacaagaaagtaatgtgcggctgaagcttaccattgtaagcaccgtgggcttcggagatcagatcaataaggaagactcttataaaccaattgtggaatttatagacgctcaatttgaggcatatctgcaagaagaactaaagattcggagagtgctgcacacttaccacgatagccggatccacgtgtgcctctacttcatcgcccccacaggacactctttgaagagtctcgacctcgtgactatgaagaagctggattccaaggtgaacatcattcctattatcgcgaaggcggacgccatttccaagagcgagctaactaaattcaagattaagattacctccgagcttgtctcaaatggcgttcaaatttaccagttccccaccgacgatgaaagcgtggcagagataaatggcaccatgaatgcgcacctgccatttgcagtaataggctcaactgaggaactcaagattggaaataagatgatgcgagcccgacaatatccatggggtacggtgcaagtggagaacgaggcccactgcgatttcgtgaaactcagagagatgctgattagggtgaatatggaggacctgcgagagcagacacatactagacactatgaactttaccggaggtgtaagctggaggaaatgggatttaaagataccgatcccgactcgaagccttttagtttgcaggagacatatgaggccaaacgtaatgagtttctgggcgagctccaaaagaaggaagaggagatgcgccagatgtttgtccaacgggtgaaggagaaggaggctgaactgaaagaggcggagaaggagctgcatgaaaaatttgatagacttaagaaacttcatcaggacgagaagaagaagctggaagacaaaaagaagtcccttgatgacgaagtcaacgcgttcaagcagaggaagacagcagctgaactgctgcagtctcaggggtctcaggctgggggcagccagaccctgaaacgtgataaggaaaagaagaacctcggctttctttag

SEQ ID NO: 296404 - DNA, 1296 bp, Artificial Sequence
  derived and/or modified sequence
atggccgctaccgatatcgctaggcaagtcggagagggctgtaggaccgtgccactggccggacacgtgggattcgacagcctgccagatcagctggtcaacaagagcgttagtcagggattctgctttaatatcttgtgtgtcggcgaaactgggttgggtaaatcaactctcatggacactctcttcaatactaagttcgaaggcgaaccagctacacacacccagccgggtgtgcaactgcagtccaacacatacgacctccaggaaagcaatgtccggcttaagttaaccatcgtttcgacagtaggcttcggcgatcagatcaataaggaagattcttacaaaccaatagtcgaattcattgacgcgcagttcgaggcatacctccaggaggagctgaagatcagacgagttctccatacctaccatgattcaagaattcacgtgtgcctttactttatcgctcccactggccatagcctgaagtcacttgatcttgtgaccatgaagaaattggattctaaagtcaacataattccaatcatcgcaaaagccgacgcaataagcaaatctgaacttaccaagtttaagattaaaataacatccgaactcgtgtctaacggtgtgcagatctaccagttcccaactgatgatgagtctgtggcagagatcaacggaactatgaatgcgcacctcccattcgccgtgattgggagtactgaagagctgaagattgggaacaagatgatgcgagccaggcagtacccctggggcacagtgcaggtggagaacgaagcccattgtgactttgtaaagttgcgggagatgttaatccgggtgaatatggaagacctgagagagcaaactcataccagacactacgaattgtatagacggtgcaagttggaggaaatggggtttaaggatacggatcctgactcaaaaccttttagcctgcaagagacgtatgaagccaagcgaaatgagttcttgggagagctccaaaagaaggaggaggagatgcgacaaatgttcgtgcagagagtgaaggagaaggaagctgaactcaaggaagctgagaaggaactccatgagaagtttgatagactgaagaaactgcaccaggatgagaagaaaaaactcgaggacaagaagaagtcgctggacgacgaggtgaacgctttcaagcagcggaaaacggctgcggagctactgcagagccagggttctcaagctggcggttctcaaactttgaagcgggataaggaaaagaaaaacctaggattcttgtag

SEQ ID NO: 296405 - DNA, 4652 bp, Artificial Sequence
  derived and/or modified sequence
gaagaactggaactggtctggccatagggggaagcggcgcgttaaatccgccccctctccataccctactttcaaggggtgggcggtagaggggaggttggggttggagcagcggcgagggggcccctcccttgcacctccccccaccggacttggtcgcgcccgaagtgtaacactttctctttgtcggaggagctcctctgtttcctgtgcagtagctcccgttgcggcggcacccgtggcagccctggcggacgcaggagcgatggcagcgaccgatatagctcgccaggtgggtgaaggttgccgaactgtccccctggctggacatgtggggtttgacagcttgcctgaccagctggtgaataagtccgtcagccagggcttctgcttcaacatcctgtgcgtgggagagacaggtttgggcaagtccaccctcatggacaccctgttcaacaccaaattcgaaggggagccagccacccacacacagccgggtgtccagctccagtctaatacctatgacctccaagagagcaacgtgaggctaaagctcacgatcgttagcacagttggctttggggaccagatcaacaaagaggacagctacaagcctatcgtggaattcatcgatgcacaattcgaggcctacctgcaggaagagctaaagatccgaagagtgctacacacctaccatgactcccgaatccatgtctgcttgtatttcattgcccccacgggtcattccctgaagtctctggacctagtgactatgaagaagctggacagtaaggtgaacatcatccccatcattgccaaagcagatgccatttcgaagagtgagctaacaaagttcaaaatcaaaatcaccagcgagcttgtcagcaacggagtccagatctatcagtttcctacagatgatgagtcggtggcagagatcaatggaaccatgaacgcccacctgccgtttgctgtcattggcagcacagaagaactgaagataggcaacaagatgatgagggcgcggcagtatccttggggcactgtgcaggttgaaaacgaggcccactgcgactttgtgaagctgcgggagatgctgattcgggtcaacatggaggatctgcgggagcagacccacacccggcactatgagctgtatcgccgctgtaagctggaggagatgggcttcaaggacaccgaccctgacagcaaacccttcagtttacaggagacatatgaggccaaaaggaacgagttcctaggggaactccagaaaaaagaagaggagatgagacagatgttcgtccagcgagtcaaagagaaagaagcggagctcaaagaggcagagaaagagctgcacgagaagtttgaccgtctgaagaaactgcaccaggacgagaagaagaaactggaggataagaagaaatccctggatgatgaagtgaatgctttcaagcaaagaaagacggcggctgagctgctccagtcccagggctcccaggctggaggctcacagactctgaagagagacaaagagaagaaaaatttgggcttcctgtagacacccttttcctgcgcaacagagctgggcctccctttctctaatttcccccttaacatgcctggggggcatacaatccaacccgcgccctctcctctcttcctgccaaggtttatagaaacctgagaatctgagggtgatgtctggccgctggtcaagaagccaacagtcatgtggctcgcagatgcatcctgcatcccagtccccctcccagcacccccagccatcccccctgtcttcccccacatctttgccagaggtgtgacatggtcagggggcccatctgctactctttcccaccagctcccctgttccagttctggttgctgttagtttccctgaggtatttgcaaccaccatggctgggtaaccaccgatcagcacagctgtccccttggtctcctgtatcccagtcactagtcctccctggtccaccccaccctcatcctcaggagccacagccatttcttagagggtttcaaaaggacagcctttggcgccttttccttctaacctttgagtccagccctttccagttttcattcactcgaagtaactgcactcaagctgtgctcaaaatcggcaacgcatttatttacaccaagcccttcccataaaacacaactgctgaagaaaatagcagacgtttcccctctctctaactctgggtatcccacagatgcaaaagggagaataaacctgaatattattaccagcctagagtcttgaatgatagccttaccgaattcttcttgtgaggtatttcagcatctcggggggtaatttccggaagggctccatactgtcccaataaggtgaggccagtagcaggaataataaatcccactttgtaggctggaaaactgagctgtcaaaagaatcaagtgtttgggggtttgctctgatgagtcttctagttcatttggtgaatgtcatgatgatttttaacatgcattttgcatgcatcccccaataagaagagatgagactcggccggagagaagaaaaggcccttaactttctttccaatttaaggagttgagagtttaaaaatattccagccctaagtttttatcatgggtcccatctgatagtggctttgggaacctctgtgaagtagagagccctcccttgtcagggttatgaggcacagtggcctttggtgtttggccagtgacagtgtgagagatggagttgacctggcaatgatctgtggctaacatgccgtctctctgcccttcctttgcagtaatccatggctgtgtactgaatagtattccccgctacagctggactggactccatttagccttttaagccgaggttcctattttaactgacagctttcctttggggtgccaggcagcgaggccccccacccctatcctgccatgtacttcaagctcacttcttctttttgagttccgcaacttgctcctgcctcccagccccactggcactgaccatgaccacctacttctattttttttttagagtttctttttttgatcacttactttcaaagcacacagtcaaacaaggttatgccaaatttccaggcctttttgaagtattgagaaggggaaggggatttctcacttcaattatagatcataataggaagcaaaaagaaaaaaatgaaaagcaaacatatgcacgcacttttcttgttgacaaagcaagaatataggtttgctgtgtaggtttggtgctctattgattggtgagtgaccagagcaagtatgaaggtgatgctgccaaagcacaagccagtttcttgggaaaattcaagttacagtggagtatttttttgaagaccatatgcttggaggtagaaacaaaccaacgaccaaaaaaaaaaaaaaaaaaatctgctcagatactcagccagtagctcagagagatgctgagttaggcctgtcaggtctccttgggaaaggcttcatatttgcaactttgatgattctatgtccagcttcagagctgctttcccagaaattcacgcttaaacaaccaaccggtaaccaccacttccccacaccgccgcccggtaattatttgcattacaaaccggaggcgccctcatttgcatttgtgtacagattaactagttaaggcttgagaagctctgaataattcaaaagtattagacccacacagccttggagagaccttcagaaactaaggaggagttttatattaagggagacattttagtcagtaagacgatataacctacttactccgtaaggggaaatgaaggcccagagaagggaagggacttgaccgaggtcccacttctgtttcgaggcagaagccagactaattttcatgcctcctgactcccaatcagtttcacaaagggattcaatctgtttatatacgttacattcctggatacgaggtcttttgatgttcagagtaactgactagttagtattagaagaccctcgaggtttttttccacagaaaaacatctgaagatggattgggtgagggctggcaaaacgaaggcatgccgggccagctccttaacccaatgacccagtgatgctgcaaggctggaacggggtccaggagactgtgtgtaacaggtgccctaggtgacccttataatcagggaagtttggtgaacaaaaatcgaacccatgagtgaacataaattaaaaagttgatcaacctattaaaatgtgtatttcattgggtagcttttctcactgtagacagattttttccttcttcaatgaaaaggcttttaaattagtacaactgttactatttaaaaaaaaaataccctaagtactctgtttacttctggtgaaacaaaaccagtcattagaaatggtctgtgcttttattttcccagactggagtggcttttctgaaacacacacacacacacacacacacacacacacacacacacacacacacacgtacacacatccctcacttctcttaagccaagaagtttgctttccctagctgcagtgtagatggctcttgtttttgtttttttgttttaatcatttggcattcacatgtggctgttaatatgtgcttgtttttaattaaaacaagaagctttaaa

SEQ ID NO: 296406 - DNA, 1296 bp, Artificial Sequence
  derived and/or modified sequence
atggccgccaccgacatcgccagacaggtgggcgagggctgcagaaccgtgcccctggccggccacgtgggcttcgacagcctgcccgaccagctggtgaacaagagcgtgagccagggcttctgcttcaacatcctgtgcgtgggcgagaccggcctgggcaagagcaccctgatggacaccctgttcaacaccaagttcgagggcgagcccgccacccacacccagcccggcgtgcagctgcagagcaacacctacgacctgcaggagagcaacgtgagactgaagctgaccatcgtgagcaccgtgggcttcggcgaccagatcaacaaggaggacagctacaagcccatcgtggagttcatcgacgcccagttcgaggcctacctgcaggaggagctgaagatcagaagagtgctgcacacctaccacgacagcagaatccacgtgtgcctgtacttcatcgcccccaccggccacagcctgaagagcctggacctggtgaccatgaagaagctggacagcaaggtgaacatcatccccatcatcgccaaggccgacgccatcagcaagagcgagctgaccaagttcaagatcaagatcaccagcgagctggtgagcaacggcgtgcagatctaccagttccccaccgacgacgagagcgtggccgagatcaacggcaccatgaacgcccacctgcccttcgccgtgatcggcagcaccgaggagctgaagatcggcaacaagatgatgagagccagacagtacccctggggcaccgtgcaggtggagaacgaggcccactgcgacttcgtgaagctgagagagatgctgatcagagtgaacatggaggacctgagagagcagacccacaccagacactacgagctgtacagaagatgcaagctggaggagatgggcttcaaggacaccgaccccgacagcaagcccttcagcctgcaggagacctacgaggccaagagaaacgagttcctgggcgagctgcagaagaaggaggaggagatgagacagatgttcgtgcagagagtgaaggagaaggaggccgagctgaaggaggccgagaaggagctgcacgagaagttcgacagactgaagaagctgcaccaggacgagaagaagaagctggaggacaagaagaagagcctggacgacgaggtgaacgccttcaagcagagaaagaccgccgccgagctgctgcagagccagggcagccaggccggcggcagccagaccctgaagagagacaaggagaagaagaacctgggcttcctgtag

SEQ ID NO: 296407 - protein, 427 aa, Artificial Sequence
  derived and/or modified sequence
MAATDIARQVGEGCRTVPLAGHVGFDSLPDQLVNKSVSQGFCFNILCVGETGLGKSTLMDTLFNTKFEGEPATHTQPGVQLQSNTYDLQESNVRLKLTIVSTVGFGDQINKEDSYKPIVEFIDAQFEAYLQEELKIRRVLHTYHDSRIHVCLYFIAPTGHSLKSLDLVTMKKLDSKVNIIPIIAKADAISKSELTKFKIKITSELVSNGVQIYQFPTDDESVAEINGTMNAHLPFAVIGSTEELKIGNKMMRARQYPWGTVQVENEAHCDFVKLREMLIRVNMEDLREQTHTRHYELYRRCKLEEMGFKDTDPDSKPFSLQETYEAKRNEFLGELQKKEEEMRQMFVQRVKEKEAELKEAEKELHEKFDRLKKLHQDEKKKLEDKKKSLDDEVNAFKQRKTAAELLQSQGSQAGGSQTLKRDKEKKN

SEQ ID NO: 296408 - protein, 457 aa, Artificial Sequence
  derived and/or modified sequence
MAATDIARQVFGRRRLLLLGFETVGFSAACTEEGGHMLRRGEGCRTVPLAGHVGFDSLPDQLVNKSVSQGFCFNILCVGETGLGKSTLMDTLFNTKFEGEPATHTQPGVQLQSNTYDLQESNVRLKLTIVSTVGFGDQINKEDSYKPIVEFIDAQFEAYLQEELKIRRVLHTYHDSRIHVCLYFIAPTGHSLKSLDLVTMKKLDSKVNIIPIIAKADAISKSELTKFKIKITSELVSNGVQIYQFPTDDESVAEINGTMNAHLPFAVIGSTEELKIGNKMMRARQYPWGTVQVENEAHCDFVKLREMLIRVNMEDLREQTHTRHYELYRRCKLEEMGFKDTDPDSKPFSLQETYEAKRNEFLGELQKKEEEMRQMFVQRVKEKEAELKEAEKELHEKFDRLKKLHQDEKKKLEDKKKSLDDEVNAFKQRKTAAELLQSQGSQAGGSQTLKRDKEKKK

SEQ ID NO: 296409 - protein, 267 aa, Artificial Sequence
  derived and/or modified sequence
MAATDIARQVGEGCRTVPLAGHVGFDSLPDQLVNKSVSQGFCFNILCVGETGLGKSTLMDTLFNTKFEGEPATHTQPGVQLQSNTYDLQESNVRLKLTIVSTVGFGDQINKEDSYKPIVEFIDAQFEAYLQEELKIRRVLHTYHDSRIHVCLYFIAPTGHSLKSLDLVTMKKLDSKVNIIPIIAKADAISKSELTKFKIKITSELVSNGVQIYQFPTDDESVAEINGTMNAHLPFAVIGSTEELKIGNKMMRARQYPWGTVQGSSQV

SEQ ID NO: 296410 - DNA, 1284 bp, Artificial Sequence
  derived and/or modified sequence
atggccgccacagacattgcgcgccaggtcggcgaagggtgtaggacagtgcctctggcgggccatgtcggatttgactcattgccggatcaacttgtcaacaagtccgtgtcacagggattctgctttaatatcctttgcgtgggtgagacagggctgggaaagtcaactctgatggataccctattcaacacaaaatttgaaggggaacctgctacccatacccaacctggcgttcagctgcagtctaacacatacgatcttcaagagtctaacgtccggctgaaactgactattgtgagcaccgtcgggttcggtgaccagatcaataaggaggactcatacaaacctatcgtcgaatttatcgacgcccagtttgaagcatatttgcaggaagagttgaagatcagacgagtgctccatacataccatgacagtaggattcacgtgtgtctgtactttatcgccccaaccggccatagcctaaaatccctggacctcgtcaccatgaagaagttggacagcaaagttaacataatcccaattattgccaaagcagatgccataagcaaaagtgaactcacaaaatttaagattaaaatcacatcggagttggtaagcaacggcgtgcaaatctaccagttccccacagacgacgagagtgtcgccgagattaatgggacaatgaacgcccatctgcccttcgcagtgattggctccactgaagaattaaaaattgggaacaagatgatgcgagccaggcagtatccatggggtaccgttcaggtggagaacgaagcccattgcgacttcgtgaagctgcgggagatgctaattcgggtgaatatggaggacctgcgggaacagacgcacacgaggcactacgagctctacagacgatgcaagctcgaggagatgggcttcaaggacactgatcccgattcaaagccctttagtctccaggaaacatatgaagccaagagaaatgagttcctgggcgagctgcagaagaaagaggaggaaatgcggcaaatgttcgtccagagggtcaaggagaaggaggccgagctcaaagaagccgaaaaggaactgcatgaaaagttcgaccggcttaagaaactgcaccaggacgaaaagaagaagctggaggacaagaagaaaagtcttgatgacgaggtcaatgcctttaagcagcgtaaaactgccgcagaactgctgcaatcccagggttcccaggcaggaggcagccaaactctgaagcgggataaggagaagaagaactag

SEQ ID NO: 296411 - DNA, 1284 bp, Artificial Sequence
  derived and/or modified sequence
atggccgccactgatatcgccagacaagttggcgagggctgcagaaccgtgcccctggcgggtcatgtagggtttgacagcttgcctgaccagcttgtcaacaagagcgttagccagggtttctgcttcaatattttatgcgttggggaaacgggcctgggcaagtctactctgatggatacattattcaacaccaagttcgaaggcgaacccgccacccacacccagccgggcgtacagctgcagtcaaacacatatgacctgcaggagtccaatgtgaggttgaaactgactattgtttctactgtcggcttcggtgaccagatcaataaagaggactcgtacaaacctattgtcgagtttatcgacgctcagttcgaggcatatctccaggaggagttgaaaatccggagagtgctgcatacatatcacgacagccggattcacgtatgcttgtattttatcgccccaactggccacagcttaaagtccctggacctagttaccatgaagaagcttgactcaaaggtgaatatcatccctatcattgcaaaggctgatgctatatcaaagtcagaattaaccaaattcaagattaagataacaagcgagctggttagcaacggtgtgcagatatatcaattcccaactgacgacgaaagcgtcgccgagataaatgggactatgaacgcccacctgcccttcgctgtcatcgggagtactgaggaactaaagatcggaaacaagatgatgcgagcacgtcaatatccgtggggtactgtgcaggttgagaacgaggctcattgcgacttcgtgaaactgagggaaatgctaataagagtgaacatggaagacttaagagaacagactcatacgagacactatgagttataccgccggtgcaaactggaagaaatggggttcaaggatacagaccctgatagcaagccatttagcctgcaggagacctatgaggcaaaaaggaacgagtttttaggagagctgcagaaaaaggaggaggagatgaggcagatgttcgtccagcgagtgaaagagaaagaggccgaactgaaagaagccgagaaagaactacacgaaaaattcgataggctgaagaagctccaccaggacgaaaagaaaaaactcgaagacaaaaaaaagtcacttgatgatgaggtaaacgcctttaagcaacggaagacggctgcagagctgctacagtcacaaggaagtcaggcgggaggctctcagactctgaagcgagataaggaaaaaaaaaactag

SEQ ID NO: 296412 - DNA, 1110 bp, Artificial Sequence
  derived and/or modified sequence
atggatacactgttcaataccaaatttgaaggtgagcctgctacccacacacagcctggcgtgcagctccagagcaacacctacgatttgcaggagtctaacgtgaggcttaagttaaccatagtgagcactgtgggattcggcgatcagataaataaggaagactcttacaaaccaatagtggagttcatcgacgcgcaatttgaggcatacctgcaagaggaacttaagattcgccgggtcctgcacacttaccatgactcaaggatccatgtctgcctgtatttcatcgctcccaccggtcattcactgaagagcttagatctggtgaccatgaaaaaactggacagcaaagtaaacattattccgatcatcgccaaggctgacgccatatccaagtcagaattaaccaaattcaaaatcaaaattaccagtgaactagtgagcaacggcgtgcagatttaccagttcccaaccgatgatgaatcagtggccgagatcaatgggactatgaacgctcacctgccctttgcagttatcgggtctaccgaagaattaaaaatcggcaacaagatgatgagggctcgacagtatccctggggcaccgtccaagtcgaaaatgaagctcactgcgattttgttaaacttcgggagatgcttatccgggtgaatatggaggaccttagggagcagactcacacaagacattatgaattgtatcgacggtgtaagttggaggagatggggtttaaagacactgatcctgatagtaaaccattctcacttcaggagacatacgaagctaagaggaatgaattcctcggcgaactgcagaaaaaggaggaagaaatgcggcagatgttcgtgcagagagtcaaagagaaagaagccgagttgaaggaggccgagaaagaactccacgagaagttcgatcgactgaagaaacttcatcaggatgagaagaagaagctcgaagataagaagaaatccctggacgatgaagtcaatgctttcaagcaacggaaaacagccgcagaactcctgcagagtcagggtagccaagctggaggtagccagacgctgaagcgcgacaaagagaaaaagaagtag

SEQ ID NO: 296413 - DNA, 1374 bp, Artificial Sequence
  derived and/or modified sequence
atggccgctactgatatcgctaggcaggtcttcggccgcagacgtcttctgcttctgggcttcgaaaccgtcgggttttccgctgcctgcactgaggagggcggccacatgcttagaagaggagaaggttgtcggaccgttcccctcgccggtcatgttggttttgatagtctgccagatcagctggtgaataagtcagtgtcacagggtttttgcttcaatattctgtgcgtcggtgagacagggctgggaaaaagcacacttatggatacattgtttaacacaaagtttgaaggcgaacccgctactcacacgcagcctggcgttcagttgcagtctaatacctacgatctccaggagtccaacgttcggctcaagctgaccatcgtgagtacggtgggctttggcgatcaaattaataaggaagatagctacaagcccatcgttgagtttatcgacgcccagttcgaggcctacctgcaggaggagcttaagattcgccgggtccttcacacgtaccacgattcaaggatccacgtgtgcctctatttcatagctcccaccggtcatagcctgaagtcgttggacctagtgacgatgaagaaactggacagcaaagttaatatcattcctataattgccaaagcagatgctatcagtaaatctgaattaactaaatttaagatcaagatcacttccgagctcgtctcgaatggagtccagatttatcagtttcccacagatgacgaatctgtggctgagatcaatgggacaatgaacgcccatctgccatttgccgtgatcggctctaccgaggaactgaagatcggcaacaaaatgatgagggcacggcaatacccctgggggaccgtacaagtcgaaaatgaagcccattgcgattttgtaaaactgcgggagatgttaatccgggtcaacatggaggatcttcgcgagcagacgcatacgcgacattacgagctctatagaagatgtaaattggaggagatgggtttcaaggataccgatcctgattctaagcccttctccctccaggaaacgtatgaggccaaaagaaacgaatttctgggtgagctccagaaaaaagaagaggagatgagacagatgtttgtgcagagagtgaaagagaaagaggccgagctgaaggaggcagaaaaggagcttcatgagaagttcgataggcttaaaaaactgcaccaggatgaaaagaagaagctggaggataaaaaaaaatccttagacgatgaggtaaacgcattcaagcaaaggaaaactgcggcggaactcctgcagtcacagggctctcaggcaggaggcagccagactctcaagcgcgacaaggagaaaaagaagtag

SEQ ID NO: 296414 - DNA, 1284 bp, Artificial Sequence
  derived and/or modified sequence
atggctgcgactgatatcgctcggcaagtgggtgagggctgcagaacagtccccttagcaggccatgtgggcttcgacagcctccccgatcagctcgtgaacaagtcggttagccaaggcttttgcttcaacattttatgcgtgggagagacaggccttgggaaatcaactttgatggacacactcttcaatacgaagtttgagggcgaacccgccactcacacccagccaggcgtgcaactgcaatctaacacctacgatcttcaggaaagtaatgttcgcttgaaactgactatcgtgtccactgtgggctttggggatcaaataaacaaggaagatagttacaagccgatcgtagagttcatagacgctcagttcgaggcctacctccaggaggaacttaagatccgacgagttttacacacgtaccacgatagtcgcatccacgtgtgcttgtactttattgcgcctacagggcactcccttaagtctctcgacctagtcaccatgaagaagctcgacagtaaggtgaacattatcccaataatcgccaaagcggacgctattagtaaatctgaactgacaaagttcaaaatcaagataacttctgaacttgtaagcaatggcgtccagatttaccagttccctacggatgacgaatctgtggccgagatcaacggtaccatgaatgctcacctgcctttcgccgtgattggttctacagaggagctgaagattgggaataaaatgatgcgcgctaggcagtacccctgggggaccgtccaagtagaaaacgaggctcactgcgacttcgtgaaactgcgagagatgctcatccgggtcaacatggaagatctgcgggagcagacgcacacaagacactacgaactgtaccgccgatgcaagcttgaggagatgggctttaaggatacagatcccgattctaagcctttcagcctgcaggaaacatacgaagcaaagcggaatgaatttctgggtgagctccagaaaaaagaagaagagatgcgacagatgtttgtgcagcgggtcaaagagaaggaggcggagctgaaagaggcagagaaggagctgcatgaaaagttcgaccgcctaaagaaattgcaccaggatgaaaagaaaaagctggaggataaaaaaaagagcctcgacgacgaagtcaacgccttcaaacagcgtaagaccgcagcggagctgttgcagagtcaaggcagccaggctggtggcagtcaaacccttaagagagataaagaaaaaaagaactag

SEQ ID NO: 296415 - DNA, 804 bp, Artificial Sequence
  derived and/or modified sequence
atggcagcgacagacatcgcccgtcaagtgggagagggatgtagaactgtgcctttggccggacacgtcggcttcgacagccttccggatcagttggtcaataaatcagtaagccaaggcttctgtttcaatatcctctgtgtgggagagaccggactggggaaatccaccctgatggataccctgtttaacactaaattcgaaggggagccagctacgcatacccagccgggagtccaactgcagagtaatacctacgatctgcaagagagcaacgtgcgccttaaacttaccatagttagtactgtcggcttcggggatcagatcaacaaggaggacagttataaaccaattgtcgaatttatcgacgcccagtttgaagcctatttacaggaggaactgaaaatccggagggtccttcacacataccacgattcgcggatccatgtttgcttgtactttattgctccaacagggcacagcctaaaaagcctcgatctggtgacgatgaagaagctggattcaaaggtgaatataatccctatcattgctaaagcagatgccataagtaagtctgagctgactaagtttaagattaagatcacctcagagctggtgtctaacggggtgcaaatctatcagttccctaccgacgacgaaagcgttgccgaaatcaatggtaccatgaacgcgcatctgccttttgccgttatcggctctacagaggaactaaaaattggaaacaaaatgatgagggcgagacagtacccctggggcactgtgcaggggtcaagccaagtttag

SEQ ID NO: 296416 - DNA, 1284 bp, Artificial Sequence
  derived and/or modified sequence
atggccgccacagacatcgcccggcaggtgggggagggctgcaggacagtgcccctggccggccacgtgggctttgacagcctgcctgaccagctggtgaacaagtctgtgtcccagggcttctgcttcaacatcctgtgtgtgggggagaccggcctgggcaagagcaccctgatggacaccctcttcaacaccaagtttgaaggagagcccgccacccacacccagcccggggtgcagctgcagagcaacacctatgacctgcaggagagcaatgtgcggctgaagctgaccatcgtgtccacagtgggctttggagaccagatcaacaaggaggacagctacaagcccatcgtggagttcattgatgcccagtttgaggcctacctgcaggaggagctgaagatcagaagagtgctgcacacctaccatgacagccgcatccacgtgtgcctgtacttcatcgcccccaccggccacagcctgaagagcctggacctggtgaccatgaagaagctggacagcaaggtgaacatcatccccatcatcgccaaggcagatgccatcagcaagtctgagctgaccaagttcaagatcaagatcaccagcgagctggtgtccaatggagtgcagatctaccagttccccacagatgatgaatctgtggccgagatcaatggcaccatgaatgcccacctgccctttgctgtgattggcagcacagaggagctgaagattggcaacaagatgatgagggcccggcagtacccctggggcaccgtgcaggtggagaatgaggcccactgtgactttgtgaagctgcgggagatgctgatccgggtgaacatggaggacctgcgggagcagacccacaccaggcactatgagctgtaccgccgctgcaagctggaggagatgggcttcaaggacacagatcctgacagcaagcccttcagcctgcaggagacctatgaggccaagagaaatgagttcctgggggagctgcagaagaaggaggaggagatgaggcagatgtttgtgcagagggtgaaggagaaggaggccgagctgaaggaggccgagaaggagctgcacgagaagtttgaccggctgaagaagctgcaccaggatgagaagaagaagctggaggacaagaagaagagcctggatgatgaggtgaatgccttcaagcagaggaagacagctgctgagctgctgcagagccagggcagccaggccggcggcagccagaccctgaagagggacaaggagaagaagaactag

SEQ ID NO: 296417 - DNA, 1110 bp, Artificial Sequence
  derived and/or modified sequence
atggacaccctcttcaacaccaagtttgaaggagagcccgccacccacacccagcccggggtgcagctgcagagcaacacctatgacctgcaggagagcaatgtgcggctgaagctgaccatcgtgtccacagtgggctttggagaccagatcaacaaggaggacagctacaagcccatcgtggagttcattgatgcccagtttgaggcctacctgcaggaggagctgaagatcagaagagtgctgcacacctaccatgacagccgcatccacgtgtgcctgtacttcatcgcccccaccggccacagcctgaagagcctggacctggtgaccatgaagaagctggacagcaaggtgaacatcatccccatcatcgccaaggcagatgccatcagcaagtctgagctgaccaagttcaagatcaagatcaccagcgagctggtgtccaatggagtgcagatctaccagttccccacagatgatgaatctgtggccgagatcaatggcaccatgaatgcccacctgccctttgctgtgattggcagcacagaggagctgaagattggcaacaagatgatgagggcccggcagtacccctggggcaccgtgcaggtggagaatgaggcccactgtgactttgtgaagctgcgggagatgctgatccgggtgaacatggaggacctgcgggagcagacccacaccaggcactatgagctgtaccgccgctgcaagctggaggagatgggcttcaaggacacagatcctgacagcaagcccttcagcctgcaggagacctatgaggccaagagaaatgagttcctgggggagctgcagaagaaggaggaggagatgaggcagatgtttgtgcagagggtgaaggagaaggaggccgagctgaaggaggccgagaaggagctgcacgagaagtttgaccggctgaagaagctgcaccaggatgagaagaagaagctggaggacaagaagaagagcctggatgatgaggtgaatgccttcaagcagaggaagacagctgctgagctgctgcagagccagggcagccaggccggcggcagccagaccctgaagagggacaaggagaagaagaagtag

SEQ ID NO: 296418 - DNA, 1374 bp, Artificial Sequence
  derived and/or modified sequence
atggccgccacagacatcgcccggcaggtgtttggaagaagaaggctgctgctgctgggctttgaaacagtgggcttctctgctgcctgcacagaggagggcggccacatgctgcggcggggggagggctgcaggacagtgcccctggccggccacgtgggctttgacagcctgcctgaccagctggtgaacaagtctgtgtcccagggcttctgcttcaacatcctgtgtgtgggggagaccggcctgggcaagagcaccctgatggacaccctcttcaacaccaagtttgaaggagagcccgccacccacacccagcccggggtgcagctgcagagcaacacctatgacctgcaggagagcaatgtgcggctgaagctgaccatcgtgtccacagtgggctttggagaccagatcaacaaggaggacagctacaagcccatcgtggagttcattgatgcccagtttgaggcctacctgcaggaggagctgaagatcagaagagtgctgcacacctaccatgacagccgcatccacgtgtgcctgtacttcatcgcccccaccggccacagcctgaagagcctggacctggtgaccatgaagaagctggacagcaaggtgaacatcatccccatcatcgccaaggcagatgccatcagcaagtctgagctgaccaagttcaagatcaagatcaccagcgagctggtgtccaatggagtgcagatctaccagttccccacagatgatgaatctgtggccgagatcaatggcaccatgaatgcccacctgccctttgctgtgattggcagcacagaggagctgaagattggcaacaagatgatgagggcccggcagtacccctggggcaccgtgcaggtggagaatgaggcccactgtgactttgtgaagctgcgggagatgctgatccgggtgaacatggaggacctgcgggagcagacccacaccaggcactatgagctgtaccgccgctgcaagctggaggagatgggcttcaaggacacagatcctgacagcaagcccttcagcctgcaggagacctatgaggccaagagaaatgagttcctgggggagctgcagaagaaggaggaggagatgaggcagatgtttgtgcagagggtgaaggagaaggaggccgagctgaaggaggccgagaaggagctgcacgagaagtttgaccggctgaagaagctgcaccaggatgagaagaagaagctggaggacaagaagaagagcctggatgatgaggtgaatgccttcaagcagaggaagacagctgctgagctgctgcagagccagggcagccaggccggcggcagccagaccctgaagagggacaaggagaagaagaagtag

SEQ ID NO: 296419 - DNA, 804 bp, Artificial Sequence
  derived and/or modified sequence
atggccgccacagacatcgcccggcaggtgggggagggctgcaggacagtgcccctggccggccacgtgggctttgacagcctgcctgaccagctggtgaacaagtctgtgtcccagggcttctgcttcaacatcctgtgtgtgggggagaccggcctgggcaagagcaccctgatggacaccctcttcaacaccaagtttgaaggagagcccgccacccacacccagcccggggtgcagctgcagagcaacacctatgacctgcaggagagcaatgtgcggctgaagctgaccatcgtgtccacagtgggctttggagaccagatcaacaaggaggacagctacaagcccatcgtggagttcattgatgcccagtttgaggcctacctgcaggaggagctgaagatcagaagagtgctgcacacctaccatgacagccgcatccacgtgtgcctgtacttcatcgcccccaccggccacagcctgaagagcctggacctggtgaccatgaagaagctggacagcaaggtgaacatcatccccatcatcgccaaggcagatgccatcagcaagtctgagctgaccaagttcaagatcaagatcaccagcgagctggtgtccaatggagtgcagatctaccagttccccacagatgatgaatctgtggccgagatcaatggcaccatgaatgcccacctgccctttgctgtgattggcagcacagaggagctgaagattggcaacaagatgatgagggcccggcagtacccctggggcaccgtgcagggcagcagccaggtgtag

SEQ ID NO: 296420 - DNA, 1284 bp, Artificial Sequence
  derived and/or modified sequence
atggccgccaccgacatcgcccggcaggtgggcgagggctgccggacagttcctctcgcaggtcacgtcgggtttgacagcctccccgaccagttggttaataagtcagtgtcccaaggattctgtttcaacatactctgcgtgggcgaaaccgggctcggtaagtcaaccttgatggacaccctattcaataccaagttcgaaggagagccagctacccacacacagccaggcgtgcagctgcagtccaacacatacgatctgcaagaaagcaatgtgcgtcttaagttgacaatcgtctcaacagtcggtttcggtgatcaaatcaacaaagaggactcttacaaacctatcgtggagtttatcgatgcacaatttgaggcatatttacaggaagaactaaaaatccgaagggtgttacatacatatcatgattctaggatccacgtgtgcttatactttatcgcacctaccggccactccctaaagtcactggacctggtaacaatgaaaaagcttgattctaaggtgaatatcatccctatcatagcaaaagccgacgctatctctaagtctgagctgacgaagttcaaaatcaaaataactagtgaattggtgtcgaacggagtgcagatataccaattccccacggacgacgaatccgtggcggagatcaatggtaccatgaacgcccacttgccatttgcagtgatcggtagcaccgaggagttgaaaattgggaacaaaatgatgcgagcccgccaatatccttggggaacagtacaggtcgaaaatgaagcacactgtgatttcgtaaagctcagagaaatgctgatcagggtcaatatggaggacttacgcgagcagacccacacacgccattatgagctctatcgaaggtgcaagttagaagagatgggctttaaagatactgaccctgatagtaagcctttcagccttcaagagacctatgaggcaaagcggaacgaatttcttggcgaattgcagaagaaagaagaggagatgcgacagatgtttgtgcaacgcgtgaaagagaaggaagccgagctcaaagaagccgagaaggagcttcacgaaaagttcgatagattgaaaaagttacatcaggatgagaaaaagaagctcgaagataagaaaaagtctctagacgatgaggttaacgcgtttaagcagagaaagacagcggcagaactacttcagtctcagggctcccaggccggcggttctcaaacccttaagcgggataaagagaaaaaaaattag

SEQ ID NO: 296421 - DNA, 1284 bp, Artificial Sequence
  derived and/or modified sequence
atggccgccaccgacatcgcccggcaggtgggcgagggctgccggactgtcccgctggccggccacgtcggcttcgattcgctacctgatcaattagtaaacaagtccgtgtcgcagggtttttgtttcaacatcctgtgtgtgggtgaaacaggcctcgggaagagcacactcatggacactttgttcaacacaaagttcgaaggggagcccgcaacccacactcaacctggggtgcagctgcaatcaaacacctacgacctgcaggagtccaatgtgagactcaaactgacaattgtgagcacggtcggattcggggatcagattaataaggaggattcgtataagcctatcgtcgaattcatcgatgctcaatttgaggcctacctgcaggaagagctgaagattagacgagtgctccatacctaccacgacagcaggatccacgtatgcctgtattttattgcacccacgggacactccctcaagtctttagacctcgtcaccatgaaaaaactggacagcaaggtcaacataattcctatcattgccaaagcggatgccattagcaagagtgaactcaccaaattcaaaattaaaatcacatcagaactggtctctaatggagtccagatctaccagttccccacagatgatgagagcgtcgcagagattaatggaacgatgaacgcccatctgccattcgccgttattggttccaccgaggagcttaaaatcggcaataaaatgatgcgggctagacaatacccctgggggaccgtgcaagtcgagaatgaggctcattgcgactttgtgaagttgcgagagatgcttattcgggtgaacatggaggatttgagggagcagacccacacccgccactatgaactctatcgccggtgtaagcttgaagagatgggctttaaggacacagaccctgattcaaagccattttccctgcaggagacatatgaggcaaaacggaatgagttcctcggcgagttacagaaaaaagaggaagagatgcggcaaatgttcgtgcagcgcgtgaaagagaaagaggcagaactgaaagaagcagagaaggaactacacgaaaaatttgatcgtctcaagaaactgcatcaagatgagaagaaaaaattggaggacaagaagaaatctctagatgatgaggtgaatgctttcaagcagaggaagaccgccgctgaactcctacagagccaaggatcacaggcggggggctctcaaaccctgaaacgggataaagaaaagaaaaactag

SEQ ID NO: 296422 - DNA, 1110 bp, Artificial Sequence
  derived and/or modified sequence
atggacaccctgttcaacaccaagttcgagggcgagcccgccacccacactcagcctggggtgcagcttcagtccaacacctatgacctgcaggagtccaacgtgcgattgaagctgactatcgtatcaaccgttggatttggagaccagattaataaggaagattcctataaacctatagtggagttcatcgacgcccagttcgaggcttatctgcaagaagagttgaaaatcaggcgcgtgctgcacacctaccatgacagcaggatacatgtctgtctctatttcatcgcccccaccggacatagcttgaaatcactggatctggtcaccatgaaaaaattagactccaaagtgaatatcattcccattatcgccaaagcggacgcaatttctaagtcagaacttaccaaattcaagatcaaaatcactagcgagctagtctccaacggcgtgcagatataccaattccctacggatgatgagtccgtcgctgagatcaacggaaccatgaatgcacatctccccttcgctgtcatcggatcaacagaggaactgaaaatcgggaataagatgatgagggctagacagtacccttggggaaccgtacaggtggagaacgaagctcattgcgatttcgtcaaactgcgtgaaatgttgataagagtaaacatggaagatctgcgggaacagacacatacgagacattatgagctgtatagacggtgcaaacttgaagagatgggctttaaagatacagatcccgatagcaaaccattctctctgcaggagacctacgaggcaaaaagaaacgagtttttgggtgagctgcaaaaaaaggaagaagagatgaggcagatgttcgttcaacgcgtcaaagagaaggaagctgaattgaaagaggccgagaaggagctgcacgaaaagttcgaccgcctgaagaagttgcaccaggatgaaaagaaaaagctggaggataagaaaaaaagcctggacgatgaggtaaatgcctttaagcagaggaaaactgcagctgaactcctgcaaagtcaagggagccaggccggcgggtcccaaaccctgaaaagagacaaggagaagaagaaatag

SEQ ID NO: 296423 - DNA, 1374 bp, Artificial Sequence
  derived and/or modified sequence
atggccgccaccgacatcgcccggcaggtgttcggccggcggcggctgcttcttctcggattcgagactgtggggttctctgcagcctgtactgaagagggcggtcatatgttaaggaggggagaaggttgtcggacagtcccactcgcgggacacgttggtttcgactcactgcccgaccagctggttaacaaatctgtgagtcagggcttctgtttcaacattctgtgcgtcggcgagacgggactaggtaagtcaacgcttatggacactctttttaacacaaagttcgaaggtgagcctgctacccatactcaaccaggggtacaactccagtcgaatacttatgacctgcaagaaagcaatgtccggctgaagttaaccatcgtctctaccgttgggttcggggaccagattaataaggaggactcctacaagccaatcgtagagttcatcgatgctcagtttgaggcttacttacaggaggaactgaagatcaggcgtgtactccatacttaccatgactcccgaattcacgtgtgtttgtacttcatcgctcccacaggccactcccttaagagtttggacttggtgacaatgaaaaaactcgacagcaaggtcaatatcattcccatcatagctaaggccgatgctatttctaagtctgagctcacgaaattcaagattaaaattaccagcgagctggtttctaacggagtccaaatttaccaattccctactgatgacgagtccgtggcggaaattaacgggaccatgaatgctcatctgccttttgctgtaataggctcaacagaggaactgaagattgggaacaaaatgatgcgagcacgacaatatccctggggcactgtgcaggtagaaaatgaggcccattgcgactttgtgaagctacgagaaatgcttatcagagtgaacatggaagatttgagggagcagactcacactaggcactacgagctctacagacggtgcaaattggaggagatgggattcaaggacactgacccagactctaagcccttctcattgcaagaaacctacgaggcgaagcgcaacgaatttttaggtgaacttcagaagaaggaggaggagatgcggcagatgtttgtacagcgagttaaggagaaagaagccgagctgaaagaggccgaaaaggagttgcatgagaagttcgaccgcctcaaaaaactgcatcaggacgagaaaaaaaaacttgaagacaaaaaaaagagtcttgatgacgaggtgaacgccttcaagcagaggaagacggccgccgagttgctccagtcacaaggcagccaggccggggggtcccagactcttaaacgggacaaggagaaaaagaaatag

SEQ ID NO: 296424 - DNA, 1284 bp, Artificial Sequence
  derived and/or modified sequence
atggccgccaccgacatcgcccggcaggtgggcgagggctgccggacagtcccgcttgccggccacgtcggcttcgactcactccctgaccagttagtgaacaaaagtgtgagtcagggattctgtttcaatattctgtgcgttggcgagaccggactcggcaagtccacactcatggacaccctgttcaatacaaagttcgagggcgaaccagccacccacacacagcctggagtccagcttcagtccaatacctatgacttgcaagagagcaacgtgcgcctcaagctgaccattgtgtcaacagttgggttcggcgaccaaattaataaggaagattcctacaaacctattgtagaattcatagatgcccagttcgaagcctacttgcaggaggagctgaaaatacgccgggtgttgcacacctaccatgactcccggatccatgtgtgtctatacttcatcgcccctactggtcactcgcttaaaagtctcgatctagtgacaatgaaaaagctggacagcaaggtgaacatcatccccattatcgcaaaagcagatgcaatctctaaatccgagctgactaaatttaaaatcaaaataacatctgaacttgtatctaatggagttcaaatatatcagttccccacagacgacgagagcgtagcggagatcaacggcactatgaatgcacatctcccttttgccgttattggaagtaccgaagaattgaaaattgggaataagatgatgcgcgcccggcaatatccttggggcaccgtgcaggtggagaacgaagcgcattgcgattttgtcaagctgcgggagatgctgatcagggtcaatatggaggatctgcgggaacagactcacacacgccactatgagttatatagacgctgcaagttggaagagatggggtttaaagatacagaccccgactctaagccattttcactccaggaaacatacgaagccaaacggaacgagttcctcggtgagttgcaaaaaaaagaggaggagatgcggcagatgttcgttcagcgggtcaaggaaaaggaagctgagctgaaagaagccgagaaggagctccatgaaaagttcgatagactgaagaagctgcaccaggacgagaaaaagaaattggaggataaaaaaaagagcctggatgatgaagtgaacgcctttaaacagcggaagacagccgcagagctgctgcagtcgcaaggatcccaggccggcgggtctcaaaccctgaaacgggacaaagagaagaaaaattag

SEQ ID NO: 296425 - DNA, 804 bp, Artificial Sequence
  derived and/or modified sequence
atggccgccaccgacatcgcccggcaggtgggcgagggctgccggacggttcctctggcaggacacgtgggatttgatagtctgccggatcaactggttaacaaaagcgtgtcacagggcttttgttttaatatcctgtgtgttggcgaaacaggcttgggcaagagtacactgatggatacgcttttcaacactaagtttgaaggggagcccgctacacacacccaacccggtgtgcaattacaaagcaacacttacgaccttcaggaaagtaacgtgcgactaaaattgaccatagtgtccactgtgggcttcggggaccagatcaacaaagaggatagctacaagcccatcgtggagttcattgacgctcagttcgaggcctatctccaagaggagctcaagatcagacgtgtgcttcatacctaccatgactcccgcattcatgtgtgtctttattttatagcccctacaggccactccctcaaatccctcgacctcgttacgatgaagaagttagacagtaaagtcaacatcatccccatcatcgctaaagctgatgctatatctaagtccgagctgaccaagttcaagatcaaaatcacatcagaattggtgtctaacggcgtgcagatctatcagtttcctacagacgacgagagcgtggccgaaatcaacgggacaatgaatgctcatttaccctttgccgtgattggctcaacagaggagttgaagatcggtaataagatgatgcgggcccgccagtacccctggggcactgttcagggaagcagccaagtgtag

SEQ ID NO: 296426 - DNA, 1284 bp, Artificial Sequence
  derived and/or modified sequence
atggctgccacggatattgcacggcaagtgggagaggggtgcagaacagtacctctggcgggtcatgttggctttgatagcttgcctgatcagctggttaataagagcgtgagccagggcttctgttttaatatactgtgcgtgggtgaaactggcctgggcaaatcaacactgatggatactctgttcaacaccaaattcgaaggggagccagcaacacacacgcagccaggcgtgcaactgcaatccaatacctatgaccttcaggaaagcaacgtgcggctcaagctgactatcgtaagcaccgttggattcggcgatcagatcaataaagaggatagctataaaccaatcgtagagttcattgacgctcaatttgaggcctacctccaggaggagctgaaaataagaagagtgttgcatacataccatgactcgcggatccacgtttgtttgtatttcattgctcctaccggtcattctcttaaaagtctcgacctggtgactatgaaaaaactggactcaaaagtgaatatcatcccgatcatcgctaaggccgatgctatttccaagtcagagcttactaaatttaaaattaaaattactagtgaactagtgtcaaacggagtgcagatctatcagtttccaacagatgatgagtctgtggcggagattaatgggactatgaatgcgcacctcccttttgcagtgattggatcaaccgaggaactgaaaattggaaacaagatgatgcgggctcggcaatatccttggggcaccgtgcaggtggagaatgaggcccactgcgactttgtcaagctccgggagatgttgatccgggtgaacatggaggaccttcgggagcagacccacacaaggcactatgaactttacaggcgatgtaagctcgaagaaatgggttttaaggacaccgatccagactccaaaccattttccctacaggaaacctatgaggctaaacgcaacgagttcctcggggaactgcagaagaaagaagaagaaatgagacagatgtttgtgcagagggtgaaggagaaagaggccgaactaaaagaagccgaaaaggaactgcatgagaaatttgacaggttaaagaagctgcatcaagacgagaagaagaagctggaggacaagaaaaaatcattagatgacgaggtcaatgccttcaaacagagaaagactgccgctgaactccttcaatcccagggtagtcaggctgggggatctcagactctgaagcgcgacaaagaaaagaaaaattag

SEQ ID NO: 296427 - DNA, 1284 bp, Artificial Sequence
  derived and/or modified sequence
atggccgctaccgatattgcacgacaagtgggcgagggatgtaggaccgtaccattggccggacacgttggatttgactctctgcctgaccaactagtaaataaaagtgtgtctcagggcttttgcttcaatatcttatgtgtcggagaaaccggactgggaaagagtacgctgatggatacactcttcaataccaagttcgagggggaacctgctacccatacacagcccggtgtccagctacagtccaacacatatgatttacaggaatcgaacgtccgtctgaagctcactattgttagcacagtgggattcggagatcagattaataaagaagactcatacaagcccatcgtcgagttcatcgatgctcagttcgaagcctatttacaggaggagctgaaaattaggagagtgcttcatacttatcacgatagtagaatacatgtgtgtctgtatttcatagctccaactggacacagtctgaagtctctggacttggttactatgaaaaagcttgactcgaaggtcaacatcatcccgatcatcgcaaaagctgacgcaatctccaaatcggaactcacgaagttcaagattaagatcacttcggaattggtgtcaaacggggtgcagatctaccagtttccaactgatgatgaaagcgtggctgagattaacggtactatgaacgcgcatctgccattcgcagtgatcgggagtaccgaagaactgaagattggaaataagatgatgcgggctaggcagtatccatggggcactgtgcaagtggaaaacgaggcacactgtgactttgtaaagctgagagagatgttgatccgagtcaacatggaggacttgcgcgaacagacgcatacaaggcattacgaactttatcggcgatgcaagctggaagaaatgggcttcaaagacacagaccccgacagcaagcccttctcactacaggagacgtacgaagcaaagcgaaacgagttcttgggggagctgcagaagaaggaagaagaaatgcgacagatgtttgtgcagagagtgaaggaaaaagaggccgagttaaaggaggccgagaaggagcttcatgaaaaattcgatcgtttaaagaaactacaccaggatgaaaaaaagaagttagaagataaaaagaagtccctggacgatgaggtgaacgcatttaagcagcgcaagaccgccgctgagttgctccagtcacagggatctcaggccggaggcagtcagactctgaagcgggataaagaaaaaaagaactag

SEQ ID NO: 296428 - DNA, 1110 bp, Artificial Sequence
  derived and/or modified sequence
atggacacattgtttaacacgaagttcgagggagagcctgcgactcacactcagcctggcgtgcagctgcagtcaaacacctatgacctccaggaaagcaatgtcaggttgaagctgaccatcgtgtccacggtcggatttggtgatcagatcaacaaggaggacagctataaaccaatcgttgaatttatagatgcccagtttgaggcttaccttcaggaggaactgaaaattagacgggtcctgcacacataccatgattctaggattcacgtgtgcctgtatttcatcgctccaacaggccattccctgaagagtttggatctggttacaatgaagaaattagattccaaggtaaatataataccaataatcgccaaggctgacgccatttcaaagagcgagctgaccaaattcaagatcaagatcaccagcgaattggtctctaacggcgtgcagatttatcaattccctacagacgacgagtcagtggccgaaatcaacgggacgatgaatgctcacctgccgttcgcagtgataggttcaaccgaagaattgaaaattggaaacaaaatgatgagagcccgacagtatccgtggggcactgtgcaggtcgagaatgaagcgcactgcgacttcgtgaaactccgggagatgctgatccgagtgaatatggaggatctgcgggagcagacgcacacaagacattacgaactgtatagacgatgcaagctggaagagatgggctttaaggatacggatcccgatagcaaaccatttagtttgcaagaaacttacgaggccaaaagaaatgagtttttgggcgagctacagaagaaagaggaagagatgaggcagatgtttgtgcagagggttaaggagaaagaggccgagctcaaggaggcggagaaagagctgcacgagaagttcgaccgcctcaaaaagttgcaccaggatgagaaaaagaagctggaggacaaaaaaaaaagccttgacgatgaagttaatgcttttaagcagcgaaagaccgccgctgaacttcttcagagccagggtagccaggccggaggtagccagactctaaagagagacaaagaaaaaaagaagtag

SEQ ID NO: 296429 - DNA, 1374 bp, Artificial Sequence
  derived and/or modified sequence
atggccgctacagacatcgcaagacaggtcttcggccgacgaaggctactcctactcggctttgagactgtcgggttttctgccgcatgtacagaggagggcggacatatgcttcgcaggggcgagggctgccgcaccgtgccactcgctggtcacgtagggtttgacagtctcccagatcaactggtgaataaaagtgtcagccaaggcttttgcttcaatatactctgcgttggtgaaaccggtctggggaagtctaccctcatggacaccctgtttaatactaagttcgagggggaaccagctacgcacacacagcctggtgtgcagcttcagagcaatacctatgacttgcaagagtccaatgtgcgtctcaagctgacgatcgtaagcactgtcggtttcggtgaccagattaataaggaggattcgtataaacctatagtcgagtttattgacgcacagttcgaggcctatctccaggaagagctaaagattagacgggtgctacacacctatcatgactctaggattcatgtatgtctgtattttatcgcgcctactggccacagcctaaagagcctggatctggtaactatgaaaaagctggacagtaaggtgaacatcattcccatcatagcaaaagccgatgctatctcaaagagcgagctcacaaagtttaaaatcaagatcacaagcgagctggtctcaaatggagtacaaatttatcagttccccacagacgacgagtcagtagccgagatcaacgggactatgaacgcacatctgccgttcgcagtcataggctccacagaagaacttaaaatcggaaataagatgatgcgtgcacgccagtatccctgggggaccgtgcaggtcgaaaatgaggcacattgtgattttgtcaaattgagggaaatgctgattcgggtgaatatggaagatctacgtgaacaaacccacaccaggcactacgagctctatagacgatgtaaattggaggaaatgggcttcaaggacacagacccagattccaaacctttcagcctacaggaaacatacgaagccaaacgcaacgagtttctgggagaactacagaagaaagaagaggaaatgagacaaatgtttgtgcaacgggtaaaggagaaagaagctgagttgaaggaagccgaaaaggagctgcatgagaaatttgaccgacttaagaaactgcatcaggatgaaaagaagaagctggaagataaaaagaagtccctggacgatgaggtgaacgcttttaaacagcgcaaaactgccgcagagcttctgcagtctcagggctcccaggccggagggtcccagaccctgaaacgcgataaggagaagaaaaagtag

SEQ ID NO: 296430 - DNA, 1284 bp, Artificial Sequence
  derived and/or modified sequence
atggctgccaccgacattgctcgccaggtcggcgaggggtgtaggacggtgcctctggcaggtcacgtgggattcgactctttgcccgaccagttggtaaataaatcagtatcccagggattctgcttcaacatcttatgtgtgggtgaaactgggctgggcaaatccaccctcatggatacactcttcaacaccaaatttgaaggagaacctgccactcacacacagcccggagtccaactacagtccaacacttatgacctccaggagagtaacgtgagactcaagctcaccatcgtaagtactgtggggttcggagatcagatcaacaaagaggacagttacaagccaattgtggaatttatcgatgcgcaattcgaggcctacctgcaggaagagctgaaaattcgcagggttcttcacacgtatcatgacagcaggattcatgtctgtctttacttcatcgccccaactggtcacagtctgaagtctctcgatctggtaaccatgaaaaagttggactctaaggtcaacatcattcctatcatagctaaggccgacgcaattagcaaatctgagctgacgaaatttaagataaaaatcacatccgagcttgtatcaaatggggttcaaatctatcaatttcccacggacgacgagagtgtcgctgaaattaacgggacgatgaatgctcacctgcctttcgccgttatagggtcgaccgaggaactaaagatcgggaataagatgatgcgggcacggcaatatccttggggtactgttcaagtcgaaaatgaggcgcattgcgatttcgtgaagctgcgtgagatgctgatcagagtgaacatggaggatctcagagagcaaacgcataccagacactatgagctctaccggcgatgcaaactcgaagagatgggattcaaggatacggacccagactcaaagccattctcactccaggaaacctatgaggcaaagaggaacgaattccttggcgagttgcagaagaaggaagaagagatgagacaaatgtttgtgcagagggtcaaagaaaaagaagccgaactcaaggaagccgagaaagaactgcacgaaaaatttgatagactgaagaagctgcaccaggacgaaaagaaaaagctagaggacaagaagaagagtctcgatgacgaagtgaacgcatttaaacagcggaaaaccgcagctgagctgctgcaatcccaaggctcacaggctggagggagtcagacactaaagagggataaggagaagaagaattag

SEQ ID NO: 296431 - DNA, 804 bp, Artificial Sequence
  derived and/or modified sequence
atggccgcaacagacattgccagacaggtaggggaaggatgtcgcactgtaccgctggcgggacatgtcggttttgatagtctgccagaccaactcgtaaataagagcgtgagccaggggttctgttttaatatcctgtgcgtgggcgagacaggactcggcaagagtaccttgatggataccttatttaatacaaagttcgagggcgagccagccacacacactcaacccggagtgcaactgcaatcaaatacctatgatctacaggaatccaacgtgcgactgaagctgacaattgtttctaccgtgggttttggcgaccaaattaacaaggaggatagctataagcccatcgtagagtttatcgacgcccagttcgaagcttacctgcaggaggagttgaagattaggcgagttcttcacacgtatcacgatagcagaattcatgtgtgtctgtacttcatcgcacctactggacactctctgaaatctctcgatctggtgaccatgaaaaaacttgacagtaaagtgaatatcataccaattatagcgaaggccgacgctatcagtaagtcagaacttacaaaatttaaaatcaagatcactagtgagctcgtctctaacggagtgcaaatataccagtttccaactgacgacgagtctgttgcagaaatcaatggcaccatgaatgcccacttgccattcgctgtgataggatctacagaggagctgaaaatcggcaacaaaatgatgcgcgctagacagtatccatggggaacggtgcagggtagtagccaggtttag

SEQ ID NO: 296432 - DNA, 1859 bp, Artificial Sequence
  derived and/or modified sequence
gcattgcccaagagccgcagtgagcgccaccgcctccctcgctgcagctgcggccccacggctggggcgttgccgaatgaatggccgtaggagccgccgagccctccgggtccctggcaccctggccttgccgcgcccctgcgcacggctgcccgttgtgacccgggaccgcacaggcaaagaggcgcggggctggggttagcctggggcagaaggcgggtgaaggttgccgaactgtccccctggctggacatgtggggtttgacagcttgcctgaccagctggtgaataagtccgtcagccagggcttctgcttcaacatcctgtgcgtgggagagacaggtttgggcaagtccaccctcatggacaccctgttcaacaccaaattcgaaggggagccagccacccacacacagccgggtgtccagctccagtctaatacctatgacctccaagagagcaacgtgaggctaaagctcacgatcgttagcacagttggctttggggaccagatcaacaaagaggacagctacaagcctatcgtggaattcatcgatgcacaattcgaggcctacctgcaggaagagctaaagatccgaagagtgctacacacctaccatgactcccgaatccatgtctgcttgtatttcattgcccccacgggtcattccctgaagtctctggacctagtgactatgaagaagctggacagtaaggtgaacatcatccccatcattgccaaagcagatgccatttcgaagagtgagctaacaaagttcaaaatcaaaatcaccagcgagcttgtcagcaacggagtccagatctatcagtttcctacagatgatgagtcggtggcagagatcaatggaaccatgaacgcccacctgccgtttgctgtcattggcagcacagaagaactgaagataggcaacaagatgatgagggcgcggcagtatccttggggcactgtgcaggttgaaaacgaggcccactgcgactttgtgaagctgcgggagatgctgattcgggtcaacatggaggatctgcgggagcagacccacacccggcactatgagctgtatcgccgctgtaagctggaggagatgggcttcaaggacaccgaccctgacagcaaacccttcagtttacaggagacatatgaggccaaaaggaacgagttcctaggggaactccagaaaaaagaagaggagatgagacagatgttcgtccagcgagtcaaagagaaagaagcggagctcaaagaggcagagaaagagctgcacgagaagtttgaccgtctgaagaaactgcaccaggacgagaagaagaaactggaggataagaagaaatccctggatgatgaagtgaatgctttcaagcaaagaaagacggcggctgagctgctccagtcccagggctcccaggctggaggctcacagactctgaagagagacaaagagaagaaaaagtaagtagcaggctgctctggggtggtgccttctctttcctcctgctcatcctcccagggcaggacgtggcacctgaaggggctgaggactggtgaccagaggtgagctgtgggctgtcagactggttgaggtacctataactggtcccagcatccctgtggcacctttggattccctgagcttggggagttgagagtagcagaggggtgtggtcccagaggcccagcccatctgtccagcttgctcaggaaagccctgcaaactcaaggtccataggaaaggaagggaaaagaggaaaagcaaaggagagtgagagagcagaagggaagaaaaaaattagaggtgcagcaatataagagaggaacaaggccgggcacggtggctcacacc

SEQ ID NO: 296433 - DNA, 1720 bp, Artificial Sequence
  derived and/or modified sequence
agtagctcccgttgcggcggcacccgtggcagccctggcggacgcaggagcgatggcagcgaccgatatagctcgccaggtgtttggcaggaggaggcttctgctgctgggatttgaaaccgtgggtttctctgccgcctgcacagaggaaggaggccacatgctcaggaggggtgaaggttgccgaactgtccccctggctggacatgtggggtttgacagcttgcctgaccagctggtgaataagtccgtcagccagggcttctgcttcaacatcctgtgcgtgggagagacaggtttgggcaagtccaccctcatggacaccctgttcaacaccaaattcgaaggggagccagccacccacacacagccgggtgtccagctccagtctaatacctatgacctccaagagagcaacgtgaggctaaagctcacgatcgttagcacagttggctttggggaccagatcaacaaagaggacagctacaagcctatcgtggaattcatcgatgcacaattcgaggcctacctgcaggaagagctaaagatccgaagagtgctacacacctaccatgactcccgaatccatgtctgcttgtatttcattgcccccacgggtcattccctgaagtctctggacctagtgactatgaagaagctggacagtaaggtgaacatcatccccatcattgccaaagcagatgccatttcgaagagtgagctaacaaagttcaaaatcaaaatcaccagcgagcttgtcagcaacggagtccagatctatcagtttcctacagatgatgagtcggtggcagagatcaatggaaccatgaacgcccacctgccgtttgctgtcattggcagcacagaagaactgaagataggcaacaagatgatgagggcgcggcagtatccttggggcactgtgcaggttgaaaacgaggcccactgcgactttgtgaagctgcgggagatgctgattcgggtcaacatggaggatctgcgggagcagacccacacccggcactatgagctgtatcgccgctgtaagctggaggagatgggcttcaaggacaccgaccctgacagcaaacccttcagtttacaggagacatatgaggccaaaaggaacgagttcctaggggaactccagaaaaaagaagaggagatgagacagatgttcgtccagcgagtcaaagagaaagaagcggagctcaaagaggcagagaaagagctgcacgagaagtttgaccgtctgaagaaactgcaccaggacgagaagaagaaactggaggataagaagaaatccctggatgatgaagtgaatgctttcaagcaaagaaagacggcggctgagctgctccagtcccagggctcccaggctggaggctcacagactctgaagagagacaaagagaagaaaaagtaagtagcaggctgctctggggtggtgccttctctttcctcctgctcatcctcccagggcaggacgtggcacctgaaggggctgaggactggtgaccagaggtgagctgtgggctgtcagactggttgaggtacctataactggtcccagcatccctgtggcacctttggattccctgagcttggggagttgagagtagcagaggggtgtggtcccagaggcccagcccatctgtccagcttgctcaggaaagccctgcaaactcaaggtccataggaaaggaagggaaaagaggaa

SEQ ID NO: 296434 - DNA, 1066 bp, Artificial Sequence
  derived and/or modified sequence
gaagaactggaactggtctggccatagggggaagcggcgcgttaaatccgccccctctccataccctactttcaaggggtgggcggtagaggggaggttggggttggagcagcggcgagggggcccctcccttgcacctccccccaccggacttggtcgcgcccgaagtgtaacactttctctttgtcggaggagctcctctgtttcctgtgcagtagctcccgttgcggcggcacccgtggcagccctggcggacgcaggagcgatggcagcgaccgatatagctcgccaggtgggtgaaggttgccgaactgtccccctggctggacatgtggggtttgacagcttgcctgaccagctggtgaataagtccgtcagccagggcttctgcttcaacatcctgtgcgtgggagagacaggtttgggcaagtccaccctcatggacaccctgttcaacaccaaattcgaaggggagccagccacccacacacagccgggtgtccagctccagtctaatacctatgacctccaagagagcaacgtgaggctaaagctcacgatcgttagcacagttggctttggggaccagatcaacaaagaggacagctacaagcctatcgtggaattcatcgatgcacaattcgaggcctacctgcaggaagagctaaagatccgaagagtgctacacacctaccatgactcccgaatccatgtctgcttgtatttcattgcccccacgggtcattccctgaagtctctggacctagtgactatgaagaagctggacagtaaggtgaacatcatccccatcattgccaaagcagatgccatttcgaagagtgagctaacaaagttcaaaatcaaaatcaccagcgagcttgtcagcaacggagtccagatctatcagtttcctacagatgatgagtcggtggcagagatcaatggaaccatgaacgcccacctgccgtttgctgtcattggcagcacagaagaactgaagataggcaacaagatgatgagggcgcggcagtatccttggggcactgtgcagggctcctcccaagtc

SEQ ID NO: 296435 - DNA, 1284 bp, Artificial Sequence
  derived and/or modified sequence
atggccgccaccgacatcgccagacaggtgggcgagggctgcagaaccgtgcccctggccggccacgtgggcttcgacagcctgcccgaccagctggtgaacaagagcgtgagccagggcttctgcttcaacatcctgtgcgtgggcgagaccggcctgggcaagagcaccctgatggacaccctgttcaacaccaagttcgagggcgagcccgccacccacacccagcccggcgtgcagctgcagagcaacacctacgacctgcaggagagcaacgtgagactgaagctgaccatcgtgagcaccgtgggcttcggcgaccagatcaacaaggaggacagctacaagcccatcgtggagttcatcgacgcccagttcgaggcctacctgcaggaggagctgaagatcagaagagtgctgcacacctaccacgacagcagaatccacgtgtgcctgtacttcatcgcccccaccggccacagcctgaagagcctggacctggtgaccatgaagaagctggacagcaaggtgaacatcatccccatcatcgccaaggccgacgccatcagcaagagcgagctgaccaagttcaagatcaagatcaccagcgagctggtgagcaacggcgtgcagatctaccagttccccaccgacgacgagagcgtggccgagatcaacggcaccatgaacgcccacctgcccttcgccgtgatcggcagcaccgaggagctgaagatcggcaacaagatgatgagagccagacagtacccctggggcaccgtgcaggtggagaacgaggcccactgcgacttcgtgaagctgagagagatgctgatcagagtgaacatggaggacctgagagagcagacccacaccagacactacgagctgtacagaagatgcaagctggaggagatgggcttcaaggacaccgaccccgacagcaagcccttcagcctgcaggagacctacgaggccaagagaaacgagttcctgggcgagctgcagaagaaggaggaggagatgagacagatgttcgtgcagagagtgaaggagaaggaggccgagctgaaggaggccgagaaggagctgcacgagaagttcgacagactgaagaagctgcaccaggacgagaagaagaagctggaggacaagaagaagagcctggacgacgaggtgaacgccttcaagcagagaaagaccgccgccgagctgctgcagagccagggcagccaggccggcggcagccagaccctgaagagagacaaggagaagaagaactag

SEQ ID NO: 296436 - DNA, 1110 bp, Artificial Sequence
  derived and/or modified sequence
atggacaccctgttcaacaccaagttcgagggcgagcccgccacccacacccagcccggcgtgcagctgcagagcaacacctacgacctgcaggagagcaacgtgagactgaagctgaccatcgtgagcaccgtgggcttcggcgaccagatcaacaaggaggacagctacaagcccatcgtggagttcatcgacgcccagttcgaggcctacctgcaggaggagctgaagatcagaagagtgctgcacacctaccacgacagcagaatccacgtgtgcctgtacttcatcgcccccaccggccacagcctgaagagcctggacctggtgaccatgaagaagctggacagcaaggtgaacatcatccccatcatcgccaaggccgacgccatcagcaagagcgagctgaccaagttcaagatcaagatcaccagcgagctggtgagcaacggcgtgcagatctaccagttccccaccgacgacgagagcgtggccgagatcaacggcaccatgaacgcccacctgcccttcgccgtgatcggcagcaccgaggagctgaagatcggcaacaagatgatgagagccagacagtacccctggggcaccgtgcaggtggagaacgaggcccactgcgacttcgtgaagctgagagagatgctgatcagagtgaacatggaggacctgagagagcagacccacaccagacactacgagctgtacagaagatgcaagctggaggagatgggcttcaaggacaccgaccccgacagcaagcccttcagcctgcaggagacctacgaggccaagagaaacgagttcctgggcgagctgcagaagaaggaggaggagatgagacagatgttcgtgcagagagtgaaggagaaggaggccgagctgaaggaggccgagaaggagctgcacgagaagttcgacagactgaagaagctgcaccaggacgagaagaagaagctggaggacaagaagaagagcctggacgacgaggtgaacgccttcaagcagagaaagaccgccgccgagctgctgcagagccagggcagccaggccggcggcagccagaccctgaagagagacaaggagaagaagaagtag

SEQ ID NO: 296437 - DNA, 1374 bp, Artificial Sequence
  derived and/or modified sequence
atggccgccaccgacatcgccagacaggtgttcggcagaagaagactgctgctgctgggcttcgagaccgtgggcttcagcgccgcctgcaccgaggagggcggccacatgctgagaagaggcgagggctgcagaaccgtgcccctggccggccacgtgggcttcgacagcctgcccgaccagctggtgaacaagagcgtgagccagggcttctgcttcaacatcctgtgcgtgggcgagaccggcctgggcaagagcaccctgatggacaccctgttcaacaccaagttcgagggcgagcccgccacccacacccagcccggcgtgcagctgcagagcaacacctacgacctgcaggagagcaacgtgagactgaagctgaccatcgtgagcaccgtgggcttcggcgaccagatcaacaaggaggacagctacaagcccatcgtggagttcatcgacgcccagttcgaggcctacctgcaggaggagctgaagatcagaagagtgctgcacacctaccacgacagcagaatccacgtgtgcctgtacttcatcgcccccaccggccacagcctgaagagcctggacctggtgaccatgaagaagctggacagcaaggtgaacatcatccccatcatcgccaaggccgacgccatcagcaagagcgagctgaccaagttcaagatcaagatcaccagcgagctggtgagcaacggcgtgcagatctaccagttccccaccgacgacgagagcgtggccgagatcaacggcaccatgaacgcccacctgcccttcgccgtgatcggcagcaccgaggagctgaagatcggcaacaagatgatgagagccagacagtacccctggggcaccgtgcaggtggagaacgaggcccactgcgacttcgtgaagctgagagagatgctgatcagagtgaacatggaggacctgagagagcagacccacaccagacactacgagctgtacagaagatgcaagctggaggagatgggcttcaaggacaccgaccccgacagcaagcccttcagcctgcaggagacctacgaggccaagagaaacgagttcctgggcgagctgcagaagaaggaggaggagatgagacagatgttcgtgcagagagtgaaggagaaggaggccgagctgaaggaggccgagaaggagctgcacgagaagttcgacagactgaagaagctgcaccaggacgagaagaagaagctggaggacaagaagaagagcctggacgacgaggtgaacgccttcaagcagagaaagaccgccgccgagctgctgcagagccagggcagccaggccggcggcagccagaccctgaagagagacaaggagaagaagaagtag

SEQ ID NO: 296438 - DNA, 804 bp, Artificial Sequence
  derived and/or modified sequence
atggccgccaccgacatcgccagacaggtgggcgagggctgcagaaccgtgcccctggccggccacgtgggcttcgacagcctgcccgaccagctggtgaacaagagcgtgagccagggcttctgcttcaacatcctgtgcgtgggcgagaccggcctgggcaagagcaccctgatggacaccctgttcaacaccaagttcgagggcgagcccgccacccacacccagcccggcgtgcagctgcagagcaacacctacgacctgcaggagagcaacgtgagactgaagctgaccatcgtgagcaccgtgggcttcggcgaccagatcaacaaggaggacagctacaagcccatcgtggagttcatcgacgcccagttcgaggcctacctgcaggaggagctgaagatcagaagagtgctgcacacctaccacgacagcagaatccacgtgtgcctgtacttcatcgcccccaccggccacagcctgaagagcctggacctggtgaccatgaagaagctggacagcaaggtgaacatcatccccatcatcgccaaggccgacgccatcagcaagagcgagctgaccaagttcaagatcaagatcaccagcgagctggtgagcaacggcgtgcagatctaccagttccccaccgacgacgagagcgtggccgagatcaacggcaccatgaacgcccacctgcccttcgccgtgatcggcagcaccgaggagctgaagatcggcaacaagatgatgagagccagacagtacccctggggcaccgtgcagggcagcagccaggtgtag

SEQ ID NO: 296439 - DNA, 1290 bp, Artificial Sequence
  derived and/or modified sequence
tagcacgtgctcaacgaattgattcagacagaacgggtgtacgtccgagaactgtataccgtgctcttgggctatcgcgctgaaatggacaacccagagatgttcgacctcatgccaccactgctgcggaataagaaggatattttgttcggtaatatggccgaaatctatgaattccacaacgacattttcctttcctcccttgaaaactgcgctcatgccccagagagggttggaccttgtttcttggagagaaaggacgacttccagatgtacgcaaaatattgccaaaataaaccaagatcagagactatctggcggaagtactccgaatgcgcgtttttccaagagtgccaaagaaagttgaaacatcgactcaggctggacagttacctattaaagcccgtgcagcgcattaccaagtaccagctgctcctgaaagaactgttgaagtactccaaggattgtgaaggcagcgccctgctgaaaaaggccttggacgctatgctcgacttgctgaaatccgtgaatgattccatgcatcaaattgctatcaacggctacatcggcaacctgaatgagctcggtaaaatgattatgcagggcggattcagtgtttggattggtcataagaaaggcgccaccaagatgaaagatctcgcacggtttaagcctatgcaaagacatttattcctgtacgaaaaggctatcgttttttgcaagagacgggttgaatccggggagggatccgatcgttatccttcctacagcttcaaacattgctggaagatggacgaagtgggcatcactgaatacgtaaagggcgacaaccgaaaatttgagatctggtatggagaaaaagaggaagtgtatatcgtccaagctagtaatgtcgacgtgaaaatgacctggttaaaagagattcgcaacattctgctgaagcagcaggaattgctcactgttaaaaaaaggaagcaacaagaccagctcacagagcgagacaaatttcagatcagtttgcagcaaaacgatgagaagcagcagggcgcgttcatttctactgaggaaacagaactcgaacacacctcaactgtggtcgaggtttgtgaggctattgcttctgtccaggctgaggcaaataccgtctggacagaagcgagtcagtcagccgaaatttctgaagaacccgctgagtggagttctaattatttttatcccacctatgatgagaatgaagaggaaaaccgacctttgatgcggcctgtttcagagatggctctgctctattag

SEQ ID NO: 296440 - DNA, 1290 bp, Artificial Sequence
  derived and/or modified sequence
tgacatgtgctgaatgaactcatccagacagagcgggtgtatgtgcgggagctgtacacagtgctgctgggctacagagctgagatggacaaccctgagatgtttgacctgatgccacccctgctgaggaacaagaaggacatcctgtttggaaacatggccgagatctatgagttccacaatgacatcttcctgagcagcctggagaactgtgcccacgcccctgagcgggtgggcccctgcttcctggagaggaaggatgacttccagatgtatgccaagtactgccagaacaagcccaggtctgagaccatctggaggaagtacagtgaatgtgccttcttccaggagtgccagaggaagctgaagcaccggctgcggctggacagctacctgctgaagcctgtgcagaggatcaccaagtaccagctgctgctgaaggagctgctgaagtacagcaaggactgtgagggcagcgccctgctgaagaaggccctggatgccatgctggacctgctgaagtctgtgaatgacagcatgcaccagatcgccatcaatggctacatcggcaacctgaatgagctgggcaagatgatcatgcagggcggcttctctgtgtggattggccacaagaagggggccaccaagatgaaggacctggcccgcttcaagcccatgcagaggcacctgttcctgtatgagaaggccatcgtgttctgcaagagaagagtggagagcggggagggcagtgaccgctaccccagctacagcttcaagcactgctggaagatggatgaggtgggcatcacagaatatgtgaagggggacaacaggaagtttgagatctggtacggggagaaggaggaggtgtacatcgtgcaggccagcaatgtggatgtgaagatgacctggctgaaggagatccggaacatcctgctgaagcagcaggagctgctgactgtgaagaagaggaagcagcaggaccagctgacagagcgggacaagttccagatcagcctgcagcagaatgatgagaagcagcagggcgccttcatcagcacagaggagacagagctggagcacaccagcacagtggtggaggtgtgtgaggccatcgcctctgtgcaggccgaggccaacacagtgtggacagaggccagccagagcgctgagatcagcgaggagcctgctgagtggagcagcaactacttctaccccacctatgatgaaaatgaggaggagaaccggcccctgatgaggcctgtgtctgagatggccctgctgtactag

SEQ ID NO: 296441 - DNA, 1988 bp, Artificial Sequence
  derived and/or modified sequence
ccacgtactaaatgaactgatacagactgagagagtttatgttcgagaactgtatactgttttgttgggttatagagcggagatggataatccagagatgtttgatcttatgccacctctcctgagaaataaaaaggacattctctttggaaacatggcagaaatatatgaattccataacgacattttcttgagcagcctggaaaattgtgctcatgctccagaaagagtgggaccttgtttcctggaaaggaaggatgattttcagatgtatgcaaaatattgtcagaataagcccagatcagaaacaatttggaggaagtattcagaatgcgcatttttccaggaatgtcaaagaaagttaaaacacagacttagactggattcctatttactcaaaccagtgcaacgaatcactaaatatcagttattgttgaaggagctattaaaatatagcaaagactgtgaaggatctgctctgttgaagaaggcactcgatgcaatgctggatttactgaagtcagttaatgattctatgcatcagattgcaataaatggctatattggaaacttaaatgaactgggcaagatgataatgcaaggtggattcagcgtttggatagggcacaagaaaggtgctacaaaaatgaaggatttggctagattcaaaccaatgcagcgacaccttttcttgtatgaaaaagccattgttttttgcaaaaggcgtgttgaaagtggagaaggctctgacagatacccgtcatacagttttaaacactgttggaaaatggatgaagttggaatcactgaatatgtaaaaggtgataaccgcaagtttgaaatctggtatggtgaaaaggaagaagtttatattgtccaggcttctaatgtagatgtgaagatgacgtggctaaaagaaataagaaatattttgttgaagcagcaggaacttttgacagttaaaaaaagaaagcaacaggatcaattaacagaacgggataagtttcagatttctcttcagcagaatgatgaaaagcaacagggagcttttataagtactgaggaaactgaattggaacacaccagcactgtggtggaggtctgtgaggcaattgcgtcagttcaggcagaagcaaatacagtttggactgaggcatcacaatctgcagaaatctctgaagaacctgcggaatggtcaagcaactatttctaccctacttatgatgaaaatgaagaagaaaataggcccctcatgagacctgtgtcggagatggctctcctatattgatgaagctactatgtcaaatggcaagtagctctttcctgcctgcttctcagctcatttggaaaaatactgcgcaaaagacattgagctcaaatgatgcagatgttgttttcaggttaatggacacgcaaagaaaccacagcacatacttcttttctttcatttaataaagcttttaattatggtacgctgtctttttaaaatcatgtatttaatgtgtcagatattgtgcttgaaagattctcatctcagaatacttttggacttgaaaattatttcttctctactttgtaaccaaatgcaatcggtgtgccttggattatttagtttattaatgaattaagtcaaaattacggctgcaaaatggctaaggtcaagtaaagcacaacattatgatttaatatgcttttgttgaaaccacagcttttgtgcccattgttttaacttgtgtgaaacaatacaaagcccagaaattcttttcggggcatgagtaaattttgttcagggctactgtctgtatgtgcccagataaaattttcatgagagtagtttacaaaagccgtatttaaaagttaatattttcacactttttttctggatttctgcttataattaatgtaacttaaattagttgtgctctgctattttctgtatatttcatgttgtaattctttttttcaaataaaaattaattcttcaggtt

SEQ ID NO: 296442 - DNA, 1290 bp, Artificial Sequence
  derived and/or modified sequence
tgacacgtgctgaacgagctgatccagaccgagcgggtgtacgtgagagaactgtataccgtgctcctggggtatcgagcagagatggacaaccctgagatgtttgacctcatgcctccattactgagaaataaaaaggacatcctgtttgggaacatggcggaaatttatgagttccacaacgacattttcctctcttcactggaaaactgcgcacatgctccagaacgggtcggcccgtgcttcctggagcgcaaagatgatttccagatgtatgcgaagtactgccagaacaaacctaggagcgagaccatctggaggaaatactctgagtgcgcattctttcaggagtgtcagcgtaagctgaagcatagactgagactagattcttacctgctcaaaccagtacagcgtattacgaagtaccagctgcttctcaaggaactgctcaagtactccaaggattgtgagggatccgccctgctgaagaaggccctcgacgctatgctggatttgttgaaatcggtgaatgatagtatgcaccaaattgcaatcaatgggtacattgggaacctcaacgagctgggcaagatgatcatgcagggagggttttccgtgtggataggccataaaaaaggggccacaaagatgaaagatttagctagattcaaacccatgcagcggcacctatttctttatgagaaggccatagtgttctgtaagagacgtgtggagtccggggagggctccgaccggtacccatcatattccttcaagcactgctggaaaatggacgaagtagggataaccgaatacgttaagggcgacaacagaaagttcgaaatttggtatggcgaaaaggaggaggtttacattgtacaggcctcaaacgtagacgtgaagatgacgtggctgaaggagatccggaatatcttgctgaaacaacaggagctcttgacagtgaagaaacggaagcaacaggaccagttaaccgaaagagataaattccagattagccttcaacagaatgatgaaaaacaacagggcgcgttcatatccaccgaggagacagaactggagcataccagtactgtggtggaggtttgtgaagctattgcatccgttcaagcagaggccaataccgtgtggactgaggcttcacagagtgcggagatctcggaagagccagctgaatggtcctctaattatttctatcccacatacgacgagaacgaagaggaaaacagaccactcatgcggcctgtgagtgagatggcccttctgtattag

SEQ ID NO: 296443 - DNA, 1290 bp, Artificial Sequence
  derived and/or modified sequence
taacacgtcctaaatgaactcatccagacagagagagtgtacgtgagagagctctataccgtgctactaggataccgagcagagatggataacccagaaatgttcgatcttatgccacctctgctgcgcaacaagaaagacattctattcggcaatatggctgaaatctatgaattccacaatgacatttttctctcgagcctggaaaactgtgcccatgcccctgaaagggtcggcccttgcttcttagagagaaaggatgatttccagatgtatgcgaaatactgtcagaacaagccccgtagcgagaccatctggaggaaatattcggagtgcgcgttcttccaagagtgtcagagaaaattgaaacacagactacgccttgattcctacctgctcaaacccgtgcagcgaatcacgaagtaccagctgctcttgaaagaattactgaaatattccaaggactgcgagggatcagctcttctgaagaaggccctcgatgccatgctggatctgctcaagtctgtgaatgatagcatgcatcagattgccataaatggatacataggaaaccttaatgaattgggcaaaatgatcatgcaagggggatttagtgtctggatcgggcataaaaaaggagcaacaaagatgaaagatctggccagatttaaacccatgcagcgccaccttttcttgtacgagaaagctattgtgttctgcaaaagaagggtcgagtcgggcgaggggagtgaccgctacccctcatatagcttcaaacattgttggaaaatggatgaggtcggcattaccgaatacgtgaagggggacaacaggaagtttgaaatctggtacggagaaaaagaggaggtgtatattgttcaggcttcaaacgttgacgtcaagatgacttggctcaaagaaatccgcaatatcttgctcaagcagcaagaacttctgaccgtaaagaaacggaaacagcaggaccagctcacggagagggataagtttcaaatttcgttacaacagaacgacgagaaacagcagggcgcttttatttccaccgaggagaccgagctcgaacatacctcaaccgtagtagaagtctgtgaggccattgccagtgtccaggccgaggcaaataccgtctggaccgaggcctcccagtctgccgagattagtgaggagcccgcagagtggtcctcaaattacttctatcctacttacgacgagaacgaagaggagaaccgaccactcatgaggcctgtttcagagatggctctgctgtactag

SEQ ID NO: 296444 - DNA, 1290 bp, Artificial Sequence
  derived and/or modified sequence
tgacacgtgctgaacgagctgatccagaccgagagagtgtacgtgagagagctgtacaccgtgctgctgggctacagagccgagatggacaaccccgagatgttcgacctgatgccccccctgctgagaaacaagaaggacatcctgttcggcaacatggccgagatctacgagttccacaacgacatcttcctgagcagcctggagaactgcgcccacgcccccgagagagtgggcccctgcttcctggagagaaaggacgacttccagatgtacgccaagtactgccagaacaagcccagaagcgagaccatctggagaaagtacagcgagtgcgccttcttccaggagtgccagagaaagctgaagcacagactgagactggacagctacctgctgaagcccgtgcagagaatcaccaagtaccagctgctgctgaaggagctgctgaagtacagcaaggactgcgagggcagcgccctgctgaagaaggccctggacgccatgctggacctgctgaagagcgtgaacgacagcatgcaccagatcgccatcaacggctacatcggcaacctgaacgagctgggcaagatgatcatgcagggcggcttcagcgtgtggatcggccacaagaagggcgccaccaagatgaaggacctggccagattcaagcccatgcagagacacctgttcctgtacgagaaggccatcgtgttctgcaagagaagagtggagagcggcgagggcagcgacagataccccagctacagcttcaagcactgctggaagatggacgaggtgggcatcaccgagtacgtgaagggcgacaacagaaagttcgagatctggtacggcgagaaggaggaggtgtacatcgtgcaggccagcaacgtggacgtgaagatgacctggctgaaggagatcagaaacatcctgctgaagcagcaggagctgctgaccgtgaagaagagaaagcagcaggaccagctgaccgagagagacaagttccagatcagcctgcagcagaacgacgagaagcagcagggcgccttcatcagcaccgaggagaccgagctggagcacaccagcaccgtggtggaggtgtgcgaggccatcgccagcgtgcaggccgaggccaacaccgtgtggaccgaggccagccagagcgccgagatcagcgaggagcccgccgagtggagcagcaactacttctaccccacctacgacgagaacgaggaggagaacagacccctgatgagacccgtgagcgagatggccctgctgtactag

SEQ ID NO: 296445 - protein, 398 aa, Artificial Sequence
  derived and/or modified sequence
MLRRKPSNASEKEFNLDDNIPEDDSGVPTPEDAGKSGKKLGKKWRAVISRTMNRKMGKMMVKALSEEMADTLEEGSASPTSPDYSLDSPGPEKMALAFSEQEEHELPVLSRQASTGSELCSPSPGSGSFGEEPPAPQYTGPFCGRARVHTDFTPSPYDHDSLKLQVRSASGLLWSLAGCAQKGSWTEPGYDSVSGGQGPPYPLSLAPFSSPLPQQKGDVIQIIEKPPVGTWLGLLNGKVGSFKFIYVDVLPEEAVGHARPSRRQSKGKRPKPKTLHELLERIGLEEHTSTLLLNGYQTLEDFKELRETHLNELNIMDPQHRAKLLTAAELLLDYDTGSEEAEEGAESSQEPVAHTVSEPKVDIPRDSGCFEGSESGRDDAELAGTEEQLQGLSLAGAP

SEQ ID NO: 296446 - DNA, 1197 bp, Artificial Sequence
  derived and/or modified sequence
atgctgagaagaaagcccagcaacgccagcgagaaggagttcaacctggacgacaacatccccgaggacgacagcggcgtgcccacccccgaggacgccggcaagagcggcaagaagctgggcaagaagtggagagccgtgatcagcagaaccatgaacagaaagatgggcaagatgatggtgaaggccctgagcgaggagatggccgacaccctggaggagggcagcgccagccccaccagccccgactacagcctggacagccccggccccgagaagatggccctggccttcagcgagcaggaggagcacgagctgcccgtgctgagcagacaggccagcaccggcagcgagctgtgcagccccagccccggcagcggcagcttcggcgaggagccccccgccccccagtacaccggccccttctgcggcagagccagagtgcacaccgacttcacccccagcccctacgaccacgacagcctgaagctgcaggtgagaagcgccagcggcctgctgtggagcctggccggctgcgcccagaagggcagctggaccgagcccggctacgacagcgtgagcggcggccagggccccccctaccccctgagcctggcccccttcagcagccccctgccccagcagaagggcgacgtgatccagatcatcgagaagccccccgtgggcacctggctgggcctgctgaacggcaaggtgggcagcttcaagttcatctacgtggacgtgctgcccgaggaggccgtgggccacgccagacccagcagaagacagagcaagggcaagagacccaagcccaagaccctgcacgagctgctggagagaatcggcctggaggagcacaccagcaccctgctgctgaacggctaccagaccctggaggacttcaaggagctgagagagacccacctgaacgagctgaacatcatggacccccagcacagagccaagctgctgaccgccgccgagctgctgctggactacgacaccggcagcgaggaggccgaggagggcgccgagagcagccaggagcccgtggcccacaccgtgagcgagcccaaggtggacatccccagagacagcggctgcttcgagggcagcgagagcggcagagacgacgccgagctggccggcaccgaggagcagctgcagggcctgagcctggccggcgccccctag

SEQ ID NO: 296447 - DNA, 1197 bp, Artificial Sequence
  derived and/or modified sequence
atgttaagaaggaaaccaagcaacgcctccgagaaggaattcaatctggacgacaatattccagaggatgactctggcgtccctactcccgaagacgccggtaagtccggcaagaagttagggaagaagtggagagccgtgatctcccgaacaatgaataggaagatgggaaagatgatggtcaaagcactcagtgaagaaatggccgacacactagaagagggctctgcatctccaacgagcccagattactccctcgactcacccggcccagaaaagatggccctcgcatttagcgaacaggaggaacacgaactgcccgtgctttctagacaggccagcactggaagcgaattgtgttctccttctccagggagtggcagctttggagaggagcccccagctccgcagtataccgggcctttttgtgggagggccagagtccatacagacttcacaccttctccttacgatcatgattccttaaagctccaggtgcgcagtgctagtggactgttgtggagcctcgcaggctgcgctcagaagggttcttggacagagcctggctacgattccgtgagcggcggtcaggggccaccatatcctctcagcctcgcaccattcagctcccccctcccacagcagaagggtgatgttattcagatcattgagaagcctcccgtgggcacctggctcggattgctgaatggaaaggtgggctcatttaaatttatttacgttgatgtccttccagaggaggccgtaggtcacgcgcgccctagccgacgccaatctaaaggaaagaggccaaaacctaagactttgcacgagctcctcgagcgaattggtctggaggagcacactagcaccctcttactcaacgggtaccaaacattggaagatttcaaggagttgagagagacgcatctgaatgaactcaacattatggatcctcagcatcgcgccaagctgctgaccgctgctgagctcctgttggattacgatacagggagtgaggaggcagaagagggggctgaatctagtcaggagcctgtagcccacaccgtatccgagcccaaagtggacatccccagggattccggatgctttgagggttcagaatccggccgtgacgacgctgagctggctggtaccgaagagcagctgcaaggcctgtccctagccggtgccccttag

SEQ ID NO: 296448 - DNA, 1197 bp, Artificial Sequence
  derived and/or modified sequence
atgctgcggaggaagcccagcaatgccagcgagaaggagttcaacctggatgacaacatcccagaagatgattctggagtgcccaccccagaagatgctgggaagagcggcaagaagctgggcaagaagtggagggctgtgatcagcaggaccatgaacaggaagatgggcaagatgatggtgaaggccctgtctgaggagatggctgacaccctggaggagggcagcgccagccccaccagcccagactacagcctggacagccctggccctgagaagatggccctggccttcagcgagcaggaggagcacgagctgcctgtgctgagccggcaggccagcactggaagtgagctgtgcagccccagccctggcagcggcagctttggagaggagcccccagccccccagtacacaggccccttctgtggccgggcccgggtgcacacagacttcacccccagcccctatgaccatgacagcctgaagctgcaggtgcgcagcgccagcggcctgctgtggagcctggccggctgtgcccagaagggctcctggacagagcccggctatgacagcgtgtctgggggccagggccccccctaccccctgagcctggcccccttcagcagccccctgccccagcagaagggagatgtgatccagatcatcgagaagccccctgtgggcacctggctgggcctgctgaatggcaaggtgggcagcttcaagttcatctacgtggatgtgctgcctgaggaggccgtgggccacgcccggcccagccggcggcagagcaagggcaagaggcccaagcccaagaccctgcacgagctgctggagcgcatcggcctggaggagcacaccagcaccctgctgctgaatggctaccagaccctggaggacttcaaggagctgcgggagacccacctgaatgagctgaacatcatggacccccagcaccgggccaagctgctgacagctgctgagctgctgctggactatgacaccggcagcgaggaggccgaggagggcgctgagagcagccaggagcctgtggcccacacagtgtctgagcccaaggtggacatcccccgggacagcggctgctttgagggcagcgagagcggcagagatgatgctgagctggccggcacagaggagcagctgcagggcctgagcctggccggggccccctag

SEQ ID NO: 296449 - DNA, 1197 bp, Artificial Sequence
  derived and/or modified sequence
atgctgcggcggaagcccagcaacgccagcgagaaggagttcaacctggacgacaacattcctgaggacgacagcggggtccccacaccagaggatgctgggaaaagcggaaagaagctgggcaagaagtggcgtgccgttatctcacggacgatgaatcggaaaatgggtaaaatgatggtgaaagccctgtccgaggagatggctgataccctggaggaggggagtgcgtcaccaacctcaccggattactccctcgactctccaggcccagaaaagatggcattggctttttcagagcaggaggagcatgaactgcctgttctcagccgccaagcttcaacaggcagcgaattatgctctccctcaccgggctccggtagctttggagaagagcctccagccccacagtacacgggcccgttctgtggaagggcccgagtccacaccgacttcactccatctccatatgaccatgacagcctgaaactgcaggttcggagcgcgtctggcctcttatggagcctggctggctgtgcccagaaaggaagttggacagaacccggttacgactctgtgtctggaggccagggtccaccctacccactgagcctagcaccgtttagcagccctctcccacagcaaaaaggtgatgtgatccagatcattgaaaaacctccggtcggcacctggctgggcctgctgaacggaaaggttggatcttttaaatttatctatgtggacgtgctgcctgaggaggccgtaggccacgccagaccgtcgcggagacagtccaagggcaaacggcctaagcctaagactctccacgagctgctggagagaattggcctggaggagcatactagcactctgcttctaaacgggtaccaaaccttggaggacttcaaggagctgcgggagacgcatcttaacgagctgaacattatggatccgcagcatcgtgccaagctgctgaccgccgcagagttgctgttggattacgatacagggtccgaagaggccgaagaaggtgcagagagtagccaggaacctgttgcccacacagtaagtgagcccaaggtggatatccccagagactcagggtgctttgaggggtccgaatcaggcagagatgacgcagaactcgccggcaccgaggaacagctgcaaggcctctcactagcaggggccccgtag

SEQ ID NO: 296450 - DNA, 1197 bp, Artificial Sequence
  derived and/or modified sequence
atgctgcgcaggaaaccaagcaatgctagcgagaaagagttcaacctcgacgacaatattcccgaagacgactccggagtccccactcccgaagatgccggtaaatcgggcaagaagttgggcaaaaagtggcgcgcagtaatctcgagaacaatgaatcgtaagatggggaaaatgatggttaaggccctgtccgaggaaatggctgacaccttggaagagggaagcgcctctccgacctctccagattattcacttgactcacctggaccagagaagatggctcttgcctttagcgagcaggaggagcatgagctccctgtcttgtcgagacaggccagcacgggctccgagctctgttctccatcccctgggagcggaagttttggagaggagcccccagctcctcagtatactggaccattctgtggcagggcccgtgtgcacacggatttcactccaagcccctatgatcatgattccctcaagcttcaggtcagaagcgcaagcggtctcctttggtcacttgcgggatgcgcacagaaggggagctggactgaaccaggctacgacagcgtgagtggagggcagggcccaccatatcctctctccctcgcccctttcagcagtcccctgcctcagcagaagggcgatgtgattcagattatcgaaaagccgccagtggggacctggctcggactgctgaacgggaaggtaggtagttttaaattcatatatgtcgatgtgctaccagaagaggcagtggggcacgcccgaccaagccggagacaatccaaaggcaaacggcctaaacccaagaccctgcacgaactgctggaacgtataggcctggaagaacacactagcaccctgttgctgaatggctaccagacgttagaggactttaaagaactcagggaaacacacttaaacgagctaaatatcatggacccgcagcatagggccaaactgctcaccgccgctgaacttctcttagattatgataccggatccgaggaagcggaagagggcgcagaatccagtcaggagccggtggctcacactgtctccgagcccaaggtagatatcccacgggactcggggtgctttgaagggagcgagtcaggtcgcgatgacgccgaacttgctggaaccgaggaacagctacaaggactgtctctggcgggagctccttag

SEQ ID NO: 296451 - DNA, 1647 bp, Artificial Sequence
  derived and/or modified sequence
atgctgctgctgccgggtgtccatggcccgcacccccaagctgccactgcagcagtcagagtggcagctgaaggctcggttcatgccgtgcccccgggcagttctggtgaggctaagcaagaggcctctgcatcttgacacctaggagagcagggacggagtctcccagggtggaggaccatgctgcgccgcaagccctccaatgccagtgagaaggagtttaatctggatgataacattccagaagatgactcaggtgtccccaccccagaagatgctgggaagagtggcaaaaagctggggaagaagtggagggcagtgatttcccgaaccatgaacaggaagatgggcaagatgatggtgaaggccctgtcagaagagatggcagacactctggaggagggctctgcctccccgacatctccagactacagcctggacagccctggccctgagaagatggcgctggccttttctgagcaagaggagcatgaacttccggtgctcagccgccaggcatcaacaggcagtgagctctgcagccccagcccaggttctggcagcttcggggaggaaccacctgccccccagtacacagggcctttctgtggccgggcacgagtccacaccgacttcactcccagcccctatgaccacgactcgctgaaactgcaggtaagatcagcatccgggcttctctggagcctggcaggctgtgcccaaaaaggaagctggactgaaccaggctatgacagtgtcagtggaggccaaggccccccatatcctctctcccttgctcccttctcctctcctctcccccaacagaaaggagatgtgatccagatcattgaaaagccacctgtgggcacgtggctgggcctactcaatggcaaggtgggctctttcaaattcatctatgtggatgtgctgcccgaggaggccgtggggcatgcccgccccagccgccgacagagcaagggcaagaggcccaagcctaagaccctgcatgagctgctggagcgcatcggcctggaggagcacacatccaccctcctgctcaatggctaccagacactggaagacttcaaagagctgcgagaaacacacctcaatgagctgaacatcatggatccacagcaccgggccaagctgctcacggccgccgagctgctgctggactatgacactggcagtgaggaggctgaagagggcgccgagagcagccaggagccagtggcacacacagtgtcggaacccaaggtggacatcccgcgcgactcaggctgctttgagggctcggagagcgggcgcgatgacgcagagctggcaggcactgaggagcagctgcaaggcctctccctggccggggcaccttgaggtggcggtggcaataggccaaggctgggacccagctgcaaaggctgtaggagtggggtttatcgaggggaccagaggggcctcaggctttcagatgaaatggctcctcctactcacccactttattcctctccatgtaattcaggacaagctgcaacttcccccagcttaacacaatgcccatacctcatacgatatgcgccctcccgttccatccctggccccctcaaacgagacttctcacaaggctgattacagatggtcaaacct

SEQ ID NO: 296452 - protein, 1385 aa, Artificial Sequence
  derived and/or modified sequence
TPAAIPTSAPIPASFSLSRVCFPAAQAPAMQKVPLSFQPGTVLTPSQPLVYIPPPSCGQPLSVATLPTTLGVSSTLTLPVLPSYLQDRCLPGVLASPELRSYPYAFSVARPLTSDSKLVSLEVNRLPCTSPSGSTTTQPAPDGVPGPLADTSLVTASAKVLPTPQPLLPAPSGSSAPPHPAKMPSGTEQQTEGTSVTFSPLKSPPQLEREMASPPECSEMPLDLSSKSNRQKLPLPNQRKTPPMPVLTPVHTSSKALLSTVLSRSQRTTQAAGGNVTSCLGSTSSPFVIFPEIVRNGDPSTWVKNSTALISTIPGTYVGVANPVPASLLLNKDPNLGLNRDPRHLPKQEPISIIDQGEPKGTGATCGKKGSQAGAEGQPSTVKRYTPARIAPGLPGCQTKELSLWKPTGPANIYPRCSVNGKPTSTQVLPVGWSPYHQASLLSIGISSAGQLTPSQGAPIRPTSVVSEFSGVPSLSSSEAVHGLPEGQPRPGGSFVPEQDPVTKNKTCRIAAKPYEEQVNPVLLTLSPQTGTLALSVQPSGGDIRMNQGPEESESHLCSDSTPKMEGPQGACGLKLAGDTKPKNQVLATYMSHELVLATPQNLPKMPELPLLPHDSHPKELILDVVPSSRRGSSTERPQLGSQVDLGRVKMEKVDGDVVFNLATCFRADGLPVAPQRGQAEVRAKAGQARVKQESVGVFACKNKWQPDDVTESLPPKKMKCGKEKDSEEQQLQPQAKAVVRSSHRPKCRKLPSDPQESTKKSPRGASDSGKEHNGVRGKHKHRKPTKPESQSPGKRADSHEEGSLEKKAKSSFRDFIPVVLSTRTRSQSGSICSSFAGMADSDMGSQEVFPTEEEEEVTPTPAKRRKVRKTQRDTQYRSHHAQDKSLLSQGRRHLWRAREMPWRTEAARQMWDTNEEEEEEEEEGLLKRKKRRRQKSRKYQTGEYLTEQEDEQRRKGRADLKARKQKTSSSQSLEHRLRNRNLLLPNKVQGISDSPNGFLPNNLEEPACLENSEKPSGKRKCKTKHMATVSEEAKGKGRWSQQKTRSPKSPTPVKPTEPCTPSKSRSASSEEASESPTARQIPPEARRLIVNKNAGETLLQRAARLGYKDVVLYCLQKDSEDVNHRDNAGYTALHEACSRGWTDILNILLEHGANVNCSAQDGTRPVHDAVVNDNLETIWLLLSYGADPTLATYSGQTAMKLASSDTMKRFLSDHLSDLQGRAEGDPGVSWDFYSSSVLEEKDGFACDLLHNPPGSSDQEGDDPMEEDDFMFELSDKPLLPCYNLQVSVSRGPCNWFLFSDVLKRLKLSSRIFQARFPHFEITTMPKAEFYRQVASSQLLTPAERPGGLDDRSPPGSSETVELVRYEPDLLRLLGSEVEFQSCNS

SEQ ID NO: 296453 - protein, 1042 aa, Artificial Sequence
  derived and/or modified sequence
MEQDTAAVAATVAAADATATIVVIEDEQPGPSTSQEEGAAAAATEATAATEKGEKKKEKNVSSFQLKLAAKAPKSEKEMDPEYEEKMKADRAKRFEFLLKQTELFAHFIQPSAQKSPTSPLNMKLGRPRIKKDEKQSLISAGDYRHRRTEQEEDEELLSESRKTSNVCIRFEVSPSYVKGGPLRDYQIRGLNWLISLYENGVNGILADEMGLGKTLQTIALLGYLKHYRNIPGPHMVLVPKSTLHNWMNEFKRWVPSLRVICFVGDKDARAAFIRDEMMPGEWDVCVTSYEMVIKEKSVFKKFHWRYLVIDEAHRIKNEKSKLSEIVREFKSTNRLLLTGTPLQNNLHELWALLNFLLPDVFNSADDFDSWFDTKNCLGDQKLVERLHAVLKPFLLRRIKTDVEKSLPPKKEIKIYLGLSKMQREWYTKILMKDIDVLNSSGKMDKMRLLNILMQLRKCCNHPYLFDGAEPGPPYTTDEHIVSNSGKMVVLDKLLAKLKEQGSRVLIFSQMTRLLDILEDYCMWRGYEYCRLDGQTPHEEREEAIEAFNAPNSSKFIFMLSTRAGGLGINLASADVVILYDSDWNPQVDLQAMDRAHRIGQKKPVRVFRLITDNTVEERIVERAEIKLRLDSIVIQQGRLIDQQSNKLAKEEMLQMIRHGATHVFASKESELTDEDITTILERGEKKTAEMNERLQKMGESSLRNFRMDIEQSLYKFEGEDYREKQKLGMVEWIEPPKRERKANYAVDAYFREALRVSEPKIPKAPRPPKQPNVQDFQFFPPRLFELLEKEILYYRKTIGYKVPRNPDIPNPALAQREEQKKIDGAEPLTPEETEEKEKLLTQGFTNWTKRDFNQFIKANEKYGRDDIDNIAREVEGKSPEEVMEYSAVFWERCNELQDIEKIMAQIERGEARIQRRISIKKALDAKIARYKAPFHQLRIQYGTSKGKNYTEEEDRFLICMLHKMGFDRENVYEELRQCVRNAPQFRFDWFIKSRTAMEFQRRCNTLISLIEKENMEIEERERAEKKKRATKTPMVKFSAFS

SEQ ID NO: 296454 - DNA, 3129 bp, Artificial Sequence
  derived and/or modified sequence
atggagcaggacaccgccgccgtggccgccaccgtggccgccgccgacgccaccgccaccatcgtggtgatcgaggacgagcagcccggccccagcaccagccaggaggagggcgccgccgccgccgccaccgaggccaccgccgccaccgagaagggcgagaagaagaaggagaagaacgtgagcagcttccagctgaagctggccgccaaggcccccaagagcgagaaggagatggaccccgagtacgaggagaagatgaaggccgacagagccaagagattcgagttcctgctgaagcagaccgagctgttcgcccacttcatccagcccagcgcccagaagagccccaccagccccctgaacatgaagctgggcagacccagaatcaagaaggacgagaagcagagcctgatcagcgccggcgactacagacacagaagaaccgagcaggaggaggacgaggagctgctgagcgagagcagaaagaccagcaacgtgtgcatcagattcgaggtgagccccagctacgtgaagggcggccccctgagagactaccagatcagaggcctgaactggctgatcagcctgtacgagaacggcgtgaacggcatcctggccgacgagatgggcctgggcaagaccctgcagaccatcgccctgctgggctacctgaagcactacagaaacatccccggcccccacatggtgctggtgcccaagagcaccctgcacaactggatgaacgagttcaagagatgggtgcccagcctgagagtgatctgcttcgtgggcgacaaggacgccagagccgccttcatcagagacgagatgatgcccggcgagtgggacgtgtgcgtgaccagctacgagatggtgatcaaggagaagagcgtgttcaagaagttccactggagatacctggtgatcgacgaggcccacagaatcaagaacgagaagagcaagctgagcgagatcgtgagagagttcaagagcaccaacagactgctgctgaccggcacccccctgcagaacaacctgcacgagctgtgggccctgctgaacttcctgctgcccgacgtgttcaacagcgccgacgacttcgacagctggttcgacaccaagaactgcctgggcgaccagaagctggtggagagactgcacgccgtgctgaagcccttcctgctgagaagaatcaagaccgacgtggagaagagcctgccccccaagaaggagatcaagatctacctgggcctgagcaagatgcagagagagtggtacaccaagatcctgatgaaggacatcgacgtgctgaacagcagcggcaagatggacaagatgagactgctgaacatcctgatgcagctgagaaagtgctgcaaccacccctacctgttcgacggcgccgagcccggccccccctacaccaccgacgagcacatcgtgagcaacagcggcaagatggtggtgctggacaagctgctggccaagctgaaggagcagggcagcagagtgctgatcttcagccagatgaccagactgctggacatcctggaggactactgcatgtggagaggctacgagtactgcagactggacggccagaccccccacgaggagagagaggaggccatcgaggccttcaacgcccccaacagcagcaagttcatcttcatgctgagcaccagagccggcggcctgggcatcaacctggccagcgccgacgtggtgatcctgtacgacagcgactggaacccccaggtggacctgcaggccatggacagagcccacagaatcggccagaagaagcccgtgagagtgttcagactgatcaccgacaacaccgtggaggagagaatcgtggagagagccgagatcaagctgagactggacagcatcgtgatccagcagggcagactgatcgaccagcagagcaacaagctggccaaggaggagatgctgcagatgatcagacacggcgccacccacgtgttcgccagcaaggagagcgagctgaccgacgaggacatcaccaccatcctggagagaggcgagaagaagaccgccgagatgaacgagagactgcagaagatgggcgagagcagcctgagaaacttcagaatggacatcgagcagagcctgtacaagttcgagggcgaggactacagagagaagcagaagctgggcatggtggagtggatcgagccccccaagagagagagaaaggccaactacgccgtggacgcctacttcagagaggccctgagagtgagcgagcccaagatccccaaggcccccagaccccccaagcagcccaacgtgcaggacttccagttcttcccccccagactgttcgagctgctggagaaggagatcctgtactacagaaagaccatcggctacaaggtgcccagaaaccccgacatccccaaccccgccctggcccagagagaggagcagaagaagatcgacggcgccgagcccctgacccccgaggagaccgaggagaaggagaagctgctgacccagggcttcaccaactggaccaagagagacttcaaccagttcatcaaggccaacgagaagtacggcagagacgacatcgacaacatcgccagagaggtggagggcaagagccccgaggaggtgatggagtacagcgccgtgttctgggagagatgcaacgagctgcaggacatcgagaagatcatggcccagatcgagagaggcgaggccagaatccagagaagaatcagcatcaagaaggccctggacgccaagatcgccagatacaaggcccccttccaccagctgagaatccagtacggcaccagcaagggcaagaactacaccgaggaggaggacagattcctgatctgcatgctgcacaagatgggcttcgacagagagaacgtgtacgaggagctgagacagtgcgtgagaaacgccccccagttcagattcgactggttcatcaagagcagaaccgccatggagttccagagaagatgcaacaccctgatcagcctgatcgagaaggagaacatggagatcgaggagagagagagagccgagaagaagaagagagccaccaagacccccatggtgaagttcagcgccttcagctag

SEQ ID NO: 296455 - DNA, 3129 bp, Artificial Sequence
  derived and/or modified sequence
atggagcaggacactgcggctgtagctgcaactgtcgccgccgccgacgccacagccaccatcgtcgtaatcgaagacgaacaacccggaccaagcacttcacaggaggaaggcgccgccgctgccgcgaccgaagccacggctgccacagagaaaggcgaaaaaaaaaaggagaagaatgtaagcagcttccaacttaagctggccgccaaggcgccaaaaagtgagaaggagatggaccccgagtatgaggagaaaatgaaggcagatcgcgcgaaacggttcgagtttctccttaagcaaacggagctgtttgctcacttcatacagccatccgctcaaaaaagtccgacctcgcctctaaacatgaagctcgggaggcctaggattaagaaggacgaaaaacagagtcttatctctgctggggactaccgacaccgcaggactgaacaggaggaagatgaagagctgcttagcgaatcaaggaaaacaagcaacgtatgcatccggtttgaggtgtcaccctcctatgtcaagggcgggccccttcgcgattatcaaataagaggattaaattggctcatcagtctatatgagaacggcgtgaacggaatcctggctgacgagatggggttaggcaaaaccctacagactatagccctgttgggatacctcaagcactatagaaacattcctggccctcacatggtgctggtgccaaagagcacccttcataattggatgaacgagttcaaacggtgggtcccatccctcagggttatctgctttgttggggacaaggacgcccgcgccgccttcatcagggacgaaatgatgccaggagaatgggacgtctgtgtaacctcttatgagatggttattaaggagaagtcagtctttaagaagtttcactggcgatatttggttatcgacgaggctcataggattaagaacgagaaaagtaagctcagtgaaattgttcgagagttcaagtcaacaaatagactgcttctgaccggtactcctctccagaacaatctacacgagttgtgggccttgctcaatttccttctccctgatgtgttcaattccgccgatgactttgacagttggtttgacacgaagaactgtcttggggatcagaagttggtggaacggcttcatgctgtgttgaagccttttttacttagaaggataaaaacggacgtcgagaaatctttgcctcccaaaaaggagatcaagatctacctaggactcagcaagatgcaacgcgagtggtatacaaaaattcttatgaaagacattgatgtgctgaactcatccggaaagatggataagatgaggctactgaacatcttgatgcagctgcgcaagtgctgtaaccatccctatctttttgatggcgctgagccaggcccaccgtatacaacagatgagcatatagtctctaattcaggcaagatggtggttttggataagctccttgccaagttgaaggagcaaggttcccgggtgctcatcttttcccagatgacccggctcctcgacatcctggaggattactgtatgtggcggggttatgagtattgcagacttgacggtcagactcctcatgaggaaagggaagaagcgatcgaagcatttaacgcaccaaattcgagtaaatttatttttatgctgtctactcgagccggcggccttggcatcaacctggcctccgcggatgtagtgattctgtacgacagtgattggaatcctcaggtggacctgcaggccatggaccgggctcacaggatcggccagaagaaacctgtacgcgtgttcaggctgatcactgacaatactgtggaggagcggattgtggaacgggcggaaatcaaattgaggctggattccattgtgatccaacagggcaggttgatcgaccagcagtccaacaaactggctaaggaggaaatgctgcaaatgatccggcacggggctacccatgtgtttgccagtaaggagagcgagctcactgacgaggatattacaacaatactggaaaggggcgagaagaagactgctgaaatgaatgaacgtctgcagaagatgggggagtcatccctaagaaacttcagaatggatatcgaacagtccctgtataagtttgaaggagaggactacagagagaagcagaaacttggcatggttgaatggattgagcctccaaaacgcgaaaggaaggcaaattatgctgtggacgcctatttccgggaggctttacgagtgtcggagcccaaaatccccaaagctccacgcccgcctaagcagcctaatgtccaggattttcagtttttcccaccgagactttttgagctgctcgagaaggagatcctgtactatcgtaagacaattggatataaagtgccacggaatccagacatcccgaatccggcccttgcacagcgtgaggagcagaaaaagatagacggcgccgagcctctcaccccagaggaaacagaggagaaggagaaactactgactcaaggtttcacaaactggacaaaaagagacttcaatcagtttattaaggctaacgagaaatacggcagagacgatatagataacatcgctagagaagttgagggtaagagtcctgaggaggtgatggagtattccgccgttttctgggaaaggtgtaatgaactccaggacatcgaaaaaattatggctcagatcgagcgaggtgaagctagaatccagcgacggatatccattaaaaaagcgcttgacgcaaaaattgctagatataaggctcctttccaccagctgagaattcagtacgggaccagtaaaggaaagaactacaccgaagaagaggacaggttcctgatctgcatgttacataaaatgggctttgaccgggaaaatgtttacgaagagctaagacaatgtgtgcgcaatgcacctcagttccggttcgattggtttatcaagagccgcaccgcgatggagtttcagcgtcgctgcaacacacttattagcctgatagaaaaggagaacatggagatagaggagcgcgaacgtgctgagaagaaaaagcgcgcaaccaaaactcccatggtcaagttctcagccttctcctag

SEQ ID NO: 296456 - DNA, 3129 bp, Artificial Sequence
  derived and/or modified sequence
atggagcaggacactgctgctgtggccgctacagtggctgctgcagacgcgaccgcaaccatcgtcgtcatcgaggatgaacaacccgggccatccaccagtcaggaggagggcgctgcagctgctgctactgaagctaccgccgccacagaaaaaggtgaaaaaaagaaagagaagaatgtctcctcttttcagttgaagctggccgctaaggcccctaagtcagagaaagagatggaccccgaatacgaagaaaagatgaaagccgatagagcaaagcgattcgaatttctgttgaagcagacggagctgtttgcccattttatccaaccatctgcccagaagagccccacctcccccctaaacatgaagctcgggaggcccaggatcaagaaggatgaaaagcagtccctaattagcgctggggactatcgccataggcgaacggagcaggaagaggatgaggagttgctgtccgagagtagaaaaactagcaacgtatgtattagattcgaggtaagccccagttacgtaaaaggggggcctctacgcgactaccagatccgcgggctgaactggctaattagcctgtatgagaatggtgtgaacggaatcctggccgatgagatggggctgggaaaaacgctccagacaattgctctgctgggctacttaaaacattacaggaacattccgggaccccatatggtgttagtcccgaaatcaacgctacataattggatgaacgagttcaaaagatgggtcccctcactgcgggtcatatgtttcgttggggataaggatgcacgggcagcgttcattcgtgatgaaatgatgcccggagaatgggatgtgtgtgtgacctcatatgaaatggtgataaaggagaagtctgtttttaagaaattccattggcgttatttagtaattgatgaagcccacaggatcaaaaatgaaaagtccaaactctcagagatcgtccgcgagtttaagtcaactaacaggctcctgctgacgggtacacctctgcaaaataatctacacgaactgtgggctttattgaattttttgctccctgacgtcttcaactccgctgatgacttcgacagctggttcgacacaaaaaactgtcttggggatcaaaaactggtggagcgtctgcacgctgtcttaaaacccttccttcttcgccgaattaaaacagacgtcgagaagagcctacccccgaagaaagagattaagatttacctgggtctgagtaaaatgcagcgcgagtggtacactaagattctgatgaaggacatagatgtactgaacagctctggcaaaatggacaagatgagattacttaatatcctgatgcagctgagaaaatgctgcaatcacccgtacttgtttgatggtgccgagcccggaccaccttacacgacagatgagcacatcgtgtctaactcgggcaagatggtagtgctcgataagcttctggccaagttgaaggagcagggctctagagtgttaatattttcccaaatgacccgcctactcgatattttggaggattactgtatgtggaggggttacgagtactgtcgattagacggccaaacgccgcatgaggagcgcgaagaggctattgaagctttcaacgcacccaacagctcaaagttcattttcatgttgtccacgcgtgctggtgggttggggatcaacctcgccagtgctgacgtggtgatcttatatgactctgattggaacccgcaggtcgatctacaagccatggatagggcccacagaatcggacagaagaagcctgtgcgggtgttccgacttatcactgacaacaccgtcgaggaaaggatcgtggagagagccgagatcaaactccgactggatagtattgttatacagcagggtcgactcatcgaccagcaaagcaataaactcgcaaaagaggagatgctgcagatgatccgtcacggagcaactcatgtattcgctagcaaagagagtgagctgacagacgaggatattaccaccattctcgagagaggtgagaagaagacagctgaaatgaacgagagactgcaaaagatgggcgaaagtagcctgcggaattttcgaatggacatcgaacaatctctatataagttcgagggcgaggattaccgtgagaaacaaaagttaggaatggtggagtggatcgagccccctaagcgggagcgaaaagccaattacgctgtagatgcctattttcgcgaagctttgagggtctctgagcccaagatcccaaaggcgccacggccaccaaagcaaccgaatgtccaggactttcagttctttccacctcgtcttttcgaacttctggagaaggagatcctgtattatcggaagaccatcggctacaaagtaccgagaaaccctgacatcccgaatccggctctcgctcaacgcgaggaacagaaaaagattgatggggccgaaccgctcacgccagaggaaactgaggagaaggagaagctcttaacccagggtttcactaactggacaaagcgcgattttaatcagtttatcaaagctaacgagaaatatggcagagatgacatcgataatatcgcacgtgaggtcgagggaaaatcccctgaggaggtcatggaatattccgctgttttttgggaaaggtgcaacgagctgcaggacatcgagaagattatggctcagatcgagcgtggtgaggctcgtattcagcgccgcatctcgataaagaaggcgttggacgctaaaattgctcggtataaggcgcctttccaccagctgcgaatccagtacgggacttccaagggtaagaattatacagaggaagaggataggttcctaatttgtatgttacacaaaatggggttcgaccgcgagaacgtctacgaggagttaaggcagtgtgtccgtaacgcgccacagtttagatttgattggttcattaagtcccgtaccgccatggagttccagcgacgttgcaacacactaatatcacttattgagaaagaaaatatggagatcgaagaaagggaacgagccgagaagaaaaaacgcgctactaagacacccatggtgaagtttagcgcattcagttag

SEQ ID NO: 296457 - DNA, 3129 bp, Artificial Sequence
  derived and/or modified sequence
atggagcaggacacagctgctgtggccgccaccgtggccgctgctgatgccacagccaccatcgtggtgattgaagatgagcagcccggccccagcaccagccaggaggagggcgctgctgctgctgccacagaggccacagctgccacagagaagggggagaagaagaaggagaagaatgtgtcctccttccagctgaagctggccgccaaggcccccaagtctgagaaggagatggaccctgaatatgaggagaagatgaaggctgaccgggccaagagatttgagttcctgctgaagcagacagagctgtttgcccacttcatccagcccagcgcccagaagagccccaccagccccctgaacatgaagctgggccggccccgcatcaagaaggatgagaagcagagcctcatctctgctggggactaccgccacagaagaacagagcaggaggaggatgaggagctgctgtctgagagcaggaagaccagcaatgtgtgcatccgctttgaggtgagccccagctatgtgaagggcggccccctgcgggactaccagatccggggcctgaactggctgatcagcctgtatgaaaatggagtgaatggcatcctggctgatgagatgggcctgggcaagaccctgcagaccatcgccctgctgggctacctgaagcactacagaaacatccctggcccccacatggtgctggtgcccaagagcaccctgcacaactggatgaatgagttcaagcgctgggtgcccagcctgcgggtcatctgctttgtgggggacaaggatgcccgggccgccttcatcagagatgagatgatgcctggagagtgggatgtgtgtgtgaccagctatgagatggtgatcaaggagaagagcgtcttcaagaagttccactggagatacctggtgattgatgaggcccaccgcatcaagaatgagaagagcaagctgtctgagatcgtgcgggagttcaagagcaccaaccggctgctgctgaccggcacccccctgcagaacaacctgcacgagctgtgggccctgctgaacttcctgctgcctgatgtgttcaacagcgcagatgactttgacagctggtttgacaccaagaactgcctgggggaccagaagctggtggagcggctgcatgctgtgctgaagcccttcctgctgcggcgcatcaagacagatgtggagaagagcctgccccccaagaaggagatcaagatctacctgggcctgagcaagatgcagcgggagtggtacaccaagatcctgatgaaggacattgatgtgctgaacagcagcggcaagatggacaagatgaggctgctgaacatcctgatgcagctgaggaagtgctgcaaccacccctacctgtttgatggagctgagcccggccccccctacaccacagatgagcacatcgtgagcaacagcggcaagatggtggtgctggacaagctgctggccaagctgaaggagcagggcagccgggtgctgatcttcagccagatgacccggctgctggacatcctggaggactactgcatgtggaggggctatgagtactgccgcctggatggccagacccctcatgaggagcgggaggaggccatcgaggccttcaatgcccccaacagcagcaagttcatcttcatgctgagcacccgggccggcggcctgggcatcaacctggccagcgcagatgtggtgatcctgtatgacagcgactggaacccccaggtggacctgcaggccatggaccgggcccacagaattggccagaagaagcctgtgcgggtcttccgcctcatcacagacaacacagtggaggagcgcatcgtggagcgggcagagatcaagctgcggctggacagcatcgtcatccagcagggccgcctgattgaccagcagagcaacaagctggccaaggaggagatgctgcagatgatcagacatggagccacccacgtgtttgccagcaaggagagcgagctgacagatgaggacatcaccaccatcctggagcggggggagaagaagacagctgagatgaatgaaaggctgcagaagatgggagagagcagcctgaggaacttcaggatggacatcgagcagagcctgtacaagtttgaaggagaggactaccgggagaagcagaagctgggcatggtggagtggattgagccccccaagcgggagaggaaggccaactatgctgtggatgcctacttccgggaggccctgcgggtgtctgagcccaagatccccaaggccccccggccccccaagcagcccaacgtgcaggacttccagttcttccccccccggctgtttgagctgctggagaaggagatcctgtactacaggaagaccatcggctacaaggtgcccagaaatccagacatccccaacccagccctggcccagcgggaggagcagaagaagattgatggagctgagcccctgaccccagaggagacagaggagaaggagaagctgctgacccagggcttcaccaactggaccaagagggacttcaaccagttcatcaaggccaatgagaagtatggaagagatgacatcgacaacatcgcccgggaggtggagggcaagagccctgaggaggtgatggagtacagcgctgtgttctgggagcgctgcaatgagctgcaggacatcgagaagatcatggcccagatcgagcggggggaggcccgcatccagaggcgcatcagcatcaagaaggccctggatgccaagatcgcccgctacaaggcccccttccaccagctgcgcatccagtatggcaccagcaagggcaagaactacacagaggaggaggaccgcttcctgatctgcatgctgcacaagatgggctttgaccgggagaatgtgtatgaggagctgcggcagtgtgtgagaaatgccccccagttccgctttgactggttcatcaagagcaggacagccatggagttccagaggcgctgcaacaccctcatcagcctgattgagaaggagaacatggagattgaggagcgggagcgggcagagaagaagaagagggccaccaagacccccatggtgaagttcagcgccttctcctag

SEQ ID NO: 296458 - DNA, 3129 bp, Artificial Sequence
  derived and/or modified sequence
atggagcaggacaccgccgccgtggccgccaccgtggccgccgccgacgctacagccacaattgtggtcatagaagatgagcagccaggaccaagcacttcacaagaagaaggcgcagcagcagccgctaccgaagccaccgccgctacagagaagggtgagaagaaaaaagagaagaacgtgtcaagcttccagctcaagctagccgcaaaggcaccaaagtccgagaaggagatggatcctgagtacgaagagaagatgaaggctgaccgtgctaagcgtttcgaattcctcttgaaacagactgagcttttcgctcacttcattcagccatcagcccagaagagcccaacctcccccctgaacatgaaactgggaagaccacgaatcaaaaaggatgaaaagcagtccctgatttcagccggcgactaccgacacagacgtacggagcaggaggaagacgaagagcttttatctgaatccaggaagacatcgaatgtgtgcatcagatttgaggtgtccccgtcctacgtgaagggcgggcctctacgggactaccaaatccgcggactgaactggctaatttcgttgtatgagaacggagtcaacggaattctcgcagatgagatggggctgggtaaaaccctacagacgattgccttgctgggctatctgaaacactatcgaaacattccaggcccccatatggttctggtgcctaaatccacacttcataactggatgaatgagttcaagaggtgggtaccttcgctccgggtgatatgtttcgttggggacaaagacgctcgcgccgcttttatccgggacgaaatgatgcccggtgagtgggacgtatgcgtgacctcctatgagatggtgatcaaggagaagtccgtgtttaagaagttccattggcgttacctggtgatagacgaggctcatcggataaagaatgaaaaatctaaactctcagaaatagttcgggaatttaaatctactaacaggcttcttctgaccggaacacccttgcagaataatctccatgaattgtgggccctgctgaactttctcctgccagacgtgttcaattccgccgatgacttcgattcatggttcgatactaaaaactgtctgggggatcagaagttggtggagcgcctccatgctgttctgaagccattcctgttgcggcgcattaaaacagacgtcgagaaatcactgcccccaaagaaggaaattaagatctatcttgggctgagcaaaatgcagcgggagtggtatacaaaaatcctgatgaaagatatagatgtgttaaactcctccgggaaaatggacaagatgaggcttctgaacatccttatgcagttgaggaagtgctgcaaccacccctatctgtttgacggtgctgagccagggcccccctatacaaccgatgaacacattgtgtccaattccggcaagatggtggtgctggacaaattactcgctaaactcaaggaacagggcagtcgagtcctgattttctcccaaatgactcgactgctagatatcctggaagactattgtatgtggcgtggatacgaatattgccgtctggacgggcagaccccccacgaggagcgcgaagaggccattgaggctttcaacgcccccaactcttctaaattcatcttcatgctgtccacaagagcaggggggctgggtatcaacctcgcgtcggcagatgtcgttattctatacgattcagattggaaccctcaagtcgacctccaggccatggaccgagcccatcggatcggtcagaaaaaaccagtccgagtcttccgattgattacggacaataccgttgaggaaagaatagtggaaagagccgaaatcaaattacgcctggactccatcgtgatccaacaaggcaggcttattgaccagcagtcaaacaagctcgccaaagaagagatgcttcagatgattaggcatggcgccacacacgtgtttgcctcaaaggaatctgagcttaccgatgaggatatcacaactatcctggagcgcggtgagaagaaaacagcagagatgaacgagcggttacaaaagatgggggaatccagtttacgcaatttccgaatggacattgagcaatccctgtacaagttcgaaggggaagactatcgggagaaacaaaaactcggcatggtcgaatggatcgaacctcccaaacgggagagaaaagctaattacgccgtcgacgcatactttcgtgaagccctgagggtgtcagaaccgaaaatacccaaggcccctcgtccaccaaagcagccaaacgtgcaggactttcagttcttcccacccagactatttgagctcctggaaaaggaaattctctattaccggaaaacaatcggttacaaggtgcctcggaatcctgatattccaaatccggcgctcgcccaacgcgaggaacagaaaaaaatagatggagctgaaccactgacaccagaagagacagaagagaaggaaaagcttctaacccaagggttcaccaactggacaaagcgagatttcaatcaatttattaaagcgaacgaaaagtatggccgggacgacatcgacaacattgcccgggaggtggagggaaaaagcccggaagaggtcatggagtacagcgccgttttctgggagcgctgcaatgagctgcaagatatagagaagataatggcccagattgagagaggtgaagctaggatccagcgacggatttctattaagaaggccttggacgcaaaaatagcacgctacaaggcgcccttccaccagctgaggattcagtatggaaccagcaagggtaagaattatacagaagaagaggataggtttctcatctgtatgctgcacaagatgggatttgaccgagagaatgtatatgaggagttgagacagtgcgtccggaatgctcctcagttccgattcgactggttcattaaatcaagaactgccatggagttccagcgccgatgtaatacattaatctctttgattgagaaagagaatatggagattgaggaacgcgagcgagccgagaagaagaaacgggccacgaagacacccatggtgaagttcagtgccttttcgtag

SEQ ID NO: 296459 - DNA, 3129 bp, Artificial Sequence
  derived and/or modified sequence
atggagcaggacaccgccgccgtggccgccaccgtggccgccgccgatgcaacagccactatagtggttatagaggatgaacagcctggaccatcaacaagtcaggaggaaggtgccgctgccgcggcaaccgaggcgacagccgcaacagagaagggagagaagaaaaaggaaaagaatgtatcctcttttcagctgaaactcgccgcaaaggctcccaagtctgaaaaggagatggaccccgaatatgaggagaaaatgaaggctgatcgagctaagagattcgagttcctgctcaaacaaaccgaattattcgctcatttcatccagccttccgcccaaaaatctcctactagtccactcaacatgaagctcggacgcccccgcataaagaaggatgagaaacaaagcctgatctcagctggtgactaccgacacagacgtacagaacaggaagaggacgaggaactattgagcgagtcccggaaaactagcaacgtgtgcatcaggttcgaggtgtctccgagttatgtgaagggcggaccgctgagggactaccaaattcgcggcctgaactggctaatctcactttatgagaacggggtgaacggaatcctcgcagatgaaatgggtcttgggaagactttgcaaacaatcgccttgctggggtacctaaagcattaccgcaacattccaggaccccacatggttcttgtcccgaagtcaaccctccacaactggatgaatgagtttaagagatgggtgccaagcctgcgcgttatctgcttcgtgggagacaaggacgcccgggccgctttcatccgcgatgagatgatgccaggcgaatgggacgtctgtgtgacctcctacgagatggtgatcaaagaaaagtcagtgttcaagaagtttcactggcgctatttggtgatcgatgaagcccaccggatcaaaaatgaaaaaagtaagctctctgagatagtgcgggagttcaaatccaccaaccgcctgctgttaacaggaacgcccctacaaaacaatctgcacgaattatgggctttgctgaatttcctgctccctgatgtattcaacagcgccgacgatttcgattcctggtttgataccaaaaattgcctgggggaccagaaacttgtggagaggcttcatgctgtgcttaagccttttctgttgaggcggatcaaaacagatgtggagaagtcgctacccccaaagaaagaaattaagatctatctaggtctttctaagatgcagagagagtggtacacaaagatcttaatgaaggacatcgatgtgctgaattcttctggcaagatggataaaatgcgactccttaatattctgatgcagctgaggaagtgttgtaaccacccgtatttgtttgatggggcagaacccggtcccccctacacaacagacgagcatatagtcagcaattctggcaaaatggtcgttctggataagctgctcgcaaaactgaaagaacagggttcacgggtgctcatttttagccagatgacccgcctgctggacattctggaggactactgcatgtggcggggatacgagtactgcaggctggacgggcagacccctcacgaggagcgcgaggaagccattgaagcatttaacgctcctaacagttccaaattcatatttatgctctcaacccgggcaggcggactgggtataaatctcgcctccgcagacgtcgttatcctgtatgacagtgactggaaccctcaggtcgatctgcaggcaatggatcgagcccacagaatcggacagaagaagcctgtgcgggtttttcggttaattaccgataacaccgttgaggagagaatagttgagagagcggagattaagttgaggttagacagcatagtgatccaacaagggcggctgatcgaccagcaatcaaataaacttgctaaggaggagatgttacagatgattaggcatggggcaacacatgttttcgcatcaaaggaatccgaactgacagatgaggatatcaccacgatcctcgaacggggtgaaaagaaaaccgccgagatgaatgaaaggttacagaaaatgggggaaagctcactgagaaattttaggatggacattgaacaaagcctgtacaagttcgagggtgaggattacagggagaagcagaaactgggtatggtggagtggattgagccgcctaagcgcgaacggaaggctaactatgctgtggatgcctactttagggaagcccttcgagttagcgagcccaagataccaaaggctccacgccctcccaagcaacctaacgtgcaggatttccagttttttccgccccgtcttttcgaactgttggagaaggagattttatattataggaagacgatcggatataaggtcccacgaaatcctgatatccccaaccctgcacttgcccaaagagaagagcaaaaaaaaatcgacggcgccgagccacttacccccgaagagactgaagagaaagagaaactactgacccaggggttcaccaattggacaaagagggactttaaccaatttattaaagccaacgagaaatatggccgggatgacatcgataacatcgcgagggaagtggagggcaagagccccgaggaggtgatggagtacagcgcggtcttttgggaaagatgtaacgaactgcaggacatcgagaaaatcatggcacaaattgagcggggtgaggctcgaatccagcgccggatcagcatcaaaaaggctctagatgcaaaaattgctcggtacaaagcacccttccaccagctgcgcattcagtatgggacctctaaaggtaaaaactataccgaagaggaagatagattcctgatttgtatgctgcacaagatgggattcgacagagagaacgtgtacgaggagctgcggcaatgcgtgagaaacgccccacagtttcggttcgactggttcatcaagtcccgaactgcaatggaattccagcgccggtgcaacacacttatcagcctgatagagaaggaaaacatggagatcgaggaacgggagagggccgagaagaagaagagagcaaccaagaccccaatggtgaagtttagcgccttctcatag

SEQ ID NO: 296460 - DNA, 3129 bp, Artificial Sequence
  derived and/or modified sequence
atggaacaagatactgccgcagtagccgcaactgtggctgccgctgacgccaccgcaaccatcgtggtcatagaagacgaacagccaggccctagtacttctcaggaggagggtgcagccgctgctgctactgaggccaccgcagctactgagaagggggaaaaaaagaaggagaaaaatgtgagtagctttcagcttaaacttgcagccaaggcacctaaatctgagaaggagatggatcccgagtacgaggaaaagatgaaggccgatagagcaaagcggtttgagtttctgttaaagcagactgaactctttgctcatttcattcagcctagcgcacaaaagagccctacatcccctctcaacatgaagctcggccgtcctcgaattaaaaaggacgaaaaacagagtttgatatccgccggtgattacaggcatagacggactgagcaagaggaagacgaggaacttctgtccgagtccagaaagacttctaacgtatgtatcaggtttgaagtcagtccatcctacgtcaagggaggtccactgcgggattaccaaattagaggactgaactggcttattagcctctatgagaacggggtgaacggtatcctggccgacgaaatggggctcggaaagacgcttcagaccattgctttgctcggctatctaaagcattataggaacatccccggaccacacatggttctcgtgccaaaaagtactttgcacaactggatgaacgagttcaaaaggtgggtccccagccttagagtgatttgctttgtgggagacaaggacgccagagctgcctttatcagggacgagatgatgcctggggaatgggacgtctgtgtcactagctacgaaatggtcattaaggaaaagagtgtgtttaagaagttccattggcgatatctggtgatagacgaggcccaccgaataaaaaacgaaaaatcaaaactctctgaaatagtgcgagagttcaagagtacaaaccgccttctgctgactggaacacctctccaaaataatctacacgagctctgggctctgctcaatttcctgcttcctgatgtattcaatagcgccgacgacttcgactcctggtttgacacaaagaattgtttgggggatcagaagctggtcgaaaggctgcacgccgtcctgaagccctttctgcttcggcgtataaaaactgacgtggagaaaagcctgccacctaaaaaggagatcaaaatatacctgggactgagcaaaatgcagcgagagtggtatacaaagattctgatgaaggacattgacgttctgaattcctccggtaaaatggataagatgcggttgctaaatatcttgatgcagcttcggaagtgctgcaatcacccatatctgtttgatggcgcagaacccggacccccttacactacagacgaacatattgtgagtaattcaggaaaaatggtggttctggacaaactgctggccaaactcaaggaacaaggctccagggttctgatattctctcaaatgaccagactgctcgacatccttgaggactattgcatgtggcgcggttatgagtattgtcgcctcgacggacagacacctcatgaggagagggaggaagcgattgaggcctttaatgctcctaactctagtaaatttatattcatgttgagtaccagggctggcggtcttggtataaacctcgcaagcgcagacgttgtgatcctgtatgactcagactggaatcctcaagttgatctgcaggccatggacagagctcacaggatcggccagaagaagcctgtcagggtctttaggttaatcaccgataacaccgtggaggagcgcatagtcgagagagcagagattaaattaaggctggattccattgttattcagcaagggcgactgatcgaccagcagtccaacaagcttgctaaagaggagatgctccagatgatcaggcacggcgctacacacgtgtttgcaagtaaagagagcgaattgaccgatgaagacattaccaccatcctcgagaggggtgaaaagaagactgcagaaatgaatgagcgtctgcagaagatgggagaatcaagcctgaggaactttaggatggatatcgagcagtcactgtataagttcgagggggaagattacagggaaaagcagaaattggggatggtcgagtggatcgagccgcctaagcgcgagcgcaaggctaactatgccgtggacgcctactttagggaggctctgagggtatccgaacctaagattccgaaggctccgaggccaccaaaacaacctaatgtgcaggatttccaattttttcctccgcgactcttcgaattacttgagaaggagattttgtactaccgtaagaccatcggttataaggtgcccaggaaccccgatatccctaacccagctctcgcgcagcgagaggaacagaaaaagatcgacggtgctgaacccctgacccccgaggagacggaggaaaaggagaaactgctgactcagggtttcacaaattggacaaaacgggatttcaaccaatttattaaggctaatgagaagtatggtagggatgatatcgataacatcgccagggaggtcgaagggaaaagccccgaggaggttatggagtatagcgctgttttttgggagaggtgcaacgagttgcaagacatcgagaaaatcatggcccagatcgagcgaggggaggctcgaatccagcgccgaatctctattaagaaagctctggacgcaaaaatagctagatacaaggcgccattccaccagctgcgcatacagtacggaacctccaaaggcaagaactacactgaggaggaagatcggttcttgatttgtatgcttcacaaaatgggctttgaccgagagaatgtgtacgaggaactccgccagtgcgtcaggaacgcccctcagtttcggttcgattggttcatcaaatcgagaacggcaatggagtttcagcggagatgtaacacattgatttctttgatcgagaaagagaacatggagatagaggaacgcgaaagggctgagaaaaaaaaacgggctaccaaaacaccaatggtgaagtttagcgctttttcatag

SEQ ID NO: 296461 - DNA, 3129 bp, Artificial Sequence
  derived and/or modified sequence
atggagcaggataccgctgcagtagccgctactgtggctgccgctgatgctactgccactattgtggtaattgaggatgaacagccaggaccttctacatcccaggaggagggcgctgccgctgccgctaccgaagcgacagcggctaccgaaaagggagagaaaaaaaaagaaaagaacgtgagcagcttccaactaaaactggccgctaaagctcccaagtccgagaaggaaatggacccggagtacgaggaaaagatgaaggctgacagggcaaaacgatttgaatttctgctgaagcagaccgagctgtttgcccattttatccagccttcagcgcagaagtctcctacgtctccacttaatatgaaactcggcagacctaggataaagaaggatgaaaaacagtctttgatcagcgctggcgactataggcaccgtaggacagaacaggaggaagatgaggagctcttgagcgagtctcgtaagacctctaacgtttgcatccgcttcgaagttagcccctcttatgtgaagggaggaccactgcgcgattaccagatccggggtctaaattggctgatttccttatatgaaaatggggtgaacgggatcctggccgacgaaatgggtctgggtaaaactctccaaactatagctctgctcggctacctgaaacactaccgtaacatccccggaccacacatggtgctggtccccaagtccaccttacataattggatgaacgagtttaaaagatgggtcccatctctccgagtgatatgtttcgttggagataaagacgctcgagcagccttcatcagagacgagatgatgccaggtgaatgggacgtttgtgtgacttcatacgagatggtcatcaaagagaagtctgtatttaagaaatttcattggaggtatcttgtcatagacgaggctcaccgtatcaagaatgaaaagagtaagctgtccgaaatcgtgcgcgaatttaaatccactaaccgtttactgcttaccgggactcccttgcagaacaatctgcacgagctgtgggcactgcttaacttcttgctccccgatgtattcaatagtgctgacgattttgactcctggttcgacactaaaaactgcctgggagaccagaaactggtggaacggctgcacgcggtcctgaaaccgtttctgcttcgccgtatcaagactgacgtcgagaaatccctccccccaaaaaaggagattaagatctatcttggcttgtctaagatgcagcgcgagtggtatacaaaaatcctcatgaaagacattgacgttttgaacagctccggtaaaatggacaaaatgagacttctaaacattctcatgcagctccgtaagtgctgcaaccacccttatctcttcgacggggcagagcctggccctccctacacgacagacgaacacatcgtgtctaattctggaaaaatggtggtgctggacaagctcctggccaaactgaaggaacagggtagtcgcgtactcattttttcacagatgacgcggctcctggatatcctggaagattattgtatgtggagaggttacgagtattgtcgactcgatggccagaccccgcatgaggaaagagaggaagctatcgaggccttcaacgcccctaactcgtctaaatttatcttcatgctttcaacaagagccggaggtctcggcataaacctcgcctctgccgatgttgtgatcctgtatgattctgattggaatccccaggtggacctccaagcgatggatcgggcacacaggataggacagaaaaaaccggtacgcgtcttccggctcattacagataacacagtagaggaacggattgtggaacgagccgaaattaaactccgtttggattcaattgtcatacagcaaggtcggctgatagatcagcagagcaataaattggctaaggaagaaatgctccagatgattcggcatggggctacacacgtgtttgcttcaaaggagagtgagctaaccgacgaggatattaccactattctcgaaagaggagagaaaaaaacagccgagatgaacgagaggctgcaaaagatgggggaaagttcccttcgaaattttaggatggacattgaacagagtctatataaattcgaaggggaagattacagggaaaagcaaaagcttgggatggtggagtggatagaaccacctaagagagagagaaaagccaactacgctgttgacgcctacttccgagaggctcttcgcgtcagcgaacccaagattcctaaagcacctcgtccacctaagcagcccaatgtgcaggattttcaattctttccaccacggttgttcgagctgttggaaaaagagatcttgtactacaggaagacaatcgggtataaggtcccacggaatccagacattcccaatccagccctcgcccagcgagaggaacagaaaaaaattgatggagccgagcctctgaccccagaggaaactgaagaaaaggagaagctgctgacacagggctttaccaattggaccaagagagatttcaatcaatttataaaggccaacgagaagtatggcagggacgacattgataacatagccagagaagtggaaggtaaatcccctgaggaggtgatggagtattcagctgtattttgggagcggtgtaacgagcttcaggacatcgagaaaattatggcacagattgagagaggcgaggcgcgaatccagcggaggatttccattaaaaaggccctcgatgctaagattgcacggtacaaagctccattccaccaactgcgaattcagtacgggacctccaagggcaaaaattacacagaggaagaagatcggtttctgatatgtatgctgcataagatgggcttcgatcgtgagaatgtttacgaagaactacggcaatgcgtccgcaatgccccacagtttagattcgattggttcataaagtcccggactgccatggagtttcaacgcaggtgcaacacactgataagtttgatcgagaaggagaacatggaaatcgaggagcgagaacgcgctgagaagaagaagcgggcaactaagacacccatggtaaagttcagtgccttcagctag

SEQ ID NO: 296462 - DNA, 4048 bp, Artificial Sequence
  derived and/or modified sequence
gcggagtgattccccacccctgctccatctagctctttccagtgcagccactgccgccgcccaggagccctcgtcccctgccttgtccccctactcgttcccgctcccacggcatggagcaggacactgccgcagtggcagccaccgtggcagccgcggatgcgaccgccactatcgtggtcatagaggacgagcagcccgggccgtccacctctcaggaggagggagcggccgccgcggccaccgaagccaccgcggccacggagaagggcgagaagaagaaggagaaaaacgtttcttcatttcaactcaaacttgctgctaaagcgcctaaatctgaaaaggaaatggacccagaatatgaagagaaaatgaaagccgaccgagcaaagagatttgaatttttactgaagcagacagaactttttgcacatttcattcagccttcagcacagaaatctccaacatctccactgaacatgaaattgggacgtccccgaataaagaaagatgaaaagcagagcttaatttctgctggagactaccgccataggcgcacagagcaagaagaagatgaagagctactgtctgagagtcggaaaacatctaatgtgtgtattagatttgaggtgtcaccttcatatgtgaaaggggggccactgagagattatcagattcgaggactgaattggttgatctctttatatgaaaatggagtcaatggcattttggctgatgaaatgggccttgggaaaactttacaaacaattgctttgcttggttacctgaaacactaccgaaatattcctggacctcacatggttttagttccaaagtctactttacacaactggatgaatgaatttaaacgatgggtcccatctctccgtgtcatttgttttgtcggagacaaggatgccagagctgcttttattcgtgatgaaatgatgccaggagagtgggatgtttgcgttacttcttatgagatggtaattaaagaaaaatctgtattcaaaaagtttcactggcgatacctggtcattgatgaagctcacagaataaagaatgaaaaatctaagctttcagagattgttcgtgagttcaagtcgactaaccgcttgctcctaactggaacacctttgcagaataacctgcatgaactgtgggccttactcaactttttattgcctgatgtctttaattctgcagatgactttgattcttggtttgacactaaaaattgtcttggtgatcaaaaactcgtggaaagacttcatgcagttttaaaaccatttttgttacgccgtataaaaactgatgtagagaagagtctgccacctaaaaaggaaataaagatttacttggggctgagtaagatgcaacgagaatggtatacaaaaatcctgatgaaagatattgatgttttaaactcttctggcaagatggacaagatgcgactcttaaacattctgatgcagcttcgaaagtgttgtaatcatccatatctgtttgatggtgctgaacctggtccaccttataccactgatgagcatattgtcagcaacagtggtaaaatggtagttctggataaactattggccaaactcaaagaacagggttcaagggttctcattttcagccagatgactcgcttgctggatattttggaagattattgcatgtggcgtggttatgagtattgtcgactggatggacaaaccccgcatgaagaaagagaggaagcaatagaggcttttaatgctcctaatagtagcaaattcatctttatgctaagtaccagggctggaggtctcggaattaacctggcaagtgctgatgtggttatactatatgattcagactggaacccacaggttgatctacaagctatggatcgagcacatcgtattggtcagaagaaaccagtacgtgtattccgtctcatcactgacaacactgttgaagagaggattgtagaaagagctgagataaaactgagactcgattcaattgttatacaacaaggaagactcattgaccaacagtctaacaagctggcaaaagaggaaatgttacaaatgatacggcatggagccacccatgtttttgcttctaaagagagtgagttgacagatgaagacattacaactattctggaaagaggggaaaagaagactgcagagatgaatgaacgcctgcaaaaaatgggagagtcttctctaagaaattttagaatggacattgaacaaagtttatacaaatttgagggagaagattatagagaaaaacagaagcttggcatggtggaatggattgaacctcctaaacgagaacgcaaagcaaactacgcagtggatgcctactttagagaggctttgcgtgtcagcgagccaaagattccaaaggctccacggcctccaaaacagccaaatgttcaggattttcaatttttcccaccacgcttatttgagctcctggaaaaggaaattctttattatcggaagacaataggctataaggttccaaggaatcctgatatcccaaatccagctctggctcaaagagaagagcaaaaaaagattgatggagctgaacctcttacaccagaagagactgaagaaaaggaaaaacttctcacacaaggtttcacaaactggactaaacgagattttaaccagtttattaaagctaatgagaaatatggaagagatgacattgataacatagctcgagaggtagagggcaaatcccctgaggaggtcatggagtattcagctgtattttgggaacgttgcaatgaattacaggacattgagaaaattatggctcaaattgaacgtggagaagcaagaattcaacgaaggatcagtatcaagaaagccctggatgccaaaattgcaagatacaaggctccatttcatcagttgcgcattcagtatggaaccagcaaaggaaagaactatactgaggaagaagatagattcttgatttgtatgttacacaaaatgggctttgatagagaaaatgtatatgaagaattaagacagtgtgtacgaaatgctccccagtttagatttgactggtttatcaagtctaggactgccatggaattccagagacgctgtaacactctgatttcattgattgagaaagaaaatatggaaattgaggaaagagagagagcagaaaagaagaaacgggcaactaaaactccaatggtaaaattttcagcattttcctaacttttagatttaacattgttgggccatttaaaatgtgcatattggagcagaacattaaatctgtttccattttagtcacagaaaagaaaagcagagtcagctactgagagctctggaaagaaggatgtcaagaaggtgaaatcctaaagcctagaaataaagttttaaatgggaaactgctattttcttgttcccatcttcaaatgctaattgccagttccagtgtattcatggtactctaagaaaaatctctttggttttgatttcttgcatattttatatattttacaatgctttctacctgaaatgtgtagctttatattttatggcattctagtatttttgtgtactgtattttgtgcatttcatgtcttcatcaaaatcctctcagtccttgttcttttgaagcttgtgctgaggttttagcttttctatgttttatatgccgctgctttgaaagagaacctagattctatagttgtattattgttgtttcatactttaaatttatatggctgtggaaaaacgaattaaaatgttttgaggagaaagactttttcacttctttgttgctttcttttctattgagtctgggcttgtttgtgttactgcatactgtgattagcataataattgtttctttgaggtcatctaaatatttttttcctaaaggaataaagggtgaggaaagaaaaatattaaaaaagctaatatttgatactgtgcttgctgtcagtatgcattacatttaaattattctctattcaagtgggaaaatataataaagaaatgtctataagaaattt

SEQ ID NO: 296463 - DNA, 3995 bp, Artificial Sequence
  derived and/or modified sequence
gagcgaaggggttggaagcggagtgattccccacccctgctccatctagctctttccagtgcagccactgccgccgcccaggagccctcgtcccctgccttgtccccctactcgttcccgctcccacggcatggagcaggacactgccgcagtggcagccaccgtggcagccgcggatgcgaccgccactatcgtggtcatagaggacgagcagcccgggccgtccacctctcaggaggagggagcggccgccgcggccaccgaagccaccgcggccacggagaagggcgagaagaagaaggagaaaaacgtttcttcatttcaactcaaacttgctgctaaagcgcctaaatctgaaaaggaaatggacccagaatatgaagagaaaatgaaagccgaccgagcaaagagatttgaatttttactgaagcagacagaactttttgcacatttcattcagccttcagcacagaaatctccaacatctccactgaacatgaaattgggacgtccccgaataaagaaagatgaaaagcagagcttaatttctgctggagactaccgccataggcgcacagagcaagaagaagatgaagagctactgtctgagagtcggaaaacatctaatgtgtgtattagatttgaggtgtcaccttcatatgtgaaaggggggccactgagagattatcagattcgaggactgaattggttgatctctttatatgaaaatggagtcaatggcattttggctgatgaaatgggccttgggaaaactttacaaacaattgctttgcttggttacctgaaacactaccgaaatattcctggacctcacatggttttagttccaaagtctactttacacaactggatgaatgaatttaaacgatgggtcccatctctccgtgtcatttgttttgtcggagacaaggatgccagagctgcttttattcgtgatgaaatgatgccaggagagtgggatgtttgcgttacttcttatgagatggtaattaaagaaaaatctgtattcaaaaagtttcactggcgatacctggtcattgatgaagctcacagaataaagaatgaaaaatctaagctttcagagattgttcgtgagttcaagtcgactaaccgcttgctcctaactggaacacctttgcagaataacctgcatgaactgtgggccttactcaactttttattgcctgatgtctttaattctgcagatgactttgattcttggtttgacactaaaaattgtcttggtgatcaaaaactcgtggaaagacttcatgcagttttaaaaccatttttgttacgccgtataaaaactgatgtagagaagagtctgccacctaaaaaggaaataaagatttacttggggctgagtaagatgcaacgagaatggtatacaaaaatcctgatgaaagatattgatgttttaaactcttctggcaagatggacaagatgcgactcttaaacattctgatgcagcttcgaaagtgttgtaatcatccatatctgtttgatggtgctgaacctggtccaccttataccactgatgagcatattgtcagcaacagtggtaaaatggtagttctggataaactattggccaaactcaaagaacagggttcaagggttctcattttcagccagatgactcgcttgctggatattttggaagattattgcatgtggcgtggttatgagtattgtcgactggatggacaaaccccgcatgaagaaagagaggaagcaatagaggcttttaatgctcctaatagtagcaaattcatctttatgctaagtaccagggctggaggtctcggaattaacctggcaagtgctgatgtggttatactatatgattcagactggaacccacaggttgatctacaagctatggatcgagcacatcgtattggtcagaagaaaccagtacgtgtattccgtctcatcactgacaacactgttgaagagaggattgtagaaagagctgagataaaactgagactcgattcaattgttatacaacaaggaagactcattgaccaacagtctaacaagctggcaaaagaggaaatgttacaaatgatacggcatggagccacccatgtttttgcttctaaagagagtgagttgacagatgaagacattacaactattctggaaagaggggaaaagaagactgcagagatgaatgaacgcctgcaaaaaatgggagagtcttctctaagaaattttagaatggacattgaacaaagtttatacaaatttgagggagaagattatagagaaaaacagaagcttggcatggtggaatggattgaacctcctaaacgagaacgcaaagcaaactacgcagtggatgcctactttagagaggctttgcgtgtcagcgagccaaagattccaaaggctccacggcctccaaaacagccaaatgttcaggattttcaatttttcccaccacgcttatttgagctcctggaaaaggaaattctttattatcggaagacaataggctataaggttccaaggaatcctgatatcccaaatccagctctggctcaaagagaagagcaaaaaaagattgatggagctgaacctcttacaccagaagagactgaagaaaaggaaaaacttctcacacaaggtttcacaaactggactaaacgagattttaaccagtttattaaagctaatgagaaatatggaagagatgacattgataacatagctcgagaggtagagggcaaatcccctgaggaggtcatggagtattcagctgtattttgggaacgttgcaatgaattacaggacattgagaaaattatggctcaaattgaacgtggagaagcaagaattcaacgaaggatcagtatcaagaaagccctggatgccaaaattgcaagatacaaggctccatttcatcagttgcgcattcagtatggaaccagcaaaggaaagaactatactgaggaagaagatagattcttgatttgtatgttacacaaaatgggctttgatagagaaaatgtatatgaagaattaagacagtgtgtacgaaatgctccccagtttagatttgactggtttatcaagtctaggactgccatggaattccagagacgctgtaacactctgatttcattgattgagaaagaaaatatggaaattgaggaaagagagagagcagaaaagaagaaacgggcaactaaaactccaatggtaaaattttcagcattttcctaacttttagtcacagaaaagaaaagcagagtcagctactgagagctctggaaagaaggatgtcaagaaggtgaaatcctaaagcctagaaataaagttttaaatgggaaactgctattttcttgttcccatcttcaaatgctaattgccagttccagtgtattcatggtactctaagaaaaatctctttggttttgatttcttgcatattttatatattttacaatgctttctacctgaaatgtgtagctttatattttatggcattctagtatttttgtgtactgtattttgtgcatttcatgtcttcatcaaaatcctctcagtccttgttcttttgaagcttgtgctgaggttttagcttttctatgttttatatgccgctgctttgaaagagaacctagattctatagttgtattattgttgtttcatactttaaatttatatggctgtggaaaaacgaattaaaatgttttgaggagaaagactttttcacttctttgttgctttcttttctattgagtctgggcttgtttgtgttactgcatactgtgattagcataataattgtttctttgaggtcatctaaatatttttttcctaaaggaataaagggtgaggaaagaaaaatattaaaaaagctaatatttgatactgtgcttgctgtcagtatgcattacatttaaattattctctattcaagtgggaaaatataataaagaaatgtctataagaaat

SEQ ID NO: 296464 - protein, 900 aa, Artificial Sequence
  derived and/or modified sequence
MKSVCPVTSGFSSPSPSAAAAAQEVRSATDGNTSTTPPTSAKKRKLNSSSSSSSNSSNEREDFDSTSSSSSTPPLQPRDSASPSTSSFCLGVSVAASSHVPIQKKLRFEDTLEFVGFDAKMAEESSSSSSSSSPTAATSQQQQLKNKSILISSVASVHHANGLAKSSTTVSSFANSKPGSAKKLVIKNFKDKPKLPENYTDETWQKLKEAVEAIQNSTSIKYNLEELYQAVENLCSYKISANLYKQLRQICEDHIKAQIHQFREDSLDSVLFLKKIDRCWQNHCRQMIMIRSIFLFLDRTYVLQNSMLPSIWDMGLELFRAHIISDQKVQNKTIDGILLLIERERNGEAIDRSLLRSLLSMLSDLQIYQDSFEQRFLEETNRLYAAEGQKLMQEREVPEYLHHVNKRLEEEADRLITYLDQTTQKSLIATVEKQLLGEHLTAILQKGLNNLLDENRIQDLSLLYQLFSRVRGGVQVLLQQWIEYIKAFGSTIVINPEKDKTMVQELLDFKDKVDHIIDICFLKNEKFINAMKEAFETFINKRPNKPAELIAKYVDSKLRAGNKEATDEELEKMLDKIMIIFRFIYGKDVFEAFYKKDLAKRLLVGKSASVDAEKSMLSKLKHECGAAFTSKLEGMFKDMELSKDIMIQFKQYMQNQNVPGNIELTVNILTMGYWPTYVPMEVHLPPEMVKLQEIFKTFYLGKHSGRKLQWQSTLGHCVLKAEFKEGKKELQVSLFQTLVLLMFNEGEEFSLEEIKQATGIEDGELRRTLQSLACGKARVLAKNPKGKDIEDGDKFICNDDFKHKLFRIKINQIQMKETVEEQASTTERVFQDRQYQIDAAIVRIMKMRKTLSHNLLVSEVYNQLKFPVKPADLKKRIESLIDRDYMERDKENPNQYNYIA

SEQ ID NO: 296465 - DNA, 2703 bp, Artificial Sequence
  derived and/or modified sequence
atgaagagcgtgtgccctgtgacttcaggatttagcagccctagtccctcagccgccgccgctgcgcaggaagtcagatcagcaactgacggtaatacctccaccactccacccactagcgcaaaaaaaaggaaactgaatagttccagttcgtcctcctctaatagctccaacgaacgcgaggattttgactcgacctcgagttcgagcagcacgccccccctgcagcctcgggactctgcaagccccagcaccagctcattctgccttggagttagcgtggcggcatccagccacgtgcctattcagaagaagcttcggttcgaagatacgctggagttcgtcgggttcgacgcaaagatggccgaggaatcctccagttccagcagctccagctccccaaccgccgcgacctcacaacagcagcagctcaagaacaaatccattctaatttctagcgtggcgtctgtgcaccacgctaatggactggcaaaatcttccaccaccgtttcatcttttgcaaactcaaagcctggatctgctaaaaagttggtgataaagaacttcaaggacaagcccaaactccctgaaaactacaccgatgaaacctggcagaagttgaaagaggctgttgaggccatccaaaatagcacttctataaagtacaacttagaagaactctaccaagccgtggagaacctgtgctcctacaaaattagcgccaatttgtacaaacagctgcgccagatctgtgaggaccacattaaggcccagattcaccagtttcgagaagactctctcgattccgtgctgttcctaaaaaagattgaccggtgttggcaaaatcactgccggcaaatgattatgattcggtctatattcctgtttttggatcgcacatatgtgcttcagaactcgatgctaccctctatctgggacatgggcctcgaactctttcgcgcccacattattagcgaccagaaagtccagaataaaactatagacggcatactgctcctaattgagagggaacggaatggcgaagcgattgatcggtccctgctgagatctctgctcagtatgttaagcgatttacagatataccaggactctttcgagcaacggtttttggaagagactaaccgcctgtatgccgccgaggggcagaaactgatgcaggagcgtgaagtgccggagtacctgcaccatgtgaacaaacgcctcgaagaggaggcagacagattgataacgtacctcgaccagaccacacagaagagtttaatcgcaaccgtagagaagcagctcctgggggagcatctaaccgccattttacagaaaggtttgaacaatctattagacgaaaatcgcattcaggatctcagtctcttatatcaacttttttcgcgcgtgcgcggcggggttcaggtcctgctgcagcagtggatcgagtacataaaggccttcggcagtactatagttatcaaccccgagaaagacaagacaatggtgcaggagttgcttgacttcaaggacaaggtggaccacattatcgatatttgttttctcaagaacgaaaaatttatcaatgctatgaaggaggcctttgaaacattcataaataagaggcctaataagccggcggagctgatcgcgaagtacgttgatagcaagttgcgcgctggcaataaggaagcaaccgacgaggaactggagaagatgctggacaaaatcatgatcatctttaggtttatctacggcaaagacgtgtttgaggcattttataagaaagatctggctaagagactactggtcggaaagagcgcctcagtggatgctgaaaagtcaatgctctcaaaattgaaacacgaatgtggcgccgccttcacctctaaattggagggaatgttcaaagacatggagctcagcaaggatatcatgatccagttcaaacagtatatgcagaaccaaaacgtccccggcaatatcgaactgacagtcaacattctgacaatgggctactggcccacctatgtgcctatggaggtccacctcccccctgagatggtgaaactgcaggaaatcttcaaaacattctatctggggaagcatagcggcaggaagctgcagtggcaaagcactctcgggcactgcgtcctgaaagcggagttcaaggagggaaaaaaagaactccaggtaagtctatttcagacattggtgttgttgatgtttaatgagggtgaagagttctctctggaagagatcaaacaggctactggaattgaggacggggaactgaggcggacactgcagtccctggcttgtggcaaggctcgcgtgcttgccaaaaatccaaaaggaaaggatattgaggacggcgacaagttcatctgcaatgacgatttcaagcataagttgtttcgaattaaaataaaccaaatccagatgaaggaaacagttgaagaacaggccagcaccacggaacgagtatttcaggatcgccagtaccagatagacgcagccattgtgcggatcatgaagatgcgcaagactctatctcataacctgctggtgtcagaggtgtataatcaattgaagtttccagtaaaacctgctgatttgaagaagcggatcgagtctctaatagatagagactacatggagcgagataaggagaaccctaaccagtacaactatatcgcctag

SEQ ID NO: 296466 - DNA, 2703 bp, Artificial Sequence
  derived and/or modified sequence
atgaagtctgtgtgccctgtgaccagcggcttcagcagccccagccccagcgctgctgctgctgcccaggaggtgcgcagcgccacagatggcaacaccagcaccaccccacccaccagcgccaagaagaggaagctgaacagcagcagcagcagcagcagcaacagcagcaatgaaagagaagattttgacagcaccagcagcagcagcagcaccccacccctgcagccccgggacagcgccagccccagcaccagcagcttctgcctgggcgtgtctgtggccgccagcagccacgtgcccatccagaagaagctgcgctttgaggacaccctggagtttgtgggctttgatgccaagatggccgaggagagcagcagcagcagcagcagcagcagccccacagctgccaccagccagcagcagcagctgaagaacaagagcatcctgatcagctctgtggcctctgtgcaccacgccaacggcctggccaagagcagcaccaccgtgagcagctttgccaacagcaagccaggcagcgccaagaagctggtgatcaagaacttcaaggacaagcccaagctgcctgagaactacacagatgagacctggcagaagctgaaggaggccgtggaggccatccagaacagcaccagcatcaagtacaacctggaggagctgtaccaggccgtggagaacctgtgcagctacaagatcagcgccaacctgtacaagcagctgcggcagatctgtgaggaccacatcaaggcccagatccaccagttccgggaggacagcctggacagcgtgctcttcctgaagaagattgaccgctgctggcagaaccactgccggcagatgatcatgatccgcagcatcttcctgttcctggacaggacctacgtgctgcagaacagcatgctgcccagcatctgggacatgggcctggagctgttccgggcccacatcatcagtgaccagaaggtgcagaacaagaccattgatggcatcctgctgctgattgagcgggagagaaatggagaggccatcgacaggagcctgctgcggagcctgctgtccatgctgagtgacctgcagatctaccaggacagctttgagcagcgcttcctggaggagaccaaccggctgtatgctgctgagggccagaagctgatgcaggagcgggaggtgcctgagtacctgcaccacgtgaacaagaggctggaggaggaggccgacaggctcatcacctacctggaccagaccacccagaagagcctcatcgccaccgtggagaagcagctgctgggggagcacctgacagccatcctgcagaagggcctgaacaacctgctggatgagaaccgcatccaggacctgagcctgctgtaccagctgttcagccgggtgcggggcggcgtgcaggtgctgctgcagcagtggattgagtacatcaaggccttcggcagcaccatcgtcatcaaccctgagaaggacaagaccatggtgcaggagctgctggacttcaaggacaaggtggaccacatcatcgacatctgcttcctgaagaatgagaagttcatcaatgccatgaaggaggcctttgagaccttcatcaacaagaggcccaacaagccagctgagctgattgccaagtatgtggacagcaagctgcgggccggcaacaaggaggccacagatgaggagctggagaagatgctggacaagatcatgatcatcttccgcttcatctacggcaaggatgtgtttgaggccttctacaagaaggacctggccaagaggctgctggtgggcaagagcgcctctgtggatgctgagaagtccatgctgagcaagctgaagcatgaatgtggggccgccttcaccagcaagctggagggcatgttcaaggacatggagctgagcaaggacatcatgatccagttcaagcagtacatgcagaaccagaatgtgcccggcaacatcgagctgactgtgaacatcctgaccatgggctactggcccacctacgtgcccatggaggtgcacctgcccccagagatggtgaagctgcaggagatcttcaagaccttctacctgggcaagcacagcggcaggaagctgcagtggcagagcaccctgggccactgtgtgctgaaggccgagttcaaggagggcaagaaggagctgcaggtgtccctcttccagaccctggtgctgctgatgtttaatgaaggagaggagttcagcctggaggagatcaagcaggccaccggcattgaagatggagagctgcggaggaccctgcagagcctggcctgtgggaaggcccgggtgctggccaagaaccccaagggcaaggacattgaagatggagacaagttcatctgcaatgatgacttcaagcacaagctgttccgcatcaagatcaaccagatccagatgaaggagaccgtggaggagcaggccagcaccacagagagggtcttccaggaccggcagtaccagattgatgctgccatcgtgcgcatcatgaagatgaggaagaccctgagccacaacctgctggtgtctgaggtgtacaaccagctgaagtttcctgtgaagccagctgacctgaagaagagaattgagagcctgattgaccgggactacatggagcgggacaaggagaaccccaaccagtacaactacatcgcctag

SEQ ID NO: 296467 - DNA, 2703 bp, Artificial Sequence
  derived and/or modified sequence
atgaagagcgtgtgccccgtgaccagcggcttcagcagccccagcccatcagcagccgccgctgcacaagaggttcgaagcgcaacagacggcaacactagcactacccctcctacctctgccaaaaaacggaagttgaactccagctcatccagcagctctaattcgtccaatgagagagaagactttgatagcacttccagttccagcagtacaccccctcttcagcctcgagacagcgcgagtcccagcaccagctctttttgccttggcgttagcgtggctgcctccagtcacgtgcctatacagaagaaactgaggttcgaggataccctggagttcgtgggctttgatgccaagatggctgaagagtcctcgtcttcaagctcttcctctagccctacagccgccacgagccagcagcaacagctgaagaataagtccattcttattagctctgttgccagtgttcatcacgctaatggcctggctaagtcttcaaccactgtgagctccttcgctaattcaaagcccggcagtgctaagaagttggtgataaaaaactttaaggataagcccaaactgccggaaaactatacagatgagacttggcagaaattaaaggaagcagtagaagccattcaaaattccacatccatcaaatacaatctcgaggagttgtatcaggccgtcgaaaatctgtgttcgtataagataagcgccaacctttataagcagctgaggcagatttgcgaagaccacatcaaagcccagatacaccaatttagggaagattccctggattccgtgctattcctgaagaagattgaccgctgctggcaaaaccactgtaggcagatgatcatgatccgatccatttttctttttctggatagaacgtatgttctacagaactcaatgctgccttccatctgggatatgggcctggagctgtttagggcacatattatttctgatcagaaagtgcagaataagactatcgacggtatcctgctgctcatagagcgagaaagaaatggggaggcgattgatcgtagcctgctacgctcccttctgagcatgctttccgatcttcaaatctatcaggattctttcgaacagcgattcctagaagaaacaaaccgtttatatgctgccgagggtcagaagttgatgcaggagcgcgaggtgccggaatatttgcatcatgtaaataaaaggctcgaggaagaggccgaccggctcatcacatatctggaccaaactacccaaaaatcgcttatcgctaccgtggaaaagcaactacttggggagcatttaactgcaatcctccaaaaaggattgaataacctgctggacgagaatcgcattcaagacctgagcctgctttatcagctattttcgagagtgcgcggcggtgtccaggtgcttctacagcagtggatcgagtatataaaggcttttggttctactatcgtcattaatcctgaaaaggacaaaactatggtacaggagttgctggatttcaaagacaaggtcgatcatattatcgacatctgttttttaaagaacgagaagttcattaatgcaatgaaggaggcctttgaaactttcatcaacaagagacctaataagcccgccgagctcatcgccaagtacgtggattcaaaactaagggcaggcaataaggaggccacagatgaagagctcgagaagatgctggacaagatcatgatcatctttcggtttatctacggtaaggacgtttttgaggccttctataaaaaggacctggctaagaggctattagtgggcaaaagtgcatcagtcgacgcagagaaatctatgctttccaaacttaaacatgaatgtggagccgcgttcacgagcaaactcgagggtatgtttaaggacatggaactctccaaagacattatgatacagttcaagcagtacatgcaaaaccagaatgtgccagggaacatagaactgaccgtcaatattttaaccatgggctattggcctacgtatgttcccatggaggttcacctgccacccgaaatggtaaagctccaggaaatattcaagactttctacctcggaaagcactcaggtcggaagctccagtggcagagtaccttaggtcactgcgttttgaaagccgagttcaaagagggcaaaaaggagttacaggtttctctcttccagacactcgtcctactcatgttcaacgaaggcgaggaattctcacttgaggagataaagcaagccaccgggatcgaagatggtgagctcaggcgcaccctacagtcactggcctgtggtaaagcccgagttctggctaagaacccgaaagggaaagacatcgaggacggagataagtttatatgcaatgatgacttcaagcacaaacttttcagaatcaagattaaccagatccagatgaaggagaccgtggaggaacaggccagcacgactgagagggtgtttcaggatcggcagtatcaaatcgatgccgcaatcgtgcgtattatgaagatgagaaagaccctaagccataacctgctggtttccgaagtttataatcagctcaaattcccagttaagcctgcggaccttaagaaacgcatcgagtcactcatcgacagagactacatggaaagagacaaagagaatcccaaccaatacaactacatcgcatag

SEQ ID NO: 296468 - DNA, 2703 bp, Artificial Sequence
  derived and/or modified sequence
atgaaatctgtatgccccgttacttcgggcttctcgtctccaagcccaagcgcagcagccgctgctcaagaagttcgtagcgccactgacggcaatacaagcaccacaccgcctacttctgcaaagaagagaaagctgaattcttcctccagcagttcaagtaatagcagcaatgaacgggaagactttgattccactagtagctcaagctctactccacctctgcaacctagagacagcgcgtccccaagtacaagctcattctgcttaggtgtgagtgtcgccgcttcttcccacgttcccattcaaaaaaaactcagattcgaggacactcttgagtttgtgggctttgatgctaaaatggccgaagagtccagttcttcgtcaagcagttccagcccaactgctgcaacttcccaacagcagcagctaaagaataaaagtatcctcataagtagcgttgcatctgtccatcacgcaaatggcctggctaagtcctcaactacagtgagctcgttcgctaattcaaagcctggctctgcgaagaagctggtgatcaagaacttcaaagataagcctaaactacctgagaattatacagatgaaacttggcaaaagctgaaggaagccgttgaggcgattcaaaattctaccagcattaagtacaacttggaggaactttaccaggctgtcgagaatctgtgtagctacaagattagcgccaacttgtataaacagcttcgacaaatatgtgaggaccacattaaggcacagattcaccagtttagggaggacagcctcgatagcgtgctgtttctcaaaaaaattgacaggtgttggcagaaccactgcagacagatgatcatgatcaggtcaattttcttgttccttgataggacatacgtgctgcagaactctatgctccccagcatttgggatatgggcttagagttgttccgtgcacatatcatatccgatcagaaagtccagaacaagaccatcgacggaatactgctgttaattgagcgcgaaaggaacggcgaggccattgatcggtcactgctacgctcgctactcagtatgctgtcggacttgcagatctaccaggatagctttgagcagcgctttttggaagagacaaaccgattgtacgccgctgagggccagaaattgatgcaagagcgggaggtgcctgagtacttgcaccacgttaataagcggcttgaagaggaggcagaccgcctaataacctatctagaccagactacccagaaatctctaatagcaaccgtggagaagcagttactgggcgaacacctgacagctatacttcagaaaggcctgaataacctcctggacgaaaatcgcatccaggacctgtctctgctataccagctgttctctcgggtgagggggggagtccaggtgctgttacagcagtggatcgagtatatcaaggccttcggctctacaatcgtaattaatccagaaaaagacaagactatggttcaggaactccttgattttaaagacaaggttgaccacataatcgacatttgtttcttaaagaatgaaaagtttatcaacgctatgaaagaggcattcgaaaccttcattaacaaaagacctaataagcctgccgaactgatagcgaaatacgtcgacagtaagctgagggcaggcaataaagaagcgacagatgaagaactggaaaagatgctcgacaaaattatgatcatattccgtttcatttatggtaaagacgtgttcgaagctttctataagaaagatctggctaaacgcctgctagtgggtaagagtgcatctgttgacgccgaaaaaagcatgctgtcgaaactaaaacacgagtgcggagctgcgttcaccagcaaactggaaggtatgtttaaggatatggagctctccaaggatatcatgatacagtttaagcagtacatgcagaatcagaacgtgcctggaaacattgaattaaccgttaacatactcacaatgggatattggccaacatacgtccccatggaggtccatctgcctcctgaaatggtgaagctgcaggaaatcttcaagaccttttatcttggtaaacacagtggacgaaaactgcagtggcagtcaacgctaggccactgcgtgcttaaggcggaattcaaggagggcaaaaaggaactgcaggtgtcgttgtttcagaccctagtattgctgatgttcaacgagggggaagagttttccctagaagaaatcaagcaagccacagggatcgaagatggtgagctgaggaggactcttcagtctctggcttgcggtaaagcccgtgtgctggctaagaacccgaaagggaaagacattgaagatggcgacaaattcatatgtaatgatgatttcaagcataagctatttcgcatcaaaatcaatcagattcagatgaaagagactgtggaggaacaggctagcactaccgaaagggtcttccaggataggcagtatcagattgatgccgcaattgtccgcatcatgaaaatgaggaagaccctgagccataacctattagtgagcgaagtgtacaatcagttaaaattccctgtgaagcccgctgacctaaagaaaaggatagagagcctgatcgaccgagattacatggagagggataaggaaaatcccaatcagtataattacatcgcatag

SEQ ID NO: 296469 - DNA, 3109 bp, Artificial Sequence
  derived and/or modified sequence
ctcaagtcctgcggacctgggggcttcgggatctgggcgctatgaaaagtgtctgcccagtcacttccggtttttcttcccccagtccctcagctgctgctgctgctcaggaggtcagatctgccactgatggtaataccagcaccactccgcccacctctgccaagaagagaaagttaaacagcagcagcagtagcagcagtaacagtagtaacgagagagaagactttgattccacctcttcctcctcttccactcctcctttacaacccagggattcggcatccccttcaacctcgtccttctgcctgggggtttcagtggctgcttccagccacgtaccgatacagaagaagctgcgttttgaagacaccctggagtttgtagggtttgatgcgaagatggctgaggaatcctcctcctcctcctcctcatcttcaccaactgctgcaacatctcagcagcagcaacttaaaaataagagtatattaatctcttctgtggcttcggtgcatcatgcaaacggcctagccaaatcttctaccaccgtctctagctttgctaacagcaaacctggctctgctaagaagttagtgatcaagaactttaaagataagcctaaattaccagaaaactacacagatgaaacctggcaaaaactgaaagaagcagtggaagctattcagaatagtacttcaattaagtacaatttagaagaactctaccaggctgtagaaaatctctgttcttacaagatttctgcaaacttgtacaaacagctgagacagatctgcgaagatcacatcaaagcacagattcatcaattcagagaggattcattggatagcgttctttttttaaagaagattgatagatgctggcaaaaccattgcagacaaatgatcatgatcaggagcatttttttgtttctggatagaacttacgttcttcagaattcaatgctaccctccatttgggacatgggactggagttatttagggctcatattataagtgatcagaaagtgcagaataagacaattgatggcattcttctcttgattgagagggaaaggaatggtgaagcaattgatagaagtttacttcgaagccttttaagcatgctgtctgatttgcaaatttatcaagattcttttgaacaacgatttttggaagaaactaaccggctctatgcagctgaaggccaaaaattaatgcaagaaagagaggttcctgaatatctacatcatgttaacaaacgtctagaagaagaagcagacagacttattacttacttagatcagaccacccagaagtcattaattgctactgtagaaaaacaacttctaggtgaacacttaacagcaattcttcagaaaggtttaaataacctccttgatgaaaaccgaattcaagatttgtctcttctgtatcagctcttcagtagagttcgaggtggagttcaggttcttttgcagcagtggatcgaatatatcaaggcatttggcagcactattgtaattaatcctgaaaaagataaaaccatggttcaagaattgctggattttaaagataaggttgaccatataattgatatctgctttctgaagaatgagaaatttatcaatgccatgaaagaagcatttgaaacgttcattaacaaaagaccaaataaaccagctgaacttatagctaagtatgtagattcaaaacttcgtgcaggcaacaaagaagctacagatgaagaacttgagaaaatgttggataaaattatgatcatatttagatttatctatggcaaggatgtttttgaggccttctataagaaagatttagccaagcgcctgttagtcggaaagagtgcatctgtagatgctgaaaaatcaatgctgtccaaacttaaacatgaatgcggagctgctttcaccagcaaacttgaaggaatgtttaaagacatggaactttctaaagacatcatgattcagttcaaacagtatatgcagaatcagaatgttccgggaaatattgagttaactgtgaatatcctgacaatgggctattggccgacatatgtgcctatggaagttcatttaccaccagagatggtaaaacttcaggagattttcaagacattttacctaggcaaacatagtggcaggaaacttcagtggcagtcaaccctaggacactgtgtgttaaaagcagaatttaaagagggtaaaaaggaactccaggtctctctttttcaaacactggtgctgctaatgtttaatgagggagaggagttcagtttagaagagatcaagcaggcaactggaatagaggatggagagttaaggagaacactgcagtcattagcctgtggcaaagctagagttctggcgaaaaatccaaagggcaaagacattgaagatggtgacaagttcatttgtaatgatgatttcaaacataaacttttcaggataaagatcaatcaaatccagatgaaagaaacggttgaagaacaagcaagcactacagaaagagtatttcaagacagacagtatcaaattgatgctgcaattgttcgaattatgaagatgagaaagacacttagccacaatctccttgtttcagaagtgtacaaccagttgaaatttccagtaaagcctgctgatcttaagaagagaatagaatctttaattgaccgggactacatggaaagagataaagaaaatccaaaccagtacaactatattgcatagaatgttggccttgcagcatttggtgtcatatgcagtagccagtggataaactaacctgttgattcaatattatttgactccttttttactaccgatgaccaaatgaagcagtgtaattaatggaaatagttgagtggactttttctcagtggttaacatgcccattttaaagagtaatacttacctttaagaagaatgttgttgaactctttgcatgttatttagtatgatgtgcagaaaacacttaagaacgtacctggtcttcatgaattcctctttggaactgggaaagagatccctgtggctattaaaaaggggggagggttcttacacaccattaattatgaagcaaaaggtttatttgc

SEQ ID NO: 296470 - DNA, 2703 bp, Artificial Sequence
  derived and/or modified sequence
atgaagagcgtgtgccccgtgaccagcggcttcagcagccccagccccagcgccgccgccgccgcccaggaggtgagaagcgccaccgacggcaacaccagcaccaccccccccaccagcgccaagaagagaaagctgaacagcagcagcagcagcagcagcaacagcagcaacgagagagaggacttcgacagcaccagcagcagcagcagcaccccccccctgcagcccagagacagcgccagccccagcaccagcagcttctgcctgggcgtgagcgtggccgccagcagccacgtgcccatccagaagaagctgagattcgaggacaccctggagttcgtgggcttcgacgccaagatggccgaggagagcagcagcagcagcagcagcagcagccccaccgccgccaccagccagcagcagcagctgaagaacaagagcatcctgatcagcagcgtggccagcgtgcaccacgccaacggcctggccaagagcagcaccaccgtgagcagcttcgccaacagcaagcccggcagcgccaagaagctggtgatcaagaacttcaaggacaagcccaagctgcccgagaactacaccgacgagacctggcagaagctgaaggaggccgtggaggccatccagaacagcaccagcatcaagtacaacctggaggagctgtaccaggccgtggagaacctgtgcagctacaagatcagcgccaacctgtacaagcagctgagacagatctgcgaggaccacatcaaggcccagatccaccagttcagagaggacagcctggacagcgtgctgttcctgaagaagatcgacagatgctggcagaaccactgcagacagatgatcatgatcagaagcatcttcctgttcctggacagaacctacgtgctgcagaacagcatgctgcccagcatctgggacatgggcctggagctgttcagagcccacatcatcagcgaccagaaggtgcagaacaagaccatcgacggcatcctgctgctgatcgagagagagagaaacggcgaggccatcgacagaagcctgctgagaagcctgctgagcatgctgagcgacctgcagatctaccaggacagcttcgagcagagattcctggaggagaccaacagactgtacgccgccgagggccagaagctgatgcaggagagagaggtgcccgagtacctgcaccacgtgaacaagagactggaggaggaggccgacagactgatcacctacctggaccagaccacccagaagagcctgatcgccaccgtggagaagcagctgctgggcgagcacctgaccgccatcctgcagaagggcctgaacaacctgctggacgagaacagaatccaggacctgagcctgctgtaccagctgttcagcagagtgagaggcggcgtgcaggtgctgctgcagcagtggatcgagtacatcaaggccttcggcagcaccatcgtgatcaaccccgagaaggacaagaccatggtgcaggagctgctggacttcaaggacaaggtggaccacatcatcgacatctgcttcctgaagaacgagaagttcatcaacgccatgaaggaggccttcgagaccttcatcaacaagagacccaacaagcccgccgagctgatcgccaagtacgtggacagcaagctgagagccggcaacaaggaggccaccgacgaggagctggagaagatgctggacaagatcatgatcatcttcagattcatctacggcaaggacgtgttcgaggccttctacaagaaggacctggccaagagactgctggtgggcaagagcgccagcgtggacgccgagaagagcatgctgagcaagctgaagcacgagtgcggcgccgccttcaccagcaagctggagggcatgttcaaggacatggagctgagcaaggacatcatgatccagttcaagcagtacatgcagaaccagaacgtgcccggcaacatcgagctgaccgtgaacatcctgaccatgggctactggcccacctacgtgcccatggaggtgcacctgccccccgagatggtgaagctgcaggagatcttcaagaccttctacctgggcaagcacagcggcagaaagctgcagtggcagagcaccctgggccactgcgtgctgaaggccgagttcaaggagggcaagaaggagctgcaggtgagcctgttccagaccctggtgctgctgatgttcaacgagggcgaggagttcagcctggaggagatcaagcaggccaccggcatcgaggacggcgagctgagaagaaccctgcagagcctggcctgcggcaaggccagagtgctggccaagaaccccaagggcaaggacatcgaggacggcgacaagttcatctgcaacgacgacttcaagcacaagctgttcagaatcaagatcaaccagatccagatgaaggagaccgtggaggagcaggccagcaccaccgagagagtgttccaggacagacagtaccagatcgacgccgccatcgtgagaatcatgaagatgagaaagaccctgagccacaacctgctggtgagcgaggtgtacaaccagctgaagttccccgtgaagcccgccgacctgaagaagagaatcgagagcctgatcgacagagactacatggagagagacaaggagaaccccaaccagtacaactacatcgcctag

SEQ ID NO: 296471 - protein, 2080 aa, Artificial Sequence
  derived and/or modified sequence
MASAVSPANLPAVLLQPRWKRVVGWSGPVPRPRHGHRAVAIKELIVVFGGGNEGIVDELHVYNTATNQWFIPAVRGDIPPGCAAYGFVCDGTRLLVFGGMVEYGKYSNDLYELQASRWEWKRLKAKTPKNGPPPCPRLGHSFSLVGNKCYLFGGLANDSEDPKNNIPRYLNDLYILELRPGSGVVAWDIPITYGVLPPPRESHTAVVYTEKDNKKSKLVIYGGMSGCRLGDLWTLDIDTLTWNKPSLSGVAPLPRSLHSATTIGNKMYVFGGWVPLVMDDVKVATHEKEWKCTNTLACLNLDTMAWETILMDTLEDNIPRARAGHCAVAINTRLYIWSGRDGYRKAWNNQVCCKDLWYLETEKPPPPARVQLVRANTNSLEVSWGAVATADSYLLQLQKYDIPATAATATSPTPNPVPSVPANPPKSPAPAAAAPAVQPLTQVGITLLPQAAPAPPTTTTIQVLPTVPGSSISVPTAARTQGVPAVLKVTGPQATTGTPLVTMRPASQAGKAPVTVTSLPAGVRMVVPTQSAQGTVIGSSPQMSGMAALAAAAAATQKIPPSSAPTVLSVPAGTTIVKTMAVTPGTTTLPATVKVASSPVMVSNPATRMLKTAAAQVGTSVSSATNTSTRPIITVHKSGTVTVAQQAQVVTTVVGGVTKTITLVKSPISVPGGSALISNLGKVMSVVQTKPVQTSAVTGQASTGPVTQIIQTKGPLPAGTILKLVTSADGKPTTIITTTQASGAGTKPTILGISSVSPSTTKPGTTTIIKTIPMSAIITQAGATGVTSSPGIKSPITIITTKVMTSGTGAPAKIITAVPKIATGHGQQGVTQVVLKGAPGQPGTILRTVPMGGVRLVTPVTVSAVKPAVTTLVVKGTTGVTTLGTVTGTVSTSLAGAGGHSTSASLATPITTLGTIATLSSQVINPTAITVSAAQTTLTAAGGLTTPTITMQPVSQPTQVTLITAPSGVEAQPVHDLPVSILASPTTEQPTATVTIADSGQGDVQPGTVTLVCSNPPCETHETGTTNTATTTVVANLGGHPQPTQVQFVCDRQEAAASLVTSTVGQQNGSVVRVCSNPPCETHETGTTNTATTATSNMAGQHGCSNPPCETHETGTTNTATTAMSSVGANHQRDARRACAAGTPAVIRISVATGALEAAQGSKSQCQTRQTSATSTTMTVMATGAPCSAGPLLGPSMAREPGGRSPAFVQLAPLSSKVRLSSPSIKDLPAGRHSHAVSTAAMTRSSVGAGEPRMAPVCESLQGGSPSTTVTVTALEALLCPSATVTQVCSNPPCETHETGTTNTATTSNAGSAQRVCSNPPCETHETGTTHTATTATSNGGTGQPEGGQQPPAGRPCETHQTTSTGTTMSVSVGALLPDATSSHRTVESGLEVAAAPSVTPQAGTALLAPFPTQRVCSNPPCETHETGTTHTATTVTSNMSSNQDPPPAASDQGEVESTQGDSVNITSSSAITTTVSSTLTRAVTTVTQSTPVPGPSVPKISSMTETAPRALTTEVPIPAKITVTIANTETSDMPFSAVDILQPPEELQVSPGPRQQLPPRQLLQSASTALMGESAEVLSASQTPELPAAVDLSSTGEPSSGQESAGSAVVATVVVQPPPPTQSEVDQLSLPQELMAEAQAGTTTLMVTGLTPEELAVTAAAEAAAQAAATEEAQALAIQAVLQAAQQAVMAGTGEPMDTSEAAATVTQAELGHLSAEGQEGQATTIPIVLTQQELAALVQQQQLQEAQAQQQHHHLPTEALAPADSLNDPAIESNCLNELAGTVPSTVALLPSTATESLAPSNTFVAPQPVVVASPAKLQAAATLTEVANGIESLGVKPDLPPPPSKAPMKKENQWFDVGVIKGTNVMVTHYFLPPDDAVPSDDDLGTVPDYNQLKKQELQPGTAYKFRVAGINACGRGPFSEISAFKTCLPGFPGAPCAIKISKSPDGAHLTWEPPSVTSGKIIEYSVYLAIQSSQAGGELKSSTPAQLAFMRVYCGPSPSCLVQSSSLSNAHIDYTTKPAIIFRIAARNEKGYGPATQVRWLQETSKDSSGTKPANKRPMSSPEMKSAPKKSKADGQ

SEQ ID NO: 296472 - DNA, 6243 bp, Artificial Sequence
  derived and/or modified sequence
atggcctccgcagtctcgccagccaacctacccgctgttctgctgcagcctaggtggaaacgcgtggttgggtggtccggtcccgtccctaggccaaggcacggccaccgagcggtggcaatcaaggagctgatcgtggtgttcggcggaggcaacgaggggattgtagacgagttgcatgtgtataataccgccaccaaccaatggtttatcccagccgtcaggggcgacatccctcctggatgcgctgcatacggattcgtgtgtgatgggacaaggctcctggtgttcggcggaatggtggagtatggcaagtattcgaatgatttgtatgagctgcaggctagtaggtgggagtggaaacgacttaaggcaaaaacaccaaagaatggcccccctccatgtccccggcttgggcattccttcagtttggttgggaacaaatgctatctgtttggcggcctcgccaatgatagtgaagaccccaagaacaatataccccggtatcttaacgatttgtacatccttgaactgaggccggggagtggcgtggtggcctgggacatcccaattacatatggggtgctgccaccgcctagggagtcccacaccgctgtcgtatacactgaaaaggacaacaagaaatccaagctcgtgatctacgggggcatgagcggttgtaggcttggggacttgtggaccctcgacatcgatactcttacctggaacaaacctagcctgtctggcgtggcccccctgccgcggagcctccattcagctaccaccatcggcaacaagatgtacgtcttcgggggctgggttcctctcgttatggacgacgtgaaggtcgcgactcacgaaaaggagtggaaatgcacgaacacactggcatgtttgaatctggacacaatggcatgggaaactattttgatggacaccctggaggacaacatacctcgggctagagccggtcactgtgctgtcgccataaacaccagactatacatttggtccggacgagacggctaccggaaggcttggaataaccaggtgtgttgtaaagacctgtggtacctcgagacagaaaaacctccgcctcctgcccgtgtccaactcgtacgcgcaaatacaaacagtctggaagtgagctggggtgcagtggccactgccgattcctacttactacagttacagaagtatgatatcccagccaccgccgccactgctacatctccgacacccaaccccgtgccttcagtacccgctaaccccccgaagagtccggctcccgccgccgcagcgcccgcagtgcagccacttactcaggtgggtataacccttctgccacaagcagcccccgctcccccaacaaccaccacgatccaggtgctcccaacagtaccaggcagctccatttccgtgccgacagcggcaaggacgcagggtgtaccagcagttctgaaggtgactggtccgcaggcgaccacgggcactccgcttgtgactatgcgacctgccagccaggctggcaaagcacctgtaacagtgacgagcctccccgcaggggtccggatggtcgtaccaacacagagcgctcaaggcaccgtgatcgggagcagccctcaaatgtccggcatggccgcactggctgccgcagcagccgccacacaaaagatcccaccatctagtgctcccacggtgctgtcagttcctgccggtaccaccattgtgaagactatggcggtcacgcctgggacaaccacccttcccgcgaccgttaaggtagcaagcagcccggtcatggtctccaaccccgctactcgcatgctcaagaccgcagctgctcaagtagggacctcagtctcatccgcgaccaacacatcgaccagaccaatcatcaccgtgcacaaaagtggcacagtgacggtcgcccagcaggctcaagtcgtcaccactgttgtggggggagtcaccaagaccataaccttagtgaagagccctataagtgtgcccggcggttccgcgctgatcagtaatctcggcaaagtcatgtctgtggtgcaaaccaagcctgtccagacatccgccgtcacaggccaggcgagcactggcccagtgacacagatcattcagactaagggacctctcccagcagggacgatcctgaagttggtcacctctgcagacggcaagcctaccaccataatcacaacgactcaggcaagtggcgcaggcacgaagccaacgattctgggcatatcttccgtgtctcctagcacaacaaaacctggcaccacaactatcattaaaactatcccaatgtcagccattattacacaagcaggtgccaccggtgtgaccagtagtccgggcattaagagccctatcaccattattaccacaaaggtcatgacaagcggaaccggtgcacccgctaagatcataacagccgtgccaaaaatcgcaacggggcatggacagcagggagtaacgcaggtagtattgaaaggggccccaggtcaacccggtactatcctgaggactgtgcccatgggtggagtgcgactggtaacgcctgtgaccgtatccgccgtgaagccagctgtgacgacattggtggtcaaaggcaccactggagttacgacacttggtaccgttactggaacggtgtccacaagtctggctggtgccggcggtcattccacctccgcttcactcgcgaccccaatcactactcttggtaccatcgctactctcagctcccaagtaatcaaccctactgctataaccgtgtcagccgctcagactacattaaccgcagctggtgggcttaccacacctacaatcaccatgcaacctgttagccaacccactcaggttaccttgataactgcgccatcaggtgttgaggctcaacctgtccacgatctccccgtgtctatcctcgcttcccctactactgagcagccaaccgcaaccgtaacaatagctgacagcggtcaaggtgacgtgcagcccggaaccgtaacactggtgtgttccaaccccccatgcgagacacacgaaaccggcacaaccaacactgcaacaaccactgtcgtcgccaatctgggtggccatccccagcccactcaggttcagttcgtgtgtgacagacaagaagcggccgccagcttggtaacgagcactgtgggtcagcagaacgggagcgtggtgcgtgtctgtagtaatcccccatgcgagactcacgaaacagggaccactaacacagcgacgaccgctacctcgaacatggccggacagcatggttgctctaatccaccctgtgaaactcacgaaactggaactactaataccgctactacggcaatgtcatccgttggggccaaccaccagcgcgatgcacgccgggcttgcgcagctgggacccccgccgttattcggatatcagtcgctacaggcgccctagaggcagcccaggggtctaaaagccagtgtcagacccgtcagacttccgcaacatctacaacaatgactgtcatggccacaggggcaccttgctctgccggccccttgctgggtccctcaatggctagggaaccggggggtcgatcacctgctttcgtgcagctcgcccccctgagcagtaaagtcagactgtcctctccatcaattaaggatctcccagccgggagacacagccatgctgttagcaccgctgctatgaccaggagctctgttggggcaggagaaccccgcatggcccccgtctgtgagagcctgcagggcggaagcccatcgacaacagtgacagtgaccgccttggaagcactactgtgcccctcagccacggtaacccaggtatgctccaatcctccgtgcgagactcatgagacaggcaccaccaacacggctaccacctcgaacgcagggtctgctcagcgagtatgctctaacccaccctgtgagacacatgaaacagggactacgcacacagcaaccacagctacctctaatgggggtacaggccaacccgaaggcggccagcagccgcctgctggtaggccctgtgaaacacaccaaacaacatccaccggcacaaccatgtccgtttccgttggcgccctgctccctgacgccacaagctctcaccgcacagtggaatccggcttagaagtggcagcagccccctcagtgacaccacaggctggcaccgcactgttggcccccttccctactcaaagagtgtgctccaaccctccctgtgagacacacgagactggcactacacatactgccacgactgtcactagcaacatgtcctcaaatcaagacccgccacccgccgccagtgaccaaggcgaggtcgaatccacccagggggactctgtgaacataacctcgagttcggccattaccactaccgttagttctacgctcacacgtgctgtcactactgttacacaaagcaccccagtccccgggccaagtgtgcccaaaatttcatccatgacagagactgccccccgtgccctcaccactgaagtaccgattcctgcaaaaataacggtcaccatcgccaacactgagacaagcgacatgcctttctctgccgtcgacattctgcagcctcccgaggaattgcaagtgagccctggccctaggcagcagctgccacctcggcagttgctgcaaagcgcttctactgcccttatgggcgagtccgccgaagttttgtctgcctctcaaacacccgagctgcccgctgcagtggacttgtcgtcaaccggcgagccaagttctggacaggagagcgccgggagtgccgtagtggcaaccgtggtcgtgcagccaccgcctcctacccagagtgaggtggatcagctttcattgcctcaagagctgatggccgaggctcaagcagggacgactactttgatggtaaccggcctgactcccgaagaattagccgtgacagctgccgctgaggctgcagcacaggcggccgccacagaagaggctcaagctctggcaatccaggcagtgctgcaagcagcgcagcaggctgtcatggccggcaccggtgaaccaatggacactagtgaggccgccgccacagtaacgcaggcggaattgggccacctctctgccgagggacaggaaggccaggcgacaaccattcccattgtgctaacacaacaagaactagccgccctggtgcaacagcaacagctgcaagaggcacaggcccagcagcagcatcaccatctcccaacggaggctttagccccggccgacagcttaaacgaccccgcaatcgaaagtaactgcttgaacgaactggctgggacagtccctagcacagttgccctactgcccagcacagcaaccgaaagcctggcgccatctaatacattcgtcgcaccccaacccgtggtagtcgcttcccctgccaagttgcaagcggcggctactctcactgaagtggctaatggtatcgagtctttaggggtgaagcctgacctccccccccccccgtcaaaggcacctatgaagaaagagaatcagtggttcgatgtgggtgtaattaaggggacaaacgttatggtaacccactatttcctgccacctgacgacgcagtgccgtcagatgatgacttggggactgtgcccgactataatcagctgaagaagcaggaactgcagcccggcaccgcctataaattccgagtagccggcattaacgcctgcggacgggggcctttctccgagatctctgccttcaaaacatgcctaccagggttccccggcgcgccatgtgccattaagatctctaaatcacccgacggcgcccacctcacctgggaacctccaagtgttacctcaggcaagatcattgaatacagtgtgtaccttgccatccagagctctcaggccggtggtgagctgaaatcgtctaccccggcccaattggctttcatgagagtgtattgtgggccatccccaagctgtttagtgcagtcttcctcactaagtaatgcccatatcgactacaccacgaagccagccataatctttcgaattgccgctcgcaacgagaagggatacgggcctgctacgcaggtccgatggctgcaagagacatctaaagacagtagcggaacaaagcctgccaataaacggccaatgagctctcctgagatgaaaagcgcccctaagaaatcaaaagctgacggccagtag

SEQ ID NO: 296473 - DNA, 8375 bp, Artificial Sequence
  derived and/or modified sequence
aggcggctcaagatggcggctcccagggcctcccgcccgagcttgtaagcgggagcgcccggacaagtagtcggggcgacgggactcagcggcctccagcttcttgagcctaggcgctcgacagtttcgggcggctcttgcggagacggggtgagcgagaagaaagggaagagccaaagggaaggagggcagttaagatggcggcctccatggagtcgtctaccgctgtgtgagaaaccgcttctccgtgagagctgccttagacgaaagggggtgtgtgaaaggaattgaggggctcccttcccgcttgttgacttctccccaccgcaccctttcccggaactatggcttcggccgtgtcgcccgccaacttgccagcggtgcttctgcagccccgctggaagcgagtggtgggctggtcgggtccggtgccacggccccgccacggccaccgcgccgtggccatcaaggagctcatcgtggtgtttggcggcggcaacgagggaatagtggacgaactgcacgtgtacaacacggcaaccaaccagtggttcatcccagccgtgaggggggacattccccctgggtgtgcagcctatggcttcgtgtgtgacgggactcgcctcctggtgtttggtgggatggtggagtatgggaaatacagcaatgacctctacgaactccaggcgagccggtgggagtggaagagactcaaagcaaagacgcccaaaaacgggccccctccgtgtcctcgactcgggcacagcttctcccttgtgggcaacaaatgctacctgtttgggggtctggccaatgatagcgaggacccaaagaacaacattccaaggtacctgaatgacttatatatcctggaattacggccaggctctggagtggtagcctgggacattcccatcacttacggggtcctaccaccaccccgggagtcacatactgccgtggtctacaccgaaaaagacaataagaagtccaagctggtgatctacggcgggatgagtggctgcaggctgggggacctgtggaccctagatattgacaccctgacgtggaataagcccagtctcagcggggtggcgcctcttcctcgcagtctccactcggcaaccaccatcggaaataaaatgtacgtgtttggtggctgggtgcctctcgtcatggatgacgtcaaagtggccacacacgagaaggagtggaagtgtaccaacacgctggcttgtctcaacctggataccatggcctgggagaccatcctgatggatacactggaggacaacatcccccgtgctcgggctggccactgcgcagtcgccatcaacacccgcctgtacatttggagtgggcgtgacggctaccgcaaggcctggaacaaccaggtctgctgcaaggacctctggtacctagagacagaaaagccaccacccccagcccgagtacaactggtacgcgccaacaccaactccctggaggtgagctggggggcagtggcaacagccgacagctaccttctccagctccagaaatatgacattcctgccacggctgctactgccacctcccctacacccaatccggtcccatctgtgcctgccaaccctcccaagagccctgccccagcagcagccgcacctgctgtgcagccgctgacccaagtaggcatcacgctcctgccccaggctgcccccgcacccccgaccaccaccaccatccaggtcttgccaacggtgcctggcagctccatttctgtgcccaccgcagccaggactcaaggtgtccctgctgttctcaaagtgaccggtcctcaggctacaacaggaactccattggtcaccatgcgacctgccagccaggctgggaaagcccctgtcaccgtgacctcccttcccgccggagtgcggatggttgtgccaacacagagtgcccagggaacggtgattggcagtagcccacagatgagtgggatggccgcactggccgctgcggccgctgccacccagaagatccccccttcctcggcacccacggtgctgagtgtcccagcgggtaccaccatcgtgaagaccatggctgtgacacctggcactaccaccctcccagccactgtgaaggtggcctcctcgccagtcatggtgagcaaccctgccactcgcatgctgaagactgcagccgcccaggtggggacatcggtttcctccgccaccaacacgtctacccgccctatcatcacagtgcacaagtcaggcactgtgacagtggcccagcaagcccaggtggtgaccacagttgtgggcggggtcaccaagaccatcaccctggtgaagagccccatctctgtcccaggaggcagtgctctgatttccaatctgggcaaagtgatgtcggtggtccagaccaaaccagttcagacttcagcagtcacaggccaggcgtccacgggtcctgtgactcagatcatccagaccaaagggcccctgccagcgggaacaatcctgaagctggtgacctcagcagatggcaagcccaccaccatcatcactaccacgcaggccagtggggcggggaccaagcccaccatcctgggcatcagcagcgtctcccccagtaccaccaagcccggcacgaccaccatcatcaaaaccatccccatgtcggccatcatcacccaggcgggcgccacgggtgtgaccagcagtcctggcatcaagtcccccatcaccatcatcaccaccaaggtgatgacttcaggaactggagcacctgcgaaaatcatcactgctgtccccaaaattgccactggccacgggcagcagggagtgacccaggtggtgcttaagggggccccgggacagccaggcaccatcctccgcactgtgcccatggggggtgttcgcctggtcacacccgtcaccgtctccgccgtcaagccagccgtcaccacgttggttgtgaaaggcaccacaggtgtcacgaccctaggcacagtgacaggcaccgtctccaccagccttgccggggcggggggccacagcactagtgcttccctggccacgcccatcaccaccttgggcaccattgccaccctctcaagccaggtgatcaaccccactgccatcactgtgtcggccgcacagaccacgctgacagcggcaggcgggctcacaaccccaaccatcaccatgcagcccgtgtcccagcccacccaggtaactctgatcacggcacctagtggggtggaggcccagcctgtgcatgacctccctgtgtccattctggcctccccgactacagaacagcccaccgccacagttaccatcgccgactcaggccagggtgatgtgcagcctggcactgtcaccttggtgtgctccaacccaccctgtgagacccacgagactggcaccaccaacacggccaccactactgttgtggctaaccttgggggacacccccagcccacccaagtgcagttcgtctgtgacagacaggaggcagctgcttctcttgtgacctcgactgtgggccagcagaatggtagcgtggtccgagtctgttcgaacccgccctgcgagacccacgagacgggcaccaccaacaccgccaccaccgccacctccaacatggccgggcagcatggctgctcaaacccaccctgcgagacccacgagacgggcaccaccaacactgccactacagccatgtcgagcgtcggcgccaaccaccagcgagatgcccgtcgggcctgtgcagctggcacccctgccgtgatccggatcagtgtggccactggggcgctggaggcagcccagggctctaagtcccagtgccaaacccgccagaccagcgcgaccagcaccaccatgactgtgatggccaccggggccccgtgctcggccggcccactccttgggccgagcatggcacgggagcccgggggccgcagccctgcttttgtgcagttggcccctctgagcagcaaagtcaggctgagcagcccaagcattaaggaccttcctgcggggcgccacagccatgcggtcagcaccgctgccatgacccgttccagcgtgggtgctggggagccccgcatggcacctgtgtgcgagagcctccagggtggctcgcccagcaccacagtgactgtgacagccctggaggcactgctgtgcccctcggccaccgtgacccaagtctgctccaacccaccatgtgagacccacgagacaggcaccaccaacaccgccactacctcgaatgcaggcagcgcccagagggtgtgctccaacccgccatgcgagacccacgagacgggcaccacccacacggccaccaccgctacttcaaacgggggcacgggccagcccgagggtgggcagcagccccctgctggtcgcccctgtgagacacaccagaccacttccactggcaccaccatgtcggtcagcgtgggtgccctgcttcccgacgccacttcttcccacaggaccgtggagtctggcctagaggtggcggcggcacccagcgtcaccccccaggctggcaccgcgctgctggctcctttcccaacacagagggtgtgctccaaccccccctgtgagacccacgagacgggcaccactcacacggccaccactgtcacttccaacatgagttcaaaccaagaccccccacctgctgccagcgatcagggagaggtggagagcacccagggcgacagcgtgaacatcaccagctccagtgccatcacgacaaccgtgtcctccacactgacgcgggctgtgaccaccgtgacgcagtccacaccggtcccgggcccctctgtgccgaagatctcatcaatgactgagactgccccaagggctctgactactgaagtccccatcccggccaaaataacagtgaccatagccaacacagaaacttctgacatgcccttctctgctgttgacatcctgcagcccccagaggaactccaggtgtcgccaggtcctcgccagcagctgccgccacggcagcttctgcagtcggcttccacagccctgatgggggagtccgccgaggtcctgtcagcctcccagacccctgagctcccggccgccgtggatctgagcagcacaggggagccatcttcgggccaggagtctgccggctctgcggtggtggccactgtggtggtccagccacccccacccacacagtccgaagtagaccagttatcacttccccaagagctaatggccgaggcccaagctggcaccaccaccctcatggtaacggggctcacccccgaggagctggcagtgacggctgctgcagaagcagctgcccaggccgcagccacggaggaagcccaggccctggccatccaggcggtgctccaggccgcgcagcaggccgtcatggcaggcaccggcgagcccatggacacctccgaggcagcagcaaccgtgactcaggcggagctggggcacctgtcggccgagggtcaggagggccaggccaccaccatacccattgtgctgacacagcaggagctggctgccctggtgcagcagcagcagctgcaggaggcccaggcccagcagcagcatcaccacctccccactgaggccctggcccctgccgacagtctcaacgacccagccattgagagcaattgcctcaatgagctggccggcacggtccccagcactgtggcgctgctgccctcaacggccactgagagcctggctccatccaacacatttgtggccccccagccggttgtggtggccagcccagccaagctgcaggctgcagctaccctgaccgaagtggccaatggcatcgagtccctgggtgtgaagccagacctgccgcccccacccagcaaagcccccatgaagaaggaaaaccagtggtttgatgtgggagtcattaagggcaccaatgtaatggtgacacactatttcctgccaccagatgatgctgtcccatcagacgatgatttgggcaccgtccctgactataaccagctgaagaagcaggagctgcagccaggcacagcctataagtttcgtgttgccggaatcaatgcctgtggccgggggcccttcagcgaaatctcagcctttaagacgtgcctgcctggtttcccaggggccccttgtgccattaaaatcagcaaaagtccggatggtgctcacctcacctgggagccaccctctgtgacctccggcaagattatcgagtactccgtgtacctggccatccagagctcacaggctgggggcgagctcaagagctccaccccggcccagctggccttcatgcgggtgtactgcgggcccagcccctcctgcctggtgcagtcctccagcctttccaacgcccacatcgactacaccaccaagcccgccatcatcttccgcatcgccgcccgcaatgagaagggctatggcccggccacacaagtgaggtggctgcaggaaaccagtaaagacagctctggcaccaagccagccaacaagcggcccatgtcctctccagaaatgaaatctgctccaaagaaatctaaggccgatggtcagtgagaggaagctgactagcccctggattcttctccagacccccctgcttcaggaacacccgccagggcccacccctcccaccccgtcccagcattcgcacttcaccctcgcgagccgctgttcactcctctcccctttctctttctctctgtttttaaaataatctaaagaaagcacattttaccattgctgttgggaggaagcagaggcagatgggaaagcagagagaggagcgcgcttcctttcctccccgctgccgcccaccctggggagagacttttgcggggagggaaggcggagctgaggacagccagctccgccctcccaaggctgtgcgttcctgagggccaggtcgggggcaggcatggaggggaggaaaggcgtccctcttggccctccccagagtggctttcctggcaccctggcctgggtgtctggttctgttttcttttcttccccttgtgtttccagtcacctaacttcccttcctcaggctcccccggcccaccctgctcagtgaccccacaggaagcttacacattttctcagaggcctttgtgctcccacctcttctaccctccccctcttctttcccattttaaaaaagaaaagaaggaaaaagaaaaaaggggcaaggagccccgcggcggcctgggcagcgcctgtgcagacctccctgcaggccgcactgccaactgctgcatttgttgtgttttttaggttgcaattggtgaagttcacactttcattgtaattttagcgtgtggggttttgtcccttttttgttgttgttagctgtgtacagaatgtgtaatcttttttcttttctcttttttttgttttgttttgttttgtttttgtttttttacttttttcttcttggctaattcttggcagggatctttctggaggaaaagctggggccagccagggcaggagaggtgtgaaatctgccacgaggggcctgctgtttgccacccagcccaacttcctgttgctggcccctgccctctgcccttttgcctgtcctcaggccgctggaacaaaggaaggacagctcattcctcatgggcgatcactccgcatctatagggtcgagcctaggggagcttgagggagggctggggcctccttgtcctggatttccagctctccccatgccccctccctgagcaccaccggcaccgcctcccaaacagggctgctggtttccgcagccactgctccacctcccccaaatcgtcatggaaagggtggagaatggaggggaaccaggcgtccttggaggcagcttgggagggtgactgtgtagtgtcacccacaagggaggctagggcaatggagcaggccaccagcagcagctgtgcagcatggaactcaggccaggctccgaggctgggggatctgcttggagttttctgccccccaccccaaacttctgtcgaggagcaaggcttgccagcaagtcagaaggatttgaaccgagcagccaatctttccagccctcccctaccgacctctgcctggagacgcagcagcctgtgtcctccagggcctctggtttgttgtattatagtatatttcgctgtggaaaatgtcacgtttagtcaccttggagcccactcacctggtcctgttgttttaccccatcccttctctcgcgcgcctattgatttgtttctgaggagagtacaccgttcactattgtagagtaacccctgtgactcaatattaccatagtgcgatgtcgttttgtgctattttgaacaattaaaagactttttttgaaat

SEQ ID NO: 296474 - DNA, 6243 bp, Artificial Sequence
  derived and/or modified sequence
atggccagcgctgtgtccccagccaacctgcctgctgtgctgctgcagccccgctggaagagggtggtgggctggagcggccctgtgccccggcccaggcatggccacagagctgtggccatcaaggagctgattgtggtgtttggaggcggcaatgaaggaattgtggatgagctgcacgtgtacaacacagccaccaaccagtggttcatcccagctgtgcggggggacatccccccaggctgtgccgcctacggctttgtgtgtgatggcacccggctgctggtgtttggaggcatggtggagtatggcaagtacagcaatgacctgtatgagctgcaggccagccgctgggagtggaagaggctgaaggccaagacccccaagaatggccccccaccctgcccccggctgggccacagcttcagcctggtgggcaacaagtgctacctgtttggaggcctggccaatgattctgaggaccccaagaacaacatcccccgctacctgaatgacctgtacatcctggagctgcggcccggcagcggcgtggtggcctgggacatccccatcacctatggagtgctgcccccaccccgggagagccacacagctgtggtgtacacagagaaggacaacaagaagagcaagctggtgatctatggaggcatgagcggctgccgcctgggggacctgtggaccctggacatcgacaccctgacctggaacaagcccagcctgagcggcgtggcccccctgcccaggagcctgcacagcgccaccaccatcggcaacaagatgtatgtgtttggaggctgggtgcccctggtgatggatgatgtgaaggtggccacccatgagaaggagtggaagtgcaccaacaccctggcctgcctgaacctggacaccatggcctgggagaccatcctgatggacaccctggaggacaacatcccccgggcccgggccggccactgtgctgtggccatcaacacccggctgtacatctggagcggcagagatggctacaggaaggcctggaacaaccaggtgtgctgcaaggacctgtggtacctggagacagagaagcccccacctccagcccgggtgcagctggtgcgggccaacaccaacagcctggaggtgtcctggggcgctgtggccacagctgacagctacctgctgcagctgcagaagtatgacatcccagccacagctgccacagccaccagccccacccccaaccctgtgcccagcgtgcctgccaacccccccaagagccctgccccagctgctgctgccccagctgtgcagcccctgacccaggtgggcatcaccctgctgccccaggccgccccagccccacccaccaccaccaccatccaggtgctgcccaccgtgcccggcagcagcatctctgtgcccacagctgcccggacccagggcgtgcctgctgtgctgaaggtgacaggcccccaggccaccaccggcacccccctggtgaccatgaggcctgccagccaggccggcaaggcccctgtgacagtgaccagcctgcctgctggggtgaggatggtggtgcccacccagagcgcccagggcaccgtgattggcagcagcccccagatgagcggcatggccgccctggccgctgctgctgctgccacccagaagatcccccccagcagcgcccccaccgtgctgtctgtgcctgctggcaccaccatcgtgaagaccatggctgtgaccccaggcaccaccaccctgcctgccaccgtgaaggtggccagcagccctgtgatggtgagcaacccagccaccaggatgctgaagacagctgctgcccaggtgggcacctctgtgtcctctgccaccaacaccagcacccggcccatcatcaccgtgcacaagagcggcaccgtgacagtggcccagcaggcccaggtggtgaccaccgtggtgggcggcgtgaccaagaccatcaccctggtgaagagccccatctctgtgcctgggggcagcgccctgatcagcaacctgggcaaggtgatgtctgtggtgcagaccaagcctgtgcagaccagcgctgtgacaggccaggccagcactggacctgtgacccagatcatccagaccaagggccccctgcctgctggcaccatcctgaagctggtgaccagcgcagatggcaagcccaccaccatcatcaccaccacccaggccagcggggccggcaccaagcccaccatcctgggcatcagctctgtgagccccagcaccaccaagccaggcaccaccaccatcatcaagaccatccccatgtctgccatcatcacccaggccggggccaccggggtgaccagcagccctggcatcaagagccccatcaccatcatcaccaccaaggtgatgaccagcggcaccggggccccagccaagatcatcacagctgtgcccaagatcgccactggacatggccagcagggcgtgacccaggtggtgctgaagggggcccctggccagcccggcaccatcctgaggacagtgcccatgggcggcgtgcggctggtgacccctgtgacagtgtctgctgtgaagccagctgtgaccaccctggtggtgaagggcaccaccggggtgaccaccctgggcaccgtgactggaacagtgtccaccagcctggccggggccggcggccacagcaccagcgccagcctggccacccccatcaccaccctgggcaccatcgccaccctgagcagccaggtgatcaaccccacagccatcaccgtgtctgctgcccagaccaccctgacagctgctgggggcctgaccacccccaccatcaccatgcagcctgtgtcccagcccacccaggtgaccctcatcacagcccccagcggcgtggaggcccagcctgtgcatgacctgcctgtgtccatcctggccagccccaccacagagcagcccacagccaccgtgaccatcgctgacagcggccagggagatgtgcagcccggcaccgtgaccctggtgtgcagcaaccccccctgtgagacccatgaaacaggcaccaccaacacagccaccaccaccgtggtggccaacctgggcggccacccccagcccacccaggtgcagtttgtgtgtgaccggcaggaggccgccgccagcctggtgaccagcacagtgggccagcagaatggatctgtggtgcgggtgtgcagcaaccccccctgtgagacccatgaaacaggcaccaccaacacagccaccacagccaccagcaacatggccggccagcacggctgcagcaaccccccctgtgagacccatgagaccggcaccaccaacacagccaccacagccatgagctctgtgggcgccaaccaccagagagatgcccggcgggcctgtgccgccggcaccccagctgtgatccgcatctctgtggccactggagccctggaggccgcccagggcagcaagagccagtgccagacccggcagaccagcgccaccagcaccaccatgacagtgatggccactggagccccctgcagcgctggccccctgctgggccccagcatggcccgggagcccggcggccgcagccctgcctttgtgcagctggcccccctgagcagcaaggtgcggctgagcagccccagcatcaaggacctgcctgctggccgccacagccatgctgtgtccacagctgccatgaccaggagctctgtgggcgctggggagcccaggatggcccctgtgtgtgagagcctgcagggcggcagccccagcaccaccgtgacagtgacagccctggaggccctgctgtgccccagcgccaccgtgacccaggtgtgcagcaaccccccctgtgagacccatgaaacaggcaccaccaacacagccaccaccagcaatgccggcagcgcccagagggtgtgcagcaaccccccctgtgagacccatgaaacaggcaccacccacacagccaccacagccaccagcaatggaggcaccggccagcctgagggcggccagcagcccccagctggccggccctgtgagacccaccagaccaccagcacaggcaccaccatgtctgtgtctgtgggcgccctgctgcctgatgccaccagcagccacaggacagtggagagcggcctggaggtggccgccgcccccagcgtgaccccccaggccggcacagccctgctggcccccttccccacccagagggtgtgcagcaaccccccctgtgagacccatgaaacaggcaccacccacacagccaccaccgtgaccagcaacatgagcagcaaccaggaccccccacctgctgccagtgaccagggcgaggtggagagcacccagggcgacagcgtgaacatcaccagcagcagcgccatcaccaccaccgtgagcagcaccctgaccagggctgtgaccaccgtgacccagagcacccctgtgcccggccccagcgtgcccaagatcagctccatgacagaaacagccccccgggccctgaccacagaggtgcccatcccagccaagatcaccgtgaccatcgccaacacagagaccagtgacatgcccttctctgctgtggacatcctgcagcccccagaggagctgcaggtgtccccaggcccccggcagcagctgcccccccggcagctgctgcagagcgccagcacagccctgatgggagagagcgctgaggtgctgagcgccagccagaccccagagctgcctgctgctgtggacctgagcagcactggagagcccagcagcggccaggagagcgctggcagcgctgtggtggccaccgtggtggtgcagcccccaccacccacccagagcgaggtggaccagctgagcctgccccaggagctgatggccgaggcccaggccggcaccaccaccctgatggtgacaggcctgaccccagaggagctggccgtgacagctgctgctgaggccgccgcccaggccgccgccacagaggaggcccaggccctggccatccaggccgtgctgcaggccgcccagcaggccgtgatggccggcaccggggagcccatggacaccagcgaggccgccgccaccgtgacccaggccgagctgggccacctgtctgctgagggccaggagggccaggccaccaccatccccatcgtgctgacccagcaggagctggccgccctggtgcagcagcagcagctgcaggaggcccaggcccagcagcagcaccaccacctgcccacagaggccctggccccagctgacagcctgaatgaccctgccatcgagagcaactgcctgaatgagctggccggcaccgtgcccagcacagtggccctgctgcccagcacagccacagagagcctggcccccagcaacacctttgtggccccccagcctgtggtggtggccagccctgccaagctgcaggccgccgccaccctgacagaggtggccaatggaattgagagcctgggcgtgaagccagacctgcccccaccacccagcaaggcccccatgaagaaggagaaccagtggtttgatgtgggcgtcatcaagggcaccaacgtgatggtgacccactacttcctgcccccagatgatgctgtgcccagtgatgatgacctgggcaccgtgcctgactacaaccagctgaagaagcaggagctgcagcctggaacagcctacaagttccgggtggccggcatcaatgcctgtggccggggccccttcagcgagatcagcgccttcaagacctgcctgcccggcttccctggggccccctgtgccatcaagatcagcaagagcccagatggagcccacctgacctgggagcccccatctgtgaccagcggcaagatcatcgagtacagcgtgtacctggccatccagagcagccaggccggcggggagctgaagagcagcaccccagcccagctggccttcatgagggtgtactgcggccccagccccagctgcctggtgcagagcagcagcctgagcaatgcccacatcgactacaccaccaagccagccatcatcttcagaattgctgccagaaatgagaagggctacggccctgccacccaggtgcgctggctgcaggagaccagcaaggacagcagcggcaccaagccagccaacaagaggcccatgagcagccctgagatgaagagcgcccccaagaagagcaaggcagatggccagtag

SEQ ID NO: 296475 - DNA, 6243 bp, Artificial Sequence
  derived and/or modified sequence
atggccagcgccgtgagccccgccaacctgcccgccgtgctgctgcagcctcgctggaagcgggtcgtagggtggagtggtcccgttccaaggcccagacacggtcaccgtgctgtagcaatcaaggagctgattgtggtattcggggggggtaacgaagggattgttgatgaactccacgtgtataacaccgccactaaccagtggtttatccctgcagtcaggggagatattccgccaggatgcgctgcttacggtttcgtttgcgatggcactaggttgctggttttcggtggaatggtggagtatggcaaatacagcaacgacctgtacgagctgcaggcttccaggtgggagtggaagcgcctgaaagccaagaccccaaaaaatgggccacctccatgccctaggctgggtcatagttttagccttgttggaaataaatgttatctgtttgggggtctggcaaacgactctgaggatccgaaaaacaatatcccccgctaccttaacgacctgtacatcctggaactgcgaccgggatccggcgttgtggcttgggacattcccattacctatggcgtgttgccacctcctcgggaaagtcatacagcggttgtgtacaccgagaaggacaacaaaaaatccaaactcgttatttacggcggaatgagtggctgtcgactgggcgacttgtggacactcgacattgacaccttaacttggaataaaccttccttgtccggggtggcccctttgccacggtctctgcattctgctaccaccattggcaacaaaatgtatgtgttcgggggatgggtgccacttgtcatggacgacgtcaaggtagccacacacgagaaagaatggaagtgcactaacacactggcctgcctgaatttagataccatggcttgggagacaattctaatggacacccttgaagacaacatccccagagctagggcaggccactgcgcagtagcaataaatacgagactgtatatttggtcgggacgggacggctatcgcaaagcatggaataaccaggtgtgctgtaaggacctgtggtatctggagaccgagaaacctccacctcccgcgagagtgcagctggtaagggcaaacactaacagtctcgaggtctcttggggtgcagtcgctacagctgattcatacctgctgcaactgcagaaatacgacattccggcaaccgctgcaaccgctacctcccccacacccaaccccgtgccttccgttcctgccaaccctcctaagtccccagcccctgcagctgcagcgccagctgtccaaccactaacacaagtcgggattactcttctgcctcaggccgcccccgcacctcccactacaacaacaatccaggtgttacccaccgtgcccggttccagcatcagcgtgcccactgccgctaggacacaaggagtaccagcagttctaaaggtcaccggcccgcaggctacaacggggacccctcttgttactatgagaccggccagtcaggcgggaaaggcccctgtcaccgtgacatccctccccgctggtgtcagaatggtggtacccactcagtctgcccagggtaccgtgatcggatcctctccccagatgtcaggcatggccgctttggccgccgccgccgctgcaacccagaagatccctccaagtagcgcccccaccgtgctttccgtccctgcaggcacaaccatcgtgaagacaatggcagttacacccgggaccaccacactaccagccacagtgaaagtagcatcaagtcccgttatggtgtcaaacccggccaccaggatgctaaaaacagccgcagcccaggtcggcacatcggtttctagcgccaccaacaccagcactcgtccaattattaccgtacataagagtggtactgtcacagtcgcacagcaggcccaggtggtcacgacagttgtcggtggagtcacaaagactattactctggtgaagagcccaatctccgttcccggaggctccgcactgattagcaatctcggcaaagtgatgtccgtggtccagactaagcccgtccaaacgtcagctgtgaccggtcaggcttccacaggccctgttacccagatcatacagaccaagggcccccttccagctggcacaatactgaaactggttacctccgccgacggcaaaccaaccaccatcatcaccaccacccaagcgagtggggctggcaccaaaccgacaatcctcggaatctcaagcgtttccccttctactaccaaaccgggtacaaccactattatcaaaactattccgatgtcagctattattacccaggcgggagcaaccggggtcacatcctccccgggaataaaaagtccaatcacaataatcaccaccaaagttatgacatcgggtacgggcgccccagcaaaaattattaccgccgtgcctaaaattgcaactggccatggacaacagggggtgacacaagtagtgctgaaaggcgcccccgggcagcccggcacaatcctacggactgtcccaatgggtggagttaggctggtgacacctgttaccgtgtctgcggttaagcctgccgtgacgaccctggttgtcaagggcaccaccggcgtcacaacacttggtacagtgaccggtaccgtttctacatctctggccggagcaggtggccacagcacctcagcttccctggccaccccgataacaaccctggggaccatcgcaacactgtctagccaggtcatcaatcctacagccatcacagtcagcgccgcccagacaactctcactgccgctggtggactgactacacccactataacgatgcagcctgtgagccaaccaacacaggtgaccctcataactgcaccctccggggtcgaagcccaacctgttcacgatctcccagtgtccatcctcgcatcgcctacaactgaacaacccaccgcaaccgtaaccatagcagattctggacaaggggatgtccagccaggaaccgtgacactggtgtgctcgaatccaccgtgtgagacacacgagactgggacaactaacacggccactaccaccgttgtagctaatttagggggccatccacagccgactcaggtgcaattcgtctgcgatcgccaggaagccgccgcatctctggtgacttccactgtcggtcagcagaacggtagtgtcgtgcgggtgtgttccaatcccccatgtgagacacacgagactggtaccacaaacaccgccaccaccgcaacaagcaatatggcaggccagcatggatgttccaaccctccctgtgaaacacacgagactggaaccaccaataccgctaccaccgcaatgtcgtccgtgggagctaaccaccagcgtgatgcacgccgggcgtgcgccgccggaacacctgcagtaattaggatttctgtggctacgggagctctcgaggctgcccagggaagtaaaagccagtgtcagaccaggcagacctctgccactagcacaaccatgaccgtgatggcaactggagcgccatgctccgctggaccgctgttgggaccaagcatggctagagaacccggggggcgcagtcctgcatttgtccagctggctcccttgtcctctaaggtgagactcagctccccctcaattaaggaccttcccgccggcagacattcacacgctgttagtacggctgctatgacccgcagttccgtgggagctggcgagccgagaatggcccctgtatgcgagtcgttgcagggtgggtccccatcgaccactgtgaccgtcaccgccctggaggctctgctgtgcccgagcgccaccgtgacccaggtgtgcagcaacccgccttgcgagactcatgagacaggcacaactaatacggctacaacaagcaatgcaggctccgcccagagagtctgctctaacccgccctgcgagactcatgagacaggaacaacgcacacggccaccactgctacctccaacggaggtactggccagcctgaaggaggccagcaaccccccgccgggcggccctgcgagacgcaccagactacctcaactggcacgaccatgagtgtgagtgtaggggccctactaccggacgccactagctcccacagaacagtcgaatccggtcttgaagtggcagccgctccatccgtcaccccacaggctggcaccgctctgctggctccattccctacgcaacgcgtgtgctctaaccccccttgtgaaactcacgagactggtacaactcacacagcaaccactgtcacatcaaacatgtcctcaaaccaagaccccccccctgctgcatcagaccagggcgaagtggaaagtacacagggagatagtgtgaatatcacatcatcttctgccatcaccaccaccgtgtcctccacgctgactagggctgttacaaccgtcacccagtccaccccagtcccaggcccctccgtaccaaaaattagctcgatgaccgagacagctcctagagccctgaccactgaagtcccaatacccgctaagattacagtaaccattgctaatacagagacgagtgacatgccattctcagccgtggatatcctgcagccgcctgaggaactgcaggtaagcccagggcctcgccagcagttgccaccccgacagcttcttcagtcagctagcacagcattaatgggagaaagcgccgaggtactctcagccagccaaacccctgaacttcccgcagcggttgatctgtcatcaaccggagagccctcctccggccaggagagtgctggctcagctgtggtggctaccgttgtcgtacagccccctcctcccacacagtctgaggtcgaccagctcagcctcccgcaagagttgatggcagaggcacaggccggaacaaccactctgatggtgactggtttaactccggaggaactcgctgtaactgccgccgcagaggctgccgctcaggccgcagccacggaagaggctcaggcactggcgatccaggctgtgctccaggcagctcaacaggcagtaatggcagggactggggaacctatggacacatcagaagcagctgcaacagtcacacaagcagagctgggacatctgtctgcagagggccaggagggtcaagcgacgaccattccaatcgtgctaactcagcaagagctggccgctctggtccagcaacagcaattgcaggaggcccaggcccagcagcagcaccaccatttgccaacagaggccctcgcacccgcggattcgttaaatgatcccgcaatcgagtccaattgtctgaacgagctcgctggaacagttccttccaccgtagcccttttgccctcaaccgcaaccgagagcttggcccctagtaacacctttgtggcccctcaacctgttgtcgtggccagtcctgccaaattacaggccgcggcgacactcaccgaggtggccaatggcatagaatctctgggcgtgaagcctgacctgcctcctcctccttcaaaagctccgatgaagaaggaaaaccagtggttcgatgtcggggtcatcaagggaacaaacgtgatggttacacattactttttgccccctgatgacgccgtgccatcggatgacgatctgggtacagtccccgattataatcagctgaagaagcaggaactgcagcccggtacggcatataaatttagggtcgctggtatcaatgcctgtggacgtgggcctttcagcgagattagcgcctttaaaacctgtcttccagggttcccaggcgcaccatgtgccatcaaaatctccaagagccctgatggcgcccatctaacctgggaaccccccagcgtgacttccgggaagatcatcgagtacagcgtgtacctggccatccagagttctcaagcgggaggcgaactcaagtcttctacccctgcgcagctcgcttttatgcgggtttattgcggccccagcccctcttgtctggtgcaatcaagcagcctcagtaatgcgcatatcgactacaccactaaacctgcaattatctttcgcattgccgcgagaaatgaaaaagggtacggacctgctactcaggttcggtggcttcaggaaacttctaaagactcaagcggaactaaaccggccaacaagagacctatgtctagccctgaaatgaaatcagctcccaagaaatctaaggccgacggacagtag

SEQ ID NO: 296476 - DNA, 6242 bp, Artificial Sequence
  derived and/or modified sequence
atggcctccgccgtctctccagctaatctcccagctgtgctcttgcagccccgttggaaacgagtcgtcggatggtccgggcctgtgccgcgtccgaggcacggacatcgagcggtagccatcaaagagttgatcgtagtctttggcggaggtaatgagggcattgttgatgagctccacgtttataacactgccacaaaccagtggtttattcccgctgtgagaggggatatccctcctgggtgtgcggcatacgggttcgtgtgcgatggaaccaggcttctggtttttggagggatggtcgagtacggcaaatattccaacgacctgtacgaactgcaggcatccagatgggagtggaagcggttgaaggctaagactccaaaaaatggaccgccaccctgcccacgcctgggtcactcattcagcttggtcggcaataagtgctatctgttcggcggtttggccaacgacagcgaggaccccaaaaacaatattccacgctatctcaacgatttatatatcctggaattgagaccaggatcaggggtcgttgcttgggacataccaataacatacggagtcctaccacccccacgggaatcacatacagcggttgtgtataccgaaaaagacaacaaaaagagtaaattagtgatatacgggggaatgtccggatgtcggttaggagatctgtggaccctcgatatcgacacattaacatggaacaaaccaagcctatcgggggttgcccctctccctcgctccctgcacagcgccaccaccatcggcaacaaaatgtacgttttcggaggatgggtacctttggtgatggatgatgtgaaggtggctacccacgagaaagagtggaagtgtacaaacacccttgcctgtctgaatctggacacaatggcctgggaaaccattttgatggacacactggaggacaacatcccaagagcacgcgctggtcattgcgctgtggccataaatactcgactgtatatatggtctggcagggatggctatcgaaaagcctggaacaaccaggtctgttgtaaggatctgtggtatctggaaaccgagaaaccaccgcctcccgcacgcgtacagttagtgagggcgaatacgaacagtttagaggtgagctggggtgccgtggctaccgccgattcttatctgctgcagctccaaaagtacgacatccctgcgacagctgcgacagctaccagccctacccctaatcccgtgcctagcgtgccagccaacccaccaaaaagcccagctcctgctgccgcagcccctgctgtgcagccacttactcaggtgggcatcaccttgctgcctcaggctgcacctgccccaccaacaaccactacaattcaggtcctccccacagtgcccggttcttctatctccgtgcccactgctgctagaacccagggcgtgcctgccgtactaaaggttacaggccctcaggcgactacagggacacccctcgttacgatgagacctgcatcccaggcgggaaaggctccagtcacagtgacgtccctccctgcaggagtgaggatggtcgtgcctacacaaagcgctcagggtaccgtgatcggatcctctcctcagatgagcggcatggccgctcttgccgctgcagcagccgcaacacagaaaataccgcctagtagcgcgcctacggtgctgagcgttccagccggaacaaccattgtgaaaactatggccgtgacgcccggaaccaccactttgcccgctaccgtgaaggtcgctagttcacccgtgatggtcagcaaccccgcaacccgcatgctaaaaacagcagcagcgcaggtgggaacttcagtatcctccgcaaccaataccagtactcggcctattattactgtgcacaaatccgggacggtgactgtggcacagcaagcacaagtagtgaccaccgtggtgggcggtgtgactaagactattactctggtaaagtcacctattagcgtgccaggcggatctgccctgattagcaacctcggcaaggtgatgtcagtagtgcagacgaaaccagttcaaacaagtgccgtgaccggacaagcgagcaccggcccagtcactcaaatcattcaaactaaaggcccactccctgcaggtactattttgaagctcgtgactagtgccgacggtaaaccgaccaccatcattaccaccacacaggcttccggtgcaggtacgaagcctaccattctgggcatttctagtgtgtcaccatctacaacgaagcccggaaccaccacgatcatcaagaccatccccatgtcagcaattatcacacaggccggagcaacaggggtaacctcttctccagggatcaaatcgccaataaccatcatcacaactaaggtgatgactagtggaactggcgcacctgctaaaatcatcacagcagtgcccaagatcgcaaccggccatggtcagcaaggagtgacacaggtcgtgctgaagggtgcacccggacagcccggtactatcctccggaccgtacctatgggtggtgtgcgtctggtgacaccggtaactgtttccgcggtaaagcccgcagtgacaacactggtggtcaaggggaccacgggggtcaccactctgggcacagttaccggcaccgtttcaacctctcttgccggtgccggtggccactcaacttcggccagtctggcaaccccaattaccacgctgggtaccattgctacgttaagcagtcaggtcatcaaccctaccgccattaccgtgtctgcagcccagacaacgctgacggccgctggtgggttgaccacacctactataactatgcagcccgttagtcaacccacgcaggtgacgctgattacggctccttcgggcgtagaggcccaaccagtgcatgacctgcccgtttcaatcctggccagtccgaccaccgaacagcccacagccactgtgaccatcgcggattctggacagggcgatgtgcagccagggacggtgacgctcgtttgctcaaacccgccatgtgagacccacgagacaggaaccactaataccgctacaaccacggtagtggccaatttaggcggacacccacagcctactcaggtgcagttcgtgtgcgatcgtcaagaagcagcggcttccctcgttacctccactgtggggcaacagaacggatccgtcgttcgggtctgcagcaacccaccttgcgagactcatgagaccgggactactaataccgccaccacggctactagtaatatggccggtcagcatggctgtagcaacccgccttgcgaaacgcacgagaccggaactaccaacacagcgacaaccgctatgtcatccgtcggtgctaatcatcagcgggatgcgaggcgggcttgtgccgcagggaccccagctgtgattagaatttctgtcgcaaccggggctcttgaagccgctcagggaagcaagtcccagtgccagacacgccaaacctccgccacatcgacaaccatgaccgttatggccaccggtgccccatgcagcgcgggacctctgttgggaccatctatggcaagagagcctggcggtaggtcccctgctttcgttcaattggcacctctgtcttctaaagtgcggctgagctcaccttcaataaaggatctcccagctgggagacattctcacgctgtcagtaccgcagctatgactcgaagctcagtaggcgctggtgagcctcgcatggcacctgtgtgcgaatcactgcagggcggaagcccctctaccaccgtgacagtgacggcgctagaggcactgttgtgcccatctgcaaccgtgactcaggtttgcagcaatccaccctgtgagactcatgaaacagggaccaccaacactgcgacaacgagcaacgctgggtccgctcagagagtgtgctcaaaccccccatgtgagacacacgagacgggtacaacccacacagcaacaacagcaaccagcaatggcggtacagggcagcctgagggcggacagcagcctccagccggacgaccctgcgaaacccaccagaccacatctactggcacaaccatgagtgtgtctgtgggtgcacttctgccagacgcaactagttctcaccgcacagtggagtctggcctagaagttgccgctgctccaagcgtcacacctcaggccggaaccgcgttgttggcaccgtttcccactcagagagtgtgtagtaatcctccatgcgagacccacgagaccggcaccacccataccgctacaactgtgacatccaacatgtcttcaaaccaagacccccctccagctgcctccgatcaaggggaagtggaatctacccaaggggattcagttaacatcacttccagctcagcaatcacaaccaccgtgagcagtactttaacccgcgctgttactaccgttactcagtcaacacctgtacccggtccatcagtccctaagatctcatctatgacagagacagctccacgggcactgacaaccgaggtacccatccccgctaaaattaccgttaccatcgccaatacagagactagtgatatgcctttcagcgccgtagatatattacagcccccagaagagctgcaggtaagcccgggtcctcgccagcaactaccacctcgacagctgcttcaaagcgcatccaccgctcttatgggtgagtccgcagaggtgttatccgccagccagacgcccgaactccctgcagccgtggatctgagctctacgggtgaaccatctagcgggcaggagtccgctgggtctgccgttgtagcgaccgttgtcgtgcagcctccgcctcccacccagagcgaggtggatcagctttcgctgccacaggagcttatggcagaggcccaggctggaacaaccacacttatggtgactggattgaccccagaagaacttgctgtgaccgccgcagctgaagctgcagcccaggcagctgccacagaggaggcccaggccctggccatccaggctgtgctgcaggccgcacagcaggcggtgatggctggcacaggcgagccgatggatacgtccgaggctgccgcaacggtgacccaggccgagcttggacacctgagtgccgaggggcaagaaggccaggccactactataccaatagtgctcacgcagcaggagttagctgctctggttcagcaacagcagttgcaagaggcacaagctcagcagcaacaccatcacctccccactgaagccctcgcccctgcagactctctcaacgatccagcaattgaatccaattgccttaatgagctggcaggaaccgtgccatccacagttgctctcctgccaagcacagccacagagagcctggccccaagtaacacattcgttgccccacaacctgttgttgttgcctccccagccaagctccaagccgcagctacactgactgaagttgccaatggaatcgagtcgctgggcgtgaaacccgacctgccacccccaccatcaaaggctccaatgaagaaagagaaccagtggttcgacgtgggagtcatcaagggcaccaatgtgatggttacccattacttcctccctccggatgatgctgttccaagcgatgacgaccttgggactgtccccgactacaaccaattgaagaagcaggagctccagcccggaactgcttacaagttccgggtggcaggcattaatgcctgcgggagaggaccattttcagaaatttctgccttcaagacctgcctaccagggtttccaggagctccctgtgccattaagatctctaagtctcccgatggagcccatttgacatgggagccaccatcagtgacatctggaaaaataatcgaatactcggtttacctcgccattcaatcctctcaggccggaggtgaattaaaatccagtacacctgcacaactagcctttatgcgtgtgtactgcggtcctagcccatcttgcctagtacagtcaagctctctgagcaacgctcatatagattacacgactaagccggctatcatttttagaatcgccgcacggaacgagaaaggatatgggccagccactcaggtgaggtggcttcaggaaacgagtaaggattcatctggtacaaagcctgccaacaaacgaccaatgagcagccctgaaatgaaaagtgcgcctaagaagagtaaggcagatggccaata

SEQ ID NO: 296477 - DNA, 6243 bp, Artificial Sequence
  derived and/or modified sequence
atggccagcgccgtgagccccgccaacctgcccgccgtgctgctgcagcccagatggaagagagtggtgggctggagcggccccgtgcccagacccagacacggccacagagccgtggccatcaaggagctgatcgtggtgttcggcggcggcaacgagggcatcgtggacgagctgcacgtgtacaacaccgccaccaaccagtggttcatccccgccgtgagaggcgacatcccccccggctgcgccgcctacggcttcgtgtgcgacggcaccagactgctggtgttcggcggcatggtggagtacggcaagtacagcaacgacctgtacgagctgcaggccagcagatgggagtggaagagactgaaggccaagacccccaagaacggcccccccccctgccccagactgggccacagcttcagcctggtgggcaacaagtgctacctgttcggcggcctggccaacgacagcgaggaccccaagaacaacatccccagatacctgaacgacctgtacatcctggagctgagacccggcagcggcgtggtggcctgggacatccccatcacctacggcgtgctgcccccccccagagagagccacaccgccgtggtgtacaccgagaaggacaacaagaagagcaagctggtgatctacggcggcatgagcggctgcagactgggcgacctgtggaccctggacatcgacaccctgacctggaacaagcccagcctgagcggcgtggcccccctgcccagaagcctgcacagcgccaccaccatcggcaacaagatgtacgtgttcggcggctgggtgcccctggtgatggacgacgtgaaggtggccacccacgagaaggagtggaagtgcaccaacaccctggcctgcctgaacctggacaccatggcctgggagaccatcctgatggacaccctggaggacaacatccccagagccagagccggccactgcgccgtggccatcaacaccagactgtacatctggagcggcagagacggctacagaaaggcctggaacaaccaggtgtgctgcaaggacctgtggtacctggagaccgagaagccccccccccccgccagagtgcagctggtgagagccaacaccaacagcctggaggtgagctggggcgccgtggccaccgccgacagctacctgctgcagctgcagaagtacgacatccccgccaccgccgccaccgccaccagccccacccccaaccccgtgcccagcgtgcccgccaacccccccaagagccccgcccccgccgccgccgcccccgccgtgcagcccctgacccaggtgggcatcaccctgctgccccaggccgcccccgccccccccaccaccaccaccatccaggtgctgcccaccgtgcccggcagcagcatcagcgtgcccaccgccgccagaacccagggcgtgcccgccgtgctgaaggtgaccggcccccaggccaccaccggcacccccctggtgaccatgagacccgccagccaggccggcaaggcccccgtgaccgtgaccagcctgcccgccggcgtgagaatggtggtgcccacccagagcgcccagggcaccgtgatcggcagcagcccccagatgagcggcatggccgccctggccgccgccgccgccgccacccagaagatcccccccagcagcgcccccaccgtgctgagcgtgcccgccggcaccaccatcgtgaagaccatggccgtgacccccggcaccaccaccctgcccgccaccgtgaaggtggccagcagccccgtgatggtgagcaaccccgccaccagaatgctgaagaccgccgccgcccaggtgggcaccagcgtgagcagcgccaccaacaccagcaccagacccatcatcaccgtgcacaagagcggcaccgtgaccgtggcccagcaggcccaggtggtgaccaccgtggtgggcggcgtgaccaagaccatcaccctggtgaagagccccatcagcgtgcccggcggcagcgccctgatcagcaacctgggcaaggtgatgagcgtggtgcagaccaagcccgtgcagaccagcgccgtgaccggccaggccagcaccggccccgtgacccagatcatccagaccaagggccccctgcccgccggcaccatcctgaagctggtgaccagcgccgacggcaagcccaccaccatcatcaccaccacccaggccagcggcgccggcaccaagcccaccatcctgggcatcagcagcgtgagccccagcaccaccaagcccggcaccaccaccatcatcaagaccatccccatgagcgccatcatcacccaggccggcgccaccggcgtgaccagcagccccggcatcaagagccccatcaccatcatcaccaccaaggtgatgaccagcggcaccggcgcccccgccaagatcatcaccgccgtgcccaagatcgccaccggccacggccagcagggcgtgacccaggtggtgctgaagggcgcccccggccagcccggcaccatcctgagaaccgtgcccatgggcggcgtgagactggtgacccccgtgaccgtgagcgccgtgaagcccgccgtgaccaccctggtggtgaagggcaccaccggcgtgaccaccctgggcaccgtgaccggcaccgtgagcaccagcctggccggcgccggcggccacagcaccagcgccagcctggccacccccatcaccaccctgggcaccatcgccaccctgagcagccaggtgatcaaccccaccgccatcaccgtgagcgccgcccagaccaccctgaccgccgccggcggcctgaccacccccaccatcaccatgcagcccgtgagccagcccacccaggtgaccctgatcaccgcccccagcggcgtggaggcccagcccgtgcacgacctgcccgtgagcatcctggccagccccaccaccgagcagcccaccgccaccgtgaccatcgccgacagcggccagggcgacgtgcagcccggcaccgtgaccctggtgtgcagcaaccccccctgcgagacccacgagaccggcaccaccaacaccgccaccaccaccgtggtggccaacctgggcggccacccccagcccacccaggtgcagttcgtgtgcgacagacaggaggccgccgccagcctggtgaccagcaccgtgggccagcagaacggcagcgtggtgagagtgtgcagcaaccccccctgcgagacccacgagaccggcaccaccaacaccgccaccaccgccaccagcaacatggccggccagcacggctgcagcaaccccccctgcgagacccacgagaccggcaccaccaacaccgccaccaccgccatgagcagcgtgggcgccaaccaccagagagacgccagaagagcctgcgccgccggcacccccgccgtgatcagaatcagcgtggccaccggcgccctggaggccgcccagggcagcaagagccagtgccagaccagacagaccagcgccaccagcaccaccatgaccgtgatggccaccggcgccccctgcagcgccggccccctgctgggccccagcatggccagagagcccggcggcagaagccccgccttcgtgcagctggcccccctgagcagcaaggtgagactgagcagccccagcatcaaggacctgcccgccggcagacacagccacgccgtgagcaccgccgccatgaccagaagcagcgtgggcgccggcgagcccagaatggcccccgtgtgcgagagcctgcagggcggcagccccagcaccaccgtgaccgtgaccgccctggaggccctgctgtgccccagcgccaccgtgacccaggtgtgcagcaaccccccctgcgagacccacgagaccggcaccaccaacaccgccaccaccagcaacgccggcagcgcccagagagtgtgcagcaaccccccctgcgagacccacgagaccggcaccacccacaccgccaccaccgccaccagcaacggcggcaccggccagcccgagggcggccagcagccccccgccggcagaccctgcgagacccaccagaccaccagcaccggcaccaccatgagcgtgagcgtgggcgccctgctgcccgacgccaccagcagccacagaaccgtggagagcggcctggaggtggccgccgcccccagcgtgaccccccaggccggcaccgccctgctggcccccttccccacccagagagtgtgcagcaaccccccctgcgagacccacgagaccggcaccacccacaccgccaccaccgtgaccagcaacatgagcagcaaccaggaccccccccccgccgccagcgaccagggcgaggtggagagcacccagggcgacagcgtgaacatcaccagcagcagcgccatcaccaccaccgtgagcagcaccctgaccagagccgtgaccaccgtgacccagagcacccccgtgcccggccccagcgtgcccaagatcagcagcatgaccgagaccgcccccagagccctgaccaccgaggtgcccatccccgccaagatcaccgtgaccatcgccaacaccgagaccagcgacatgcccttcagcgccgtggacatcctgcagccccccgaggagctgcaggtgagccccggccccagacagcagctgccccccagacagctgctgcagagcgccagcaccgccctgatgggcgagagcgccgaggtgctgagcgccagccagacccccgagctgcccgccgccgtggacctgagcagcaccggcgagcccagcagcggccaggagagcgccggcagcgccgtggtggccaccgtggtggtgcagccccccccccccacccagagcgaggtggaccagctgagcctgccccaggagctgatggccgaggcccaggccggcaccaccaccctgatggtgaccggcctgacccccgaggagctggccgtgaccgccgccgccgaggccgccgcccaggccgccgccaccgaggaggcccaggccctggccatccaggccgtgctgcaggccgcccagcaggccgtgatggccggcaccggcgagcccatggacaccagcgaggccgccgccaccgtgacccaggccgagctgggccacctgagcgccgagggccaggagggccaggccaccaccatccccatcgtgctgacccagcaggagctggccgccctggtgcagcagcagcagctgcaggaggcccaggcccagcagcagcaccaccacctgcccaccgaggccctggcccccgccgacagcctgaacgaccccgccatcgagagcaactgcctgaacgagctggccggcaccgtgcccagcaccgtggccctgctgcccagcaccgccaccgagagcctggcccccagcaacaccttcgtggccccccagcccgtggtggtggccagccccgccaagctgcaggccgccgccaccctgaccgaggtggccaacggcatcgagagcctgggcgtgaagcccgacctgccccccccccccagcaaggcccccatgaagaaggagaaccagtggttcgacgtgggcgtgatcaagggcaccaacgtgatggtgacccactacttcctgccccccgacgacgccgtgcccagcgacgacgacctgggcaccgtgcccgactacaaccagctgaagaagcaggagctgcagcccggcaccgcctacaagttcagagtggccggcatcaacgcctgcggcagaggccccttcagcgagatcagcgccttcaagacctgcctgcccggcttccccggcgccccctgcgccatcaagatcagcaagagccccgacggcgcccacctgacctgggagccccccagcgtgaccagcggcaagatcatcgagtacagcgtgtacctggccatccagagcagccaggccggcggcgagctgaagagcagcacccccgcccagctggccttcatgagagtgtactgcggccccagccccagctgcctggtgcagagcagcagcctgagcaacgcccacatcgactacaccaccaagcccgccatcatcttcagaatcgccgccagaaacgagaagggctacggccccgccacccaggtgagatggctgcaggagaccagcaaggacagcagcggcaccaagcccgccaacaagagacccatgagcagccccgagatgaagagcgcccccaagaagagcaaggccgacggccagtag

SEQ ID NO: 296478 - protein, 371 aa, Artificial Sequence
  derived and/or modified sequence
MLMASTTSAVPGHPSLPSLPSNSSQERPLDTRDPLLARAELALLSIVFVAVALSNGLVLAALARRGRRGHWAPIHVFIGHLCLADLAVALFQVLPQLAWKATDRFRGPDALCRAVKYLQMVGMYASSYMILAMTLDRHRAICRPMLAYRHGSGAHWNRPVLVAWAFSLLLSLPQLFIFAQRNVEGGSGVTDCWACFAEPWGRRTYVTWIALMVFVAPTLGIAACQVLIFREIHASLVPGPSERPGGRRRGRRTGSPGEGAHVSAAVAKTVRMTLVIVVVYVLCWAPFFLVQLWAAWDPEAPLEGAPFVLLMLLASLNSCTNPWIYASFSSSVSSELRSLLCCARGRTPPSLGPQDESCTTASSSLAKDTSS

SEQ ID NO: 296479 - DNA, 1116 bp, Artificial Sequence
  derived and/or modified sequence
atgctgatggccagcaccaccagcgccgtgcccggccaccccagcctgcccagcctgcccagcaacagcagccaggagagacccctggacaccagagaccccctgctggccagagccgagctggccctgctgagcatcgtgttcgtggccgtggccctgagcaacggcctggtgctggccgccctggccagaagaggcagaagaggccactgggcccccatccacgtgttcatcggccacctgtgcctggccgacctggccgtggccctgttccaggtgctgccccagctggcctggaaggccaccgacagattcagaggccccgacgccctgtgcagagccgtgaagtacctgcagatggtgggcatgtacgccagcagctacatgatcctggccatgaccctggacagacacagagccatctgcagacccatgctggcctacagacacggcagcggcgcccactggaacagacccgtgctggtggcctgggccttcagcctgctgctgagcctgccccagctgttcatcttcgcccagagaaacgtggagggcggcagcggcgtgaccgactgctgggcctgcttcgccgagccctggggcagaagaacctacgtgacctggatcgccctgatggtgttcgtggcccccaccctgggcatcgccgcctgccaggtgctgatcttcagagagatccacgccagcctggtgcccggccccagcgagagacccggcggcagaagaagaggcagaagaaccggcagccccggcgagggcgcccacgtgagcgccgccgtggccaagaccgtgagaatgaccctggtgatcgtggtggtgtacgtgctgtgctgggcccccttcttcctggtgcagctgtgggccgcctgggaccccgaggcccccctggagggcgcccccttcgtgctgctgatgctgctggccagcctgaacagctgcaccaacccctggatctacgccagcttcagcagcagcgtgagcagcgagctgagaagcctgctgtgctgcgccagaggcagaaccccccccagcctgggcccccaggacgagagctgcaccaccgccagcagcagcctggccaaggacaccagcagctag

SEQ ID NO: 296480 - DNA, 1116 bp, Artificial Sequence
  derived and/or modified sequence
atgttaatggcttctacgacttccgcggtgcccggacatccttcccttcctagtttaccaagcaacagtagccaagagcggcctctggacacacgggatccactgttagccagagccgaactcgccctcctctccatcgtgtttgtcgccgtcgctctgagcaacgggctggtgctcgcagccctcgctaggcgtggccgcagggggcactgggcgccaattcatgtttttattggccacctctgccttgccgacctggctgttgcgctgttccaggttttaccccaattggcttggaaggccaccgatcggtttaggggacctgatgctctctgtcgtgcagtaaagtacctgcaaatggtcggcatgtacgcatcctcttacatgatcctcgctatgacactggatcgtcatcgcgcaatatgtaggccaatgctcgcatatcgccatggcagcggcgctcactggaatcgacccgtcctggtcgcatgggccttttcattattgctctccctaccacaactcttcattttcgcgcaacgaaacgtcgaaggggggtctggcgtgactgattgttgggcttgttttgcagaaccgtggggacggcgcacctacgtgacatggattgccctgatggtctttgtggccccgactcttggcatcgcggcatgtcaggtgctcatctttcgagagatccatgcaagtttagtccccggcccttctgaaaggccgggagggcgtaggagaggcaggaggaccggcagccccggagagggggcacacgtgagcgccgccgtggctaaaacagttagaatgacactcgtgattgttgtcgtgtacgttttatgttgggcgccgttcttcttggtacaactttgggccgcctgggaccccgaggccccgctggagggcgctccctttgtcctactcatgctgctggcttcactcaactcctgtaccaatccgtggatctatgcttcattcagtagctccgtgagcagtgaactccgatcattactttgctgtgccagggggcgcactcccccatccctgggcccccaagatgagtcctgtaccaccgctagcagttctctggctaaagatactagttcctag

SEQ ID NO: 296481 - DNA, 1116 bp, Artificial Sequence
  derived and/or modified sequence
atgctgatggccagcaccaccagcgctgtgcccggccaccccagcctgcccagcctgcccagcaacagcagccaggagcggcccctggacacccgggaccccctgctggcccgggcagagctggccctgctgagcatcgtgtttgtggccgtggccctgagcaatggcctggtgctggccgccctggcccggcggggcagaagaggccactgggcccccatccacgtgttcatcggccacctgtgcctggccgacctggccgtggccctcttccaggtgctgccccagctggcctggaaggccacagaccgcttccggggcccagatgccctgtgcagagctgtgaagtacctgcagatggtgggcatgtatgccagcagctacatgatcctggccatgaccctggacagacaccgggccatctgccggcccatgctggcctaccgccacggcagcggggcccactggaacagacctgtgctggtggcctgggccttcagcctgctgctgagcctgccccagctgttcatctttgcccagagaaatgtggagggcggcagcggcgtgacagactgctgggcctgctttgctgagccctggggccgccgcacctacgtgacctggatcgccctgatggtgtttgtggcccccaccctgggcattgctgcctgccaggtgctgatcttccgggagatccacgccagcctggtgcccggccccagcgagaggcctgggggcagaagaagaggaagaagaacaggcagccctggagagggcgcccacgtgtctgctgctgtggccaagacagtgaggatgaccctggtgattgtggtggtgtatgtgctgtgctgggcccccttcttcctggtgcagctgtgggccgcctgggaccctgaggcccccctggagggcgccccctttgtgctgctgatgctgctggccagcctgaacagctgcaccaacccctggatctatgccagcttcagcagctctgtgagcagcgagctgcggagcctgctgtgctgtgcccggggccgcaccccacccagcctgggcccccaggatgagagctgcaccacagccagcagcagcctggccaaggacaccagcagctag

SEQ ID NO: 296482 - DNA, 1116 bp, Artificial Sequence
  derived and/or modified sequence
atgctgatggccagcaccaccagcgccgtgcccggccaccccagcctgccttcactgccgagtaatagcagccaagaacgccctctggacacgagagatcccctgttagctcgagccgagctggcgctgttgagtattgtgttcgtcgctgttgcactctctaatggtcttgtccttgctgccctggcccgaaggggaagaagaggacattgggctcccatccatgtgtttatcggccacctgtgcctggccgatctggctgtggccctctttcaagtcctaccacaactggcgtggaaggcaaccgaccgatttaggggcccggacgccctgtgtcgtgccgtgaaatacttacagatggtgggaatgtacgcttctagttatatgattttggcgatgacgctcgaccggcatcgagccatatgcaggcctatgcttgcatacagacacggaagtggggcccattggaatagacctgtgctggttgcctgggcattcagcctgctgctgtcgttacctcagctgttcatttttgctcagcgtaatgtggaggggggctctggcgtgacagactgttgggcttgttttgcagagccctggggacggcgcacctatgttacatggatagcgctaatggtgttcgtggcgcctacattggggattgctgcctgccaggtcctgatctttagggagattcacgccagtttagtcccaggccctagcgagagacccggtgggcggcgtcgcgggaggcgcaccggatctccgggcgagggggcccacgtttctgccgctgttgctaaaactgtgaggatgaccctcgtgatcgtcgtggtatatgtgctctgttgggctccgttttttttggtgcagttgtgggctgcctgggacccagaagcgcctcttgagggagcacctttcgtgctgctcatgttacttgctagtctcaacagctgcacaaacccatggatctacgcatcatttagcagctccgtatcaagtgagttaagaagccttctgtgttgtgcacggggaagaacgcccccatccttaggtccacaggatgagagctgcaccaccgcttcttctagcctggcaaaggatacgtctagttag

SEQ ID NO: 296483 - DNA, 1763 bp, Artificial Sequence
  derived and/or modified sequence
ttcacgccaccgcccagctgcccaggagcccagccaggactggccatactgccaccgacacgtgcacacacgccaacaggcatctgccatgctggcatctctataagggctccagtccagagaccctgggccattgaacttgctcctcaggcagaggctgagtccgcacatcacctccaggccctcagaacacctgccccagccccaccatgctcatggcgtccaccacttccgctgtgcctgggcatccctctctgcccagcctgcccagcaacagcagccaggagaggccactggacacccgggacccgctgctagcccgggcggagctggcgctgctctccatagtctttgtggctgtggccctgagcaatggcctggtgctggcggccctagctcggcggggccggcggggccactgggcacccatacacgtcttcattggccacttgtgcctggccgacctggccgtggctctgttccaagtgctgccccagctggcctggaaggccaccgaccgcttccgtgggccagatgccctgtgtcgggccgtgaagtatctgcagatggtgggcatgtatgcctcctcctacatgatcctggccatgacgctggaccgccaccgtgccatctgccgtcccatgctggcgtaccgccatggaagtggggctcactggaaccggccggtgctagtggcttgggccttctcgctccttctcagcctgccccagctcttcatcttcgcccagcgcaacgtggaaggtggcagcggggtcactgactgctgggcctgctttgcggagccctggggccgtcgcacctatgtcacctggattgccctgatggtgttcgtggcacctaccctgggtatcgccgcctgccaggtgctcatcttccgggagattcatgccagtctggtgccagggccatcagagaggcctggggggcgccgcaggggacgccggacaggcagccccggtgagggagcccacgtgtcagcagctgtggccaagactgtgaggatgacgctagtgattgtggtcgtctatgtgctgtgctgggcacccttcttcctggtgcagctgtgggccgcgtgggacccggaggcacctctggaaggggcgccctttgtgctactcatgttgctggccagcctcaacagctgcaccaacccctggatctatgcatctttcagcagcagcgtgtcctcagagctgcgaagcttgctctgctgtgcccggggacgcaccccacccagcctgggtccccaagatgagtcctgcaccaccgccagctcctccctggccaaggacacttcatcgtgaggagctgttgggtgtcttgcctctagaggctttgagaagctcagctgccttcctggggctggtcctgggagccactgggagggggacccgtggagaattggccagagcctgtggccccgaggctgggacactgtgtggccctggacaagccacagcccctgcctgggtctccacatccccagctgtatgaggagagcttcaggccccaggactgtgggggcccctcaggtcagctcactgagctgggtgtaggaggggctgcagcagaggcctgaggagtggcaggaaagagggagcaggtgcccccaggtgagacagcggtcccaggggcctgaaaaggaaggaccaggctggggccaggggaccttcctgtctccgcctttctaatccctccctcctcattctctccctaataaaaattggagctcattttccaca

SEQ ID NO: 296484 - DNA, 1116 bp, Artificial Sequence
  derived and/or modified sequence
atgttgatggcatctaccactagcgcagtgccaggccacccaagcctgccatctctaccttcgaactcctcccaggaacggccattggacacacgcgatcccttgctggcccgagccgagctggcactgttgagcattgtatttgtcgccgtagctctgtccaacggtctggtcctggcagccctggcaagacgtgggagaagggggcactgggccccaattcatgtattcatcggacacctgtgtcttgcggatctagcagtggctctcttccaggttctccctcagctggcctggaaggccaccgatcgcttcagagggcctgacgccctgtgtcgtgcagtgaagtacctacagatggtaggaatgtatgccagttcttatatgatattagcaatgactctggatcgtcacagggcgatatgcagacctatgctagcataccgacacggatccggggcacattggaaccggcctgtgctggtggcttgggcgtttagtctactcctatctcttccccaactgttcattttcgcacagcgtaacgtggaaggtggaagtggagtgacagactgttgggcctgctttgccgaaccctggggccgtcgaacctatgtgacgtggattgcgctgatggtgtttgtagctccaactttaggcatagccgcatgtcaggtgcttatcttccgggagatccatgcctctttggtgccgggtccttctgaacgacctggaggacggaggaggggaaggcgcacggggagtccgggagagggagcacacgtgtccgccgctgtagccaagactgtgcgtatgactttggtgatcgtggtggtgtatgtcctgtgctgggcacccttcttcctggtgcagctctgggccgcttgggatcccgaggcaccactggaaggagccccttttgtgttactcatgctcttagcctctttgaactcctgtactaacccctggatttatgcctctttttctagctcagtgtcgagtgaactgcgctcgctgctgtgttgcgcgaggggacgcactcccccttctctcggcccacaggatgagagctgcactactgcaagtagcagtctggccaaggacacctcttcctag

SEQ ID NO: 296485 - DNA, 1116 bp, Artificial Sequence
  derived and/or modified sequence
atgttgatggcttccaccacatctgccgtaccgggacacccttctctgccttctctccccagtaacagttcacaagaacgacccctagacacacgcgatccactgctagcgagggccgaactagccctgctatccattgtttttgtggctgtcgctctcagtaatggactcgtgttggctgcccttgcccggcgcggcaggagaggccactgggctcctatacatgtatttatcggtcatctctgcttggccgatttggccgtggcactttttcaggtcctgccccaactcgcctggaaagctacggacaggttccgcgggcccgatgctctctgtcgggcagtcaaataccttcaaatggtgggtatgtatgccagctcatacatgattctggccatgactttggataggcaccgggctatttgtcgacctatgctcgcctatcgacacggttccggggcgcactggaaccgccctgtactggtggcgtgggcattcagcttgttgctgagtctacctcagctctttattttcgctcagcgcaatgttgaaggcggtagcggcgtgacggactgctgggcgtgctttgcggagccatggggacgacgaacttatgttacatggatcgcgcttatggtctttgttgcgcctactctggggattgccgcgtgccaagtactcatcttccgggagattcatgcctccctggtgccaggtccatccgagaggccaggcggcaggcgccggggacgtaggaccgggagtccaggcgaaggcgctcatgtcagcgccgccgtggctaagacggtgcgcatgaccctggtaatcgtggttgtatatgtcctatgttgggctccattctttctggtgcaactgtgggctgcctgggatcctgaagcgccactcgaaggtgcaccctttgtgctccttatgctgttagcatccctgaattcgtgcaccaacccctggatatatgcctccttcagtagctccgttagttctgagcttcggagtctcttgtgctgcgcccgcggacggacaccaccctcactcgggccacaggacgaatcctgtactacagcttcgtcatccttagcaaaagacacgtccagttag

SEQ ID NO: 296486 - DNA, 1116 bp, Artificial Sequence
  derived and/or modified sequence
atgctgatggctagtacaacatccgccgttcccggccacccttctctgcctagtctaccatcgaattcatcacaagagcgtccactggacacccgcgaccccctgttagccagagccgagttggctctcctgtccattgtgttcgtggccgtggctctgtccaacggcctcgtgctggcagccctggcacggcgcggtaggcggggacattgggctccgatacacgtttttatcggccatctctgcctggctgatttagccgtggctcttttccaggtcctgccgcagttggcttggaaggctacagacagatttagaggtcctgatgccttgtgtcgcgctgtgaaatacctgcagatggtaggaatgtatgcctccagctatatgatattagcgatgacgctcgatcgacatcgcgctatctgccggcctatgctcgcttatcgccacgggagtggcgcacattggaatcggccagtgttggttgcctgggccttctcactcctcctatcacttccacagcttttcatttttgctcagaggaacgtcgaaggcggttccggggtgaccgattgctgggcttgctttgcggagccctggggtcggcgcacgtacgtcacatggatcgcgctgatggtgtttgtggcaccaaccctggggatcgccgcatgtcaagtcctgatttttcgcgagatccacgcaagtctcgtgcccgggcccagtgagcggcccggcggtcggagacgtggcagacggacgggtagtcctggggaaggcgcccacgtgtctgctgcagtggctaaaacagttcggatgacattggtcatcgtcgtggtttatgtcttgtgctgggctccattcttcctcgtccagctgtgggcggcttgggaccccgaagcgccccttgagggcgccccctttgtgctcctgatgctgcttgcgagtctgaactcttgtaccaatccctggatttatgcttcattctcctccagcgtgtcaagcgagcttcgcagcctcctttgttgcgcgagaggcagaacgccccccagcctgggccctcaagacgaaagctgtactactgccagttctagcctggccaaagacacctcatcttag

SEQ ID NO: 296487 - DNA, 1116 bp, Artificial Sequence
  derived and/or modified sequence
atgctgatggccagcaccaccagcgccgtgcccggccaccccagcctgcctagtttacctagcaatagttcacaggagcgccctctcgacacccgcgatccactgctcgcacgagcagagcttgccctcctgtcaatcgtgtttgtggccgtcgctctttctaacggtctggtgctggcggccctggcccgcagaggacgccgcggccactgggcaccaattcacgtattcattggccacctctgcctcgctgatctggccgtcgcattatttcaagttctgccccagttagcatggaaggccacggatcgcttccgcgggcctgacgccctgtgccgcgccgtgaaatatttgcagatggtgggtatgtacgctagttcctacatgatcttggctatgacactagaccgccaccgagctatttgcagacctatgcttgcctacaggcatgggtccggcgcccactggaaccgccccgtgctggtcgcctgggcattcagtctcctgttgagcctgcctcagctgttcatctttgcccaaagaaatgtcgagggaggttctggtgttactgactgttgggcctgttttgcggaaccctgggggcggcgtacttacgtgacatggatagccctcatggtctttgtggctcctacgcttggcatcgctgcatgccaggtgttgatttttagagaaatccacgcttctctggtccccggcccaagcgagcgacctgggggtcgtcgcaggggcagaagaaccggcagccctggtgaaggggcacacgtctcggcggcagtcgcgaagactgtccggatgacactggtgatcgtggtcgtgtatgtgctgtgctgggctccattttttttggttcagctttgggcggcatgggatcctgaggcccccctagagggggcaccttttgtgctcctgatgctgctagcgagcctgaacagttgcaccaacccttggatttacgcttccttttcatcaagcgtgtcatctgagctgagaagtctattgtgttgtgcccgtgggcggaccccacccagcctggggccccaggacgagagctgtacaacggccagtagctccttggccaaggatacaagctcatag

SEQ ID NO: 296488 - DNA, 1116 bp, Artificial Sequence
  derived and/or modified sequence
atgctgatggccagcaccaccagcgccgtgcccggccaccccagcttgccatccctgccttctaactcatcgcaagaacgccctctggacacaagagatcctctgcttgctcgcgcagaactggcattgctttccattgtgttcgtggctgtggcactatcaaacggccttgtgctagctgccttggcccgccggggaaggcggggccactgggcacctattcacgtgtttatcggccatctttgcctcgcggacttagccgtagctctctttcaggttcttcctcagctcgcctggaaggcaactgatcgatttagagggcccgacgccctctgtagagcggtgaaatacctgcagatggtgggaatgtacgcatcctcctatatgatcctggctatgaccctcgataggcacagggccatttgtagaccaatgttggcatatcggcatggaagcggcgcgcattggaaccggcccgtcttggttgcttgggccttttccctgctgctcagcttaccccaactctttatcttcgcgcagcgcaatgtggaaggcggcagcggtgtcactgactgctgggcatgcttcgcagagccttggggaaggcgaacttacgtgacctggattgcgttgatggtattcgtggctccaactttaggcatagccgcatgccaggtcctgatttttcgggaaatacacgcatctttagtgcccgggccatcagagaggccaggcggtagacgtcgcgggcgccggaccggttcacctggcgagggcgctcatgtcagcgcagcagttgccaagaccgttagaatgactctagttatcgttgtcgtgtacgtgctatgttgggctcccttctttctggtacagctgtgggccgcctgggaccccgaggcccctctcgagggagccccctttgtcctcctgatgctcctggcatctctgaactcatgcacgaacccttggatctatgctagctttagtagctctgtgtctagcgaactcagaagtcttctatgttgtgcgcgcgggagaactcccccgtcgctcggtccacaggacgaatcgtgcactacggcttccagctctctggcaaaggacactagctcttag

SEQ ID NO: 296489 - DNA, 1116 bp, Artificial Sequence
  derived and/or modified sequence
atgctcatggcatcaacaaccagtgccgtgcccggacaccctagcctcccgtcactcccgagcaattcttctcaggagcggccactagataccagggatcctctccttgccagggcggagctcgcgctgttgtctatcgttttcgtcgccgtcgccttaagcaatggactcgtgttagccgctctcgccaggagaggtagacgcggacactgggcaccaattcatgttttcattgggcacctgtgccttgctgacctcgccgtcgcacttttccaggttttgcctcagctggcttggaaggccaccgacaggtttcggggtccggatgctctgtgtcgcgcagtgaaatacctgcaaatggtcggaatgtacgcttcctcatacatgatcctggcaatgacactcgataggcaccgggctatttgtcggccaatgttggcatatcgtcatggttccggcgcacattggaatagacccgttttggtggcatgggccttttcgctcctgctgagcctcccccagctttttatcttcgctcagagaaatgtcgagggaggctccggggtcaccgactgctgggcctgctttgcagaaccctggggcagacggacatacgtgacgtggattgccctgatggttttcgtcgcccctaccctaggcattgctgcttgtcaggtcttgattttccgggaaattcacgcctccctcgtgcctggcccttccgagaggccaggagggagaagaaggggacgcagaactgggtccccgggtgagggcgctcacgtcagtgcagccgtagccaagacagttcggatgacactcgttatagttgtggtgtacgtgctgtgctgggcaccattcttcctcgttcaactgtgggccgcatgggatcctgaggcgccactcgagggggctccattcgtgctgctgatgctcttggcttcattaaattcttgcacaaacccgtggatctacgcttctttttcctcatccgttagctctgaactccggtccttgctctgttgcgcaagaggcaggactcccccatcacttgggcctcaggacgaaagttgtacaactgcatctagctccctggcgaaggatacttcctcttag

SEQ ID NO: 296490 - DNA, 1116 bp, Artificial Sequence
  derived and/or modified sequence
atgttgatggcctcaactacctcagctgtgcctggacacccaagccttccaagtctgccaagtaattcatcgcaggaaaggccattggacacacgggatcccctcctggctcgcgctgagttggcccttttgtctatcgtgttcgtggcagtcgcgctttccaacggactggtcctggctgcactcgcgagacggggtagaagagggcactgggcccctatccacgtctttatagggcacctgtgccttgccgacctggccgtggccctctttcaagtgctgccccagctggcctggaaggccacagatcgctttagaggtcctgatgctctctgccgggctgtgaagtatctccagatggtgggtatgtacgcctcctcgtacatgatcctcgctatgactctggatagacacagagctatctgccgcccaatgctcgcctatcgacatggatctggagcccattggaataggccagtacttgtcgcatgggcattctctctgttgctctccttgccccagctttttattttcgcccagcggaacgtcgagggagggagcggcgttacggactgctgggcatgttttgcagagccttggggaaggagaacttacgtcacctggatcgcactgatggtgttcgtggcgcctaccttaggcattgcagcttgccaggtgttaatctttcgagaaatccacgcctccctcgtgcccggtccctctgaacggcctggaggccgaaggcggggacgaaggacagggtcaccaggcgagggggcacacgtgtcagcggcagtggctaagacagtgagaatgacacttgtaatcgttgtggtatatgtgctctgttgggctccatttttcttggtccagctctgggcagcatgggatcctgaggccccactggaaggggcacccttcgtcctcttgatgctgctagcttcactgaactcttgcaccaatccctggatctatgcgagcttttcgtcaagcgtttcttctgagctaaggagccttctgtgctgcgccagaggcagaacccccccatctctgggtccgcaagatgagtcatgtaccactgcgtctagttctctggccaaggacaccagttcttag

SEQ ID NO: 296491 - DNA, 1622 bp, Artificial Sequence
  derived and/or modified sequence
cttgctcctcaggcagaggctgagtccgcacatcacctccaggccctcagaacacctgccccagccccaccatgctcatggcgtccaccacttccgctgtgcctgggcatccctctctgcccagcctgcccagcaacagcagccaggagaggccactggacacccgggacccgctgctagcccgggcggagctggcgctgctctccatagtctttgtggctgtggccctgagcaatggcctggtgctggcggccctagctcggcggggccggcggggccactgggcacccatacacgtcttcattggccacttgtgcctggccgacctggccgtggctctgttccaagtgctgccccagctggcctggaaggccaccgaccgcttccgtgggccagatgccctgtgtcgggccgtgaagtatctgcagatggtgggcatgtatgcctcctcctacatgatcctggccatgacgctggaccgccaccgtgccatctgccgtcccatgctggcgtaccgccatggaagtggggctcactggaaccggccggtgctagtggcttgggccttctcgctccttctcagcctgccccagctcttcatcttcgcccagcgcaacgtggaaggtggcagcggggtcactgactgctgggcctgctttgcggagccctggggccgtcgcacctatgtcacctggattgccctgatggtgttcgtggcacctaccctgggtatcgccgcctgccaggtgctcatcttccgggagattcatgccagtctggtgccagggccatcagagaggcctggggggcgccgcaggggacgccggacaggcagccccggtgagggagcccacgtgtcagcagctgtggccaagactgtgaggatgacgctagtgattgtggtcgtctatgtgctgtgctgggcacccttcttcctggtgcagctgtgggccgcgtgggacccggaggcacctctggaaggggcgccctttgtgctactcatgttgctggccagcctcaacagctgcaccaacccctggatctatgcatctttcagcagcagcgtgtcctcagagctgcgaagcttgctctgctgtgcccggggacgcaccccacccagcctgggtccccaagatgagtcctgcaccaccgccagctcctccctggccaaggacacttcatcgtgaggagctgttgggtgtcttgcctctagaggctttgagaagctcagctgccttcctggggctggtcctgggagccactgggagggggacccgtggagaattggccagagcctgtggccccgaggctgggacactgtgtggccctggacaagccacagcccctgcctgggtctccacatccccagctgtatgaggagagcttcaggccccaggactgtgggggcccctcaggtcagctcactgagctgggtgtaggaggggctgcagcagaggcctgaggagtggcaggaaagagggagcaggtgcccccaggtgagacagcggtcccaggggcctgaaaaggaaggaccaggctggggccaggggaccttcctgtctccgcctttctaatccctccctcctcattctctccctaataaaaattggagctcattttcc

SEQ ID NO: 296492 - DNA, 492 bp, Artificial Sequence
  derived and/or modified sequence
atgcagagcgtggacagcatgctgggcaccgtgggcggctgcggcggcggcgaggccgccagcaccttcagcaaggaccccagcggctgctgcgtgggcaacgactgcagagacggcggcagaggcctggagagaagacacggcagatggagcagaggcgagggcggcgagagcggcctgtgcagcggcggccagatggccagcgagatcgagtactgggacggcctggccatcagcgtgatggaggtggagaaggccttcggcagcaccaacgtgctgtggaagaccgagcccttcagcctgtgggcctgcaccgccgcctgcccccccagcctgagccccaccctgctggccctgggcctgcccagagacggcaaggagctggccgagcagggcagcctgtggaccgtgctggagcccggcggcgactggagccacagccagagccagctgggcacccccggcagaggcaagggcgccctgggcttctag

SEQ ID NO: 296493 - DNA, 4198 bp, Artificial Sequence
  derived and/or modified sequence
ggaagggcagccgtctgccgcccacgaacaccttctcaagcactttgagtgaccacggcttgcaagctggtggctggccccccgagtcccgggctctgaggcacggccgtcgacttaagcgttgcatcctgttacctggagaccctctgagctctcacctgctacttctgccgctgcttctgcacagagcccgggcgaggacccctccaggatgcaggtcccgaacagcaccggcccggacaacgcgacgctgcagatgctgcggaacccggcgatcgcggtggccctgcccgtggtgtactcgctggtggcggcggtcagcatcccgggcaacctcttctctctgtgggtgctgtgccggcgcatggggcccagatccccgtcggtcatcttcatgatcaacctgagcgtcacggacctgatgctggccagcgtgttgcctttccaaatctactaccattgcaaccgccaccactgggtattcggggtgctgctttgcaacgtggtgaccgtggccttttacgcaaacatgtattccagcatcctcaccatgacctgtatcagcgtggagcgcttcctgggggtcctgtacccgctcagctccaagcgctggcgccgccgtcgttacgcggtggccgcgtgtgcagggacctggctgctgctcctgaccgccctgtccccgctggcgcgcaccgatctcacctacccggtgcacgccctgggcatcatcacctgcttcgacgtcctcaagtggacgatgctccccagcgtggccatgtgggccgtgttcctcttcaccatcttcatcctgctgttcctcatcccgttcgtgatcaccgtggcttgttacacggccaccatcctcaagctgttgcgcacggaggaggcgcacggccgggagcagcggaggcgcgcggtgggcctggccgcggtggtcttgctggcctttgtcacctgcttcgcccccaacaacttcgtgctcctggcgcacatcgtgagccgcctgttctacggcaagagctactaccacgtgtacaagctcacgctgtgtctcagctgcctcaacaactgtctggacccgtttgtttattactttgcgtcccgggaattccagctgcgcctgcgggaatatttgggctgccgccgggtgcccagagacaccctggacacgcgccgcgagagcctcttctccgccaggaccacgtccgtgcgctccgaggccggtgcgcaccctgaagggatggagggagccaccaggcccggcctccagaggcaggagagtgtgttctgagtcccgggggcgcagcttggagagccgggggcgcagcttggagatccaggggcgcatggagaggccacggtgccagaggttcagggagaacagctgcgttgctcccaggcactgcagaggcccggtggggaagggtctccaggctttattcctcccaggcactgcagaggcaccggtgaggaagggtctccaggcttcactcagggtagagaaacaagcaaagcccagcagcgcacagggtgcttgttatcctgcagagggtgcctctgcctctctgtgtcaggggacagcttgtgtcaccacgcccggctaatttttgtattttttttagtagagctgggctgtcacccccgagctccttagacactcctcacacctgtccatacccgagggtggatattcaaccagccccaccgcctacccgactcggtttctggatatcctccgtgggcgaactgcgagccccattcccagctcttctccctgctgacatcgtcccttagttgtggttctggccttctccattctcctccaggggttctggtctccgtagcccggtgcacgccgaaatttctgtttatttcactcaggggcactgtggttgctgtggttggaattcttctttcagaggagcgcctggggctcctgcaagtcagctactctccgtgcccacttccccccacacacacaccccaccctgttgctgaccaaggtgatttttggcacatttgttctggcctggcttggtgggaccccacccctattctgcttctgtgagtccctgatagagaaggaggtcccatcaggcccctggaacacactcaggcttccctgactcaggacaaggaccacgggaggcccaggtgcggaaaggaggctccgtgagatggggtccagcccatcccaacacaagggtgcagcttgattcgggagttccccacctcctgcccattctccgcgtccttttaccccatggagagcctcagccatggcaagtccatctggagtccaggaagcaggcaactggcctgacccatgagaccgtttggagaccaagcagcagatgcaggtgtggaccccaggaacctacaggggtgtcagccgctgagccccctccctgctgtgtgggtggtgagcaggctgggtctttgtctgtcttcttctacacggcatgtgcctgcaccagccccaacacctgagctggtttagcgcaaagaagagctctgactctccaggggtgctgggacatcacgtggaattggatcccaggctctcttgggcgagaaagaccattctggaggtgggagtgggagagctgcctgtctgcccacgggctctgcgtctccgcagtgggtggccttggatgcccggcccctccctttctgtgcactggggacgctgatggaggctgaagctgctgttcggaggccctctattggtgcctctctcctgccgtcatcactatggcaggaaaacagagatggtttagtaatgaattatcattcccaaacccgtgtccacctggaacatcaggatgggaccatgtttgaaaatcgggtctttccaaatgtaattaagtaaggcgaggccatactgcatttacaatgggcccaatccagtgtccctatgagagacggaagaggagacacagacacaaagcaggaggccacataaagacagaggcagagactgaagtgatgctgccccaagcccagggatgcctggagtccccaggagctgggagaggcaggaaggaccctcccctagagtctctggagggaactggatacaattgcagagtgcactaaacagttgccccagaaagacatgtcttgttttaaagcccagaacctgaaattattatagattttattcggtaataaggaactttgcatgtgtaattacttaaggatatgaagatgagattgtgctggattattaagcaccctaaatgccatgacaggtgtccttccaagagacagaagaggagacacagacacagagcaggaggacacgtggagacagaggcagactggagtgatgcggccacaagcccagggacacctggagcccccaggagctgggagaggcaggaaggatcctcccctagagcctccagggggaactggaggatgcgtaagagacccagaacttccacagaaggaggaaaattaacctcctgcttctctagactgttccaaagctgaaccctagaaagcaaagctgatacagaagcatccaggctgcaggagtacaggtcgcaagtgctgagcgtgggccttgggtgtgtctcatgggggaaaaaaaactgtgaaaaacctcagagtagcatcttcacagtaacgcacggacgatccctaaactgccttgtaaacaaaaatgagagcttgagtcagaggaagccgagacaatatccttcctcgacaacgtgcgagaaccctgacgtcccccagcaaaggaagacgttgcaagcaggcaaaatgcgtcgattttttttttttgtcagtatgatgatttttgcagccacttggctatggagagcagccgacaccccctcttacagccgtggatgtttcctggaagctgactcagtctgttcactggttgagctttgagtgaaaagataacacaggtctattgactcacacacatgttttaagatggaaaactttacttctgttcttggcaggacatggagagagggagggattccaaaaagtctcagcctccatcaaggcgtggcagctcatgccggtaatctcagcactttgggaggctcaggcgggaggactgattgagtccgggtgttcaagggccaacctaggcaacacagtgagaactcatctctgtaaaaaataaaaataaaacattaaaaaaaaacatgagctttgaagtgcacagggcaaa

SEQ ID NO: 296494 - protein, 801 aa, Artificial Sequence
  derived and/or modified sequence
MDEDEFELQPQEPNSFFDGIGADATHMDGDQIVVEIQEAVFVSNIVDSDITVHNFVPDDPDSVVIQDVVEDVVIEEDVQCSDILEEADVSENVIIPEQVLDSDVTEEVSLPHCTVPDDVLASDITSTSMSMPEHVLTSESMHVCDIGHVEHMVHDSVVEAEIITDPLTSDIVSEEVLVADCAPEAVIDASGISVDQQDNDKASCEDYLMISLDDAGKIEHDGSTGVTIDAESEMDPCKVDSTCPEVIKVYIFKADPGEDDLGGTVDIVESEPENDHGVELLDQNSSIRVPREKMVYMTVNDSQQEDEDLNVAEIADEVYMEVIVGEEDAAVAAAAAAVHEQQIDEDEMKTFVPIAWAAAYGNNSDGIENRNGTASALLHIDESAGLGRLAKQKPKKKRRPDSRQYQTAIIIGPDGHPLTVYPCMICGKKFKSRGFLKRHMKNHPEHLAKKKYHCTDCDYTTNKKISLHNHLESHKLTSKAEKAIECDECGKHFSHAGALFTHKMVHKEKGANKMHKCKFCEYETAEQGLLNRHLLAVHSKNFPHICVECGKGFRHPSELRKHMRIHTGEKPYQCQYCEYRSADSSNLKTHIKTKHSKEMPFKCDICLLTFSDTKEVQQHTLVHQESKTHQCLHCDHKSSNSSDLKRHVISVHTKDYPHKCEMCEKGFHRPSELKKHVAVHKGKKMHQCRHCDFKIADPFVLSRHILSVHTKDLPFRCKRCRKGFRQQNELKKHMKTHSGRKVYQCEYCEYSTTDASGFKRHVISIHTKDYPHRCEYCKKGFRRPSEKNQHIMRHHKEVGLP

SEQ ID NO: 296495 - DNA, 5259 bp, Artificial Sequence
  derived and/or modified sequence
gcctagtgcgcgcgcagtaacctgtttgtggcctggtcggcgtcccgtagggcgccctcccgcgctaggccggccggcgtggcgctcggcgccgaacaggccccgaggaggccgcagttaggcctagtgattatccagttgccctgagcggctgcggaggtgcgctccataagcgggcagggtgggaaaagttcgcccgtttgtccggaaggcagttgatggacctggggtcgacaccactgcggacgcagggcacggcacgggggcgagaaggcgaaggctgcaggcgtgaggagctgtgactaatgagaattaaaggccatggatgaagatgaatttgaattgcagccacaagagccaaactcattttttgatggaataggagctgatgctacacacatggatggtgatcagattgttgtggaaatacaagaagcagtttttgtttctaatattgtggattctgacataactgtgcataactttgttcctgatgacccagactcagttgtaatccaagatgttgttgaagatgttgtcatagaggaggatgttcagtgctcagatatcttagaagaggcagatgtatctgaaaatgtcatcattcctgagcaagtgctggactcagatgtaactgaagaagtttctttaccacactgcacagtcccagatgatgttttagcttctgacattacttcaacctcaatgtctatgccagaacatgttttaacgagtgaatccatgcatgtgtgtgacattggacatgttgaacatatggtgcatgatagtgtagtggaagcagaaatcattactgatcctctgacgagtgacatagtttcagaagaagtattggtagcagactgtgcccctgaagcagtcatagatgccagcgggatctcagtggaccagcaagataatgacaaagccagctgtgaggactacctaatgatttcgttggatgatgctggcaaaatagaacatgatggttccactggagtgaccatcgatgcagaatcagaaatggatccttgtaaagtggatagcacttgtcctgaagtcatcaaggtgtacatttttaaagctgaccctggagaagatgacttaggtggaactgtagacattgtggagagtgaacctgaaaatgatcatggagttgaactacttgatcagaacagcagtattcgtgttcccagggaaaagatggtttatatgactgtcaatgactctcaacaagaagatgaagatttaaatgttgctgaaattgctgatgaagtttatatggaagtgatcgtaggagaggaggatgctgctgttgcagcagcagcagctgctgtgcatgagcagcaaattgatgaggatgaaatgaaaaccttcgtaccaattgcatgggcagcagcttatggtaataattctgatggaattgaaaaccggaatggcactgcaagtgccctcttgcacatagatgagtctgctggccttggcagactggctaaacagaaaccaaagaaaaagagaagacctgattccaggcagtaccaaacagcaataattattggccctgatggtcatcctttgactgtctatccttgcatgatttgtgggaagaagtttaagtcgaggggttttttgaaaagacacatgaaaaaccatcctgaacaccttgccaagaagaagtaccactgtactgactgtgattacactaccaataagaagataagtttacataaccacctggagagccacaagctgaccagcaaggcagagaaggccattgaatgtgatgagtgtgggaagcatttttctcatgcaggggctttgtttactcacaaaatggtgcataaggaaaaaggggccaacaaaatgcacaagtgtaaattctgtgaatatgagacagctgaacaggggttattgaatcgccacctcttggcagtccacagcaagaactttcctcatatttgtgtggagtgtggtaaaggtttccgacacccgtcggaactgagaaagcacatgcgaatccataccggcgagaagccataccaatgccagtactgtgaatataggtctgcagactcttctaacttgaaaacacatataaaaacaaagcatagtaaagagatgccattcaagtgtgacatttgtcttctgactttctcagataccaaagaagtgcagcaacatactcttgtccaccaagaaagcaaaacacatcagtgtttgcattgcgaccacaagagttcaaactcaagtgatttgaaacgacatgtaatttcagttcatacgaaagactatcctcataagtgtgagatgtgcgagaaaggctttcacaggccttcagaacttaagaaacatgtggctgtccacaaaggtaaaaaaatgcaccaatgtagacattgtgactttaagattgcagacccatttgttctaagtcgccatattctctcagttcacacaaaggatcttccatttaggtgtaagagatgtagaaagggatttaggcaacaaaatgagcttaaaaagcatatgaagacacacagtggcaggaaagtatatcagtgtgagtactgtgagtatagcactacagatgcctcaggctttaaacggcacgttatttccattcatacaaaagactatcctcatcggtgtgagtactgcaagaaaggcttccgaagaccttcagaaaagaaccagcacataatgagacaccataaagaagttggtctgccctaacagtgtgtctacaagcttgtaaagatgttggccttgaagcagaaaattcattttttaaagccagtcttgttcacatccattactatacattgaattatgctgtgtaaaaatagaattattgcttctagtccacttttctttacattttattcaatacgctgtcctgaatcctattcagtttctttaatagatgaggaaaaatagcaacaagcaagttgcttataataaaataatttgtgattctatactgaattttcagtcataaaagctttactatttatttacatatttattcatgttcatggtactcttctaagacaaaatcagattgataactatgaaagtaacatttttgacccatttcctcctacacaagtgtttcacattggagacatctgctaatataaatgggaggttttactgtcaagtccaattagcaaaacgtggtaataatttttttgtcagtattttcagattacatgataaaattttacatttgagcttctagcattgattaatataggatattgaccacgtttatgtttaaatttcattttgttcagcagacaaaatgtacttcccttaactttcattaatagtgtttacatcttttgtcagcacagcaaacttttagaaagtaatagttttacttatttttatcttctgttttctctttgtactgctttgtcttgcattgtgttccaacacatgagacttactgctcactgaattttggagtcttttagaggtaaattgtggactcaggattttttgaaacttggtgtgtaactctaaatcttgtatatgcatctttgttgcttattacatatttacacacacaaccacaaattttaaacttatgatgaaaatttacaataacctgaaagatccagagatgtatgagagcattttgtaacttgttattcagttactaaatttgaggtgaataattaaaaagaaaaggacattaggagagtgaaaatcttctcttcaaataatctttgatagataaaaatggaaggtaagatgtttctagatagaatgttttcatacaatttcagcttcatatcataaatttttctggaaagctatttcagacatagatttcatagtatttttctgagaatcctgtgaaggaacgctgtctctttgcaaagtaaggaggactaagggaaaatgatggtaccatgtaacagaatgagagctaattccaaattagcaacttcatcctgctttctattttacattgagtaaagttttaaaaagacaacagtcaagttgattttgattagaagataaaagtacataatgaaaatccatggccttatttggaatatatatcactttccaaattttattatttatttgagagttaataagttaatgttattaagcagttaataatttatatgtatggatataatataaaatgaattcatataattaaaaagaatttggttaataagaatttggagaatggaaaatacatttttaggttccttaatttggctgttggtacctgtgtatttggaatattttaggggattcgaattttttttaacccacattacagctaccttctagctttagtatggtagtgcttcattcaacttttgctgtcaggtttttattttcacctttttctgtgccaccaattcaaaagttataggattaggaaatataaatttatatttggtgattggcagcctctgaaatgttagattaatttgatctagttctaaagtgctttagtcatatatgaatttaaacctagtaccatccaaaaccatgtaatggattttaagaatctgttaggccttcttagcctttatacatgtccctacctgatttttactgtccttcatgatcctgttcttgaaaacttcagtttgtatttgagaatcctttaaatctccttccaatttgttttctccctgaagtaatataaaaggaagtatttaagtgaaagtttaagagttttaaaacattctttaaaattaatacagatagttagctatttatcttttaaaaataaactaaggtaaaaaacgtgacactttacatatttcatatttttcatatagtctggaggtatacacagttgttttgtttttaaccacggtattgaaacctttaaaaggtaattaagcatttggtcaagtaaatatagaacatttgtataaagaaagaaatgaaattgtgcttaatgttatatactgttattatttgcaggctggttttaattcttaatttgattagcaaagctaaaaaagtggatgttgaagttgaaagttttaaagaggtacaaaatcttacaaggacataaattattatttggttgaaaaatagcctattagatattgtatgtcccttcctctgtacaaattgtaaaatacttaaaataactatgaagaattcatataggaagtgtgatactattgtaaatgtgtatttgagaatatgcaaaaataaaaataatattttactgttaataaatgtttacttgtatatgaaaaaaaaaaaaaaaaaaaa

SEQ ID NO: 296496 - DNA, 2406 bp, Artificial Sequence
  derived and/or modified sequence
atggacgaggacgagttcgagctgcagccccaggagcccaacagcttcttcgacggcatcggcgccgacgccacccacatggacggcgaccagatcgtggtggagatccaggaggccgtgttcgtgagcaacatcgtggacagcgacatcaccgtgcacaacttcgtgcccgacgaccccgacagcgtggtgatccaggacgtggtggaggacgtggtgatcgaggaggacgtgcagtgcagcgacatcctggaggaggccgacgtgagcgagaacgtgatcatccccgagcaggtgctggacagcgacgtgaccgaggaggtgagcctgccccactgcaccgtgcccgacgacgtgctggccagcgacatcaccagcaccagcatgagcatgcccgagcacgtgctgaccagcgagagcatgcacgtgtgcgacatcggccacgtggagcacatggtgcacgacagcgtggtggaggccgagatcatcaccgaccccctgaccagcgacatcgtgagcgaggaggtgctggtggccgactgcgcccccgaggccgtgatcgacgccagcggcatcagcgtggaccagcaggacaacgacaaggccagctgcgaggactacctgatgatcagcctggacgacgccggcaagatcgagcacgacggcagcaccggcgtgaccatcgacgccgagagcgagatggacccctgcaaggtggacagcacctgccccgaggtgatcaaggtgtacatcttcaaggccgaccccggcgaggacgacctgggcggcaccgtggacatcgtggagagcgagcccgagaacgaccacggcgtggagctgctggaccagaacagcagcatcagagtgcccagagagaagatggtgtacatgaccgtgaacgacagccagcaggaggacgaggacctgaacgtggccgagatcgccgacgaggtgtacatggaggtgatcgtgggcgaggaggacgccgccgtggccgccgccgccgccgccgtgcacgagcagcagatcgacgaggacgagatgaagaccttcgtgcccatcgcctgggccgccgcctacggcaacaacagcgacggcatcgagaacagaaacggcaccgccagcgccctgctgcacatcgacgagagcgccggcctgggcagactggccaagcagaagcccaagaagaagagaagacccgacagcagacagtaccagaccgccatcatcatcggccccgacggccaccccctgaccgtgtacccctgcatgatctgcggcaagaagttcaagagcagaggcttcctgaagagacacatgaagaaccaccccgagcacctggccaagaagaagtaccactgcaccgactgcgactacaccaccaacaagaagatcagcctgcacaaccacctggagagccacaagctgaccagcaaggccgagaaggccatcgagtgcgacgagtgcggcaagcacttcagccacgccggcgccctgttcacccacaagatggtgcacaaggagaagggcgccaacaagatgcacaagtgcaagttctgcgagtacgagaccgccgagcagggcctgctgaacagacacctgctggccgtgcacagcaagaacttcccccacatctgcgtggagtgcggcaagggcttcagacaccccagcgagctgagaaagcacatgagaatccacaccggcgagaagccctaccagtgccagtactgcgagtacagaagcgccgacagcagcaacctgaagacccacatcaagaccaagcacagcaaggagatgcccttcaagtgcgacatctgcctgctgaccttcagcgacaccaaggaggtgcagcagcacaccctggtgcaccaggagagcaagacccaccagtgcctgcactgcgaccacaagagcagcaacagcagcgacctgaagagacacgtgatcagcgtgcacaccaaggactacccccacaagtgcgagatgtgcgagaagggcttccacagacccagcgagctgaagaagcacgtggccgtgcacaagggcaagaagatgcaccagtgcagacactgcgacttcaagatcgccgaccccttcgtgctgagcagacacatcctgagcgtgcacaccaaggacctgcccttcagatgcaagagatgcagaaagggcttcagacagcagaacgagctgaagaagcacatgaagacccacagcggcagaaaggtgtaccagtgcgagtactgcgagtacagcaccaccgacgccagcggcttcaagagacacgtgatcagcatccacaccaaggactacccccacagatgcgagtactgcaagaagggcttcagaagacccagcgagaagaaccagcacatcatgagacaccacaaggaggtgggcctgccctag

SEQ ID NO: 296497 - DNA, 2406 bp, Artificial Sequence
  derived and/or modified sequence
atggacgaagatgagttcgagcttcaaccacaggaacccaactcattctttgatggtataggtgctgatgccacgcacatggatggcgatcaaatcgttgtcgaaattcaggaggccgttttcgtctcgaatatcgttgatagtgatatcaccgtgcacaacttcgtgcccgacgaccctgattccgtcgtgatacaggatgtggtggaagatgtcgtgatcgaagaagatgtacaatgctctgatatcctggaagaggccgatgtgagcgagaacgtcataattcccgagcaagtcttggacagcgacgtgactgaggaagtctctctcccacactgcactgttccagacgatgtcttggcaagcgatattacaagcacgagcatgtccatgcccgagcacgtacttacttccgagagcatgcacgtatgtgacataggacatgtcgagcacatggtgcacgatagcgtcgtggaagccgagattatcacagacccccttacttctgatattgtgtctgaggaagtgcttgtcgccgactgcgcacctgaagcagtgatcgacgcaagtgggatctccgtagaccagcaggataacgacaaagcctcctgcgaggactacctgatgatctcgctggatgacgctggaaagatcgagcatgacgggtctacaggagtgaccatcgatgctgagtccgaaatggacccctgcaaggtcgatagcacctgtcctgaggttatcaaagtgtacatctttaaggcagatccaggtgaggatgatctgggcggaacggtcgacatcgttgagtccgagccagagaatgatcatggcgtggaactgctcgaccagaattctagcattagggtgcccagggagaagatggtctacatgacggtgaatgacagtcagcaggaggacgaagacctgaacgtggctgagatagcagatgaagtgtacatggaagtgattgtcggtgaggaagacgcagccgtagccgcagctgcagctgccgtgcacgagcagcagattgacgaagatgaaatgaaaacattcgtcccaatcgcgtgggcagctgcgtacggaaacaatagtgatggaatcgagaaccggaacggaaccgcaagcgccctattacatattgatgaatcagccggcttgggcaggctggctaaacagaagccaaagaaaaagagacgacctgatagtcgccagtaccagaccgctattatcattggcccagatggccaccccctgaccgtgtacccttgtatgatctgcggaaagaaattcaagtcacgagggttcttaaagaggcacatgaaaaaccatccagaacatctggcgaagaagaaataccactgtacagactgcgattataccaccaacaaaaaaatcagccttcacaatcatttggagtctcacaagctcacctctaaagccgaaaaagctatcgaatgcgacgaatgcggcaaacacttcagtcacgccggagctctgttcacccacaagatggtacacaaagagaagggagcaaataagatgcacaaatgtaaattttgtgaatatgaaactgccgagcagggcctgctgaatagacacctgctcgcagtccactccaagaattttccacacatctgcgtggaatgcgggaagggcttcaggcaccctagcgaactaagaaaacacatgcgcatccataccggtgagaagccctatcaatgtcagtattgtgagtacaggtcggcagactcctcaaatctgaagacacatatcaagacaaagcacagcaaggaaatgccctttaaatgtgatatctgtctcctgaccttttctgacacaaaggaggtccagcagcacacgttagtgcaccaggaaagcaaaacccaccagtgtttacactgcgaccataagtccagtaactcctctgaccttaaaagacatgttatctcagttcatactaaggactacccacataaatgcgaaatgtgtgaaaaaggatttcatagaccctctgaactgaagaaacatgtggccgtgcacaaggggaaaaagatgcaccaatgtaggcactgtgatttcaagatcgcggacccttttgtgctgtctcgccatattctgagtgttcataccaaagacttgccattcaggtgcaagcgatgtcgcaagggctttcgccaacaaaatgaacttaagaagcatatgaagacccactccggcagaaaggtgtatcagtgcgagtattgcgagtacagtacgaccgatgcctcagggttcaaacgtcatgtcatttctattcacaccaaagattatcctcacagatgtgagtattgtaagaaggggttccggaggccgagcgaaaagaatcagcacattatgagacaccataaggaagttggcttaccctag

SEQ ID NO: 296498 - DNA, 2406 bp, Artificial Sequence
  derived and/or modified sequence
atggatgaggatgaatttgagctccagccccaggagccaaacagcttttttgacgggataggagctgatgccacgcacatggacggcgaccagatcgtcgtggaaatccaagaggctgtctttgtcagtaacatagtcgactctgacatcacagtgcacaactttgtacccgatgaccctgactccgtcgtgatccaggatgtggttgaagacgttgttatcgaggaggatgtgcagtgctctgatattctggaagaagcagacgtgtcagagaatgtgatcatccctgaacaagtactggattcagacgtcactgaggaggtgtctctcccccactgcaccgttcccgacgacgttctggcttcagatatcacctcaacaagcatgtccatgccagagcacgtgctgacttcagaaagcatgcacgtgtgtgacatcggccacgtcgaacacatggttcatgattcagtggttgaggccgaaattattacagaccctctcacctctgatatagtgtccgaggaggtcctcgtggcggattgtgcaccagaggcagtgatcgacgcatctgggattagcgtcgatcagcaggacaacgacaaggccagctgtgaggattatttgatgataagcctggacgacgcaggaaagatcgagcacgatggatcgactggtgtcacaatcgacgccgagtccgagatggatccatgtaaagtagattccacttgtccagaggtgatcaaagtttatatattcaaggccgatccaggggaggacgacctcggcggcacagtggacatagtagagagcgagcctgagaacgaccatggggtggagctgctggatcagaattccagtatccgtgtacctcgcgaaaagatggtctatatgactgttaacgacagccagcaagaagacgaagacctaaacgtggccgaaatcgccgatgaagtgtatatggaagtgatcgtgggtgaggaagacgccgccgtcgccgctgcagccgcagccgtgcacgaacagcagattgacgaagatgaaatgaaaacatttgttcctatcgcgtgggccgccgcttatggaaataattccgacggcatcgagaaccgaaacgggactgcttcagctttactacacatagatgagagcgctggcttggggagattagctaagcagaaaccaaaaaagaagcgtagacccgattcacggcaataccagacggctatcattatcgggcctgatgggcatcccctgacagtttacccttgcatgatctgcgggaagaagtttaaatcacgaggtttcctgaaaaggcacatgaaaaaccatccggagcacctcgccaaaaagaagtatcactgcactgactgcgattacacgaccaataagaagatatccctccacaaccacttggagagccacaagctgaccagcaaagctgagaaggctatagagtgcgatgagtgcggaaaacacttttcccatgcaggcgctctttttactcacaagatggtgcataaagagaaaggtgccaacaagatgcacaaatgcaaattctgtgaatacgaaactgcagaacagggcctgctcaacagacaccttctcgcggtgcactccaaaaacttcccccacatctgcgtggaatgcggaaagggattccggcaccctagtgagctgaggaagcatatgcgcatccacactggagagaaaccctatcagtgccagtattgtgaataccggtctgccgattcaagtaatctgaagacccacataaaaactaaacattctaaggagatgccattcaagtgcgacatttgcctgctcactttctcagacaccaaagaagtacagcagcatacccttgtccatcaggagagcaagacacaccagtgcctgcattgcgatcataagtctagtaattcatctgacctgaaaagacatgtgattagcgtccataccaaggattacccacacaagtgcgaaatgtgcgagaagggatttcaccgcccatccgagctgaagaagcacgtggccgtgcacaaagggaagaaaatgcaccagtgtaggcactgcgattttaagattgcggacccttttgtgctgagtcggcatattttgagcgtgcataccaaggatctgcctttcagatgcaaaagatgtcgaaagggcttccgccaacagaatgaacttaaaaaacatatgaagactcactctggacgtaaagtgtatcagtgcgaatactgtgagtactccactacggatgcctcagggtttaagaggcacgtcatctctatccacacaaaggactacccgcatagatgtgaatattgtaaaaagggcttccggcggccatcggaaaagaatcagcacataatgcggcaccacaaggaagtcggcctaccttag

SEQ ID NO: 296499 - DNA, 2406 bp, Artificial Sequence
  derived and/or modified sequence
atggatgaagatgaatttgagctgcagccccaggagcccaacagcttctttgatggcatcggggctgatgccacccacatggatggagaccagatcgtggtggagatccaggaggccgtgtttgtgagcaacatcgtggacagcgacatcaccgtgcacaactttgtgcctgatgatcctgacagcgtggtgatccaggatgtggtggaggatgtggtgattgaggaggatgtgcagtgcagcgacatcctggaggaggctgatgtgtctgaaaatgtcatcatccctgagcaggtgctggacagtgatgtgacagaggaggtgtccctgccccactgcaccgtgcctgatgatgtgctggccagtgacatcaccagcacctccatgtccatgcctgagcacgtgctgaccagcgagagcatgcacgtgtgtgacatcggccacgtggagcacatggtgcatgacagcgtggtggaggccgagatcatcacagaccccctgaccagtgacatcgtgtctgaggaggtgctggtggccgactgtgcccctgaggccgtgattgatgccagcggcatctctgtggaccagcaggacaatgacaaggccagctgtgaggactacctgatgatcagcctggatgatgctgggaagattgaacatgatggcagcactggagtgaccattgatgctgagagcgagatggacccctgcaaggtggacagcacctgcccagaggtgatcaaggtgtacatcttcaaggctgaccccggggaggatgacctgggcggcaccgtggacatcgtggagagcgagccagaaaatgaccacggcgtggagctgctggaccagaacagcagcatccgggtgccccgggagaagatggtgtacatgacagtgaatgacagccagcaggaggatgaggacctgaatgtggccgagattgctgatgaggtgtacatggaggtgattgtgggggaggaggatgctgctgtggccgctgctgctgctgctgtgcatgagcagcagattgatgaagatgagatgaagacctttgtgcccatcgcctgggccgccgcctacggcaacaacagtgatggcatcgagaacagaaatggaacagccagcgccctgctgcacattgatgaatctgctggcctgggccgcctggccaagcagaagcccaagaagaagaggaggccagacagccggcagtaccagacagccatcatcattggaccagatggccaccccctgactgtgtacccctgcatgatctgtgggaagaagttcaagagccggggcttcctgaagaggcacatgaagaaccaccctgagcacctggccaagaagaagtaccactgcacagactgtgactacaccaccaacaagaagatcagcctgcacaaccacctggagagccacaagctgaccagcaaggccgagaaggccattgaatgtgatgaatgtgggaagcacttcagccacgccggggccctcttcacccacaagatggtgcacaaggagaagggggccaacaagatgcacaagtgcaagttctgtgaatatgaaacagctgagcagggcctgctgaacagacacctgctggccgtgcacagcaagaacttcccccacatctgtgtggagtgtgggaagggcttccgccaccccagcgagctgaggaagcacatgaggatccacactggagagaagccctaccagtgccagtactgtgagtacagatctgctgacagcagcaacctgaagacccacatcaagaccaagcacagcaaggagatgcccttcaagtgtgacatctgcctgctgaccttcagtgacaccaaggaggtgcagcagcacaccctggtgcaccaggagagcaagacccaccagtgcctgcactgtgaccacaagagcagcaacagcagtgacctgaagagacatgtgatctctgtgcacaccaaggactacccccacaagtgtgagatgtgtgagaagggcttccaccggcccagcgagctgaagaagcacgtggccgtgcacaagggcaagaagatgcaccagtgccgccactgtgacttcaagattgctgacccctttgtgctgagccgccacatcctgtctgtgcacaccaaggacctgcccttccgctgcaagcgctgcaggaagggcttccggcagcagaatgagctgaagaagcacatgaagacccacagcggcaggaaggtgtaccagtgtgagtactgtgagtacagcaccacagatgccagcggcttcaagagacatgtgatcagcatccacaccaaggactacccccaccgctgtgagtactgcaagaagggcttccggcggcccagcgagaagaaccagcacatcatgaggcaccacaaggaggtgggcctgccctag

SEQ ID NO: 296500 - DNA, 2406 bp, Artificial Sequence
  derived and/or modified sequence
atggacgaggacgagttcgagctgcagccccaggagcccaacagcttcttcgacggtatcggagcagatgccactcacatggacggcgaccagatcgttgtggagattcaggaggccgtctttgtcagtaacatcgtggactcagatattaccgttcacaactttgttccagatgacccagatagtgtcgtgattcaagacgtggtggaagacgtagtaatcgaggaagacgtccaatgtagcgatattcttgaagaagctgacgtctccgaaaacgtgatcatacccgaacaagttctcgactccgatgtgactgaagaagtgagtctgccgcactgtacagtgcctgacgatgtgctcgcctcggacattacttctacgtccatgagcatgcccgagcatgtcctcacctccgaatctatgcacgtgtgcgacatcggacacgtggaacacatggtgcacgatagcgttgtggaggcggagatcataacagatccgctgaccagcgacattgtgtctgaggaagtgcttgtggctgattgcgctccagaggccgtcatcgacgcctccggaatttcagttgaccagcaggataatgacaaagcttcatgcgaggactacttaatgatttctctggacgatgctggcaaaatagaacacgatggatctacaggcgtgaccattgacgccgagtccgagatggacccctgtaaagtcgacagtacctgtcccgaagtaattaaggtgtacatatttaaagcagaccccggtgaggacgacctgggcggtactgttgacatagtggaaagtgaacctgagaacgatcacggagtggagctattggatcagaatagtagtatacgggtcccaagagagaaaatggtctacatgaccgttaacgatagccagcaggaggatgaagatctgaatgtcgcagaaattgcagacgaggtttacatggaagtaattgtcggtgaggaggatgccgccgtcgcggccgccgccgccgccgtgcacgaacagcagatagatgaagatgaaatgaaaacgttcgtaccaattgcctgggcagctgcttatggaaacaattcagatggcatagagaacagaaatgggacggcgagcgcactccttcatattgacgagtcagccggcctgggccgtcttgcaaaacaaaaacccaagaaaaaacgtcgccctgatagccgccaataccagactgccattataatcggacccgacggtcatccactcactgtatacccctgtatgatctgcggaaagaagtttaagagccgcgggttccttaagagacatatgaagaatcaccccgagcaccttgcgaaaaaaaagtatcactgtaccgactgtgactacactacaaacaagaagatctctctgcataatcaccttgaatcacacaaactgacgagtaaagctgagaaggctattgagtgtgacgaatgcgggaagcatttttctcacgccggcgccctgttcacgcataagatggttcacaaggagaaaggcgcaaacaagatgcacaagtgcaaattctgcgagtatgaaaccgctgagcagggcctgctgaatagacacctcctcgccgtccacagtaagaatttcccacatatctgtgtcgagtgtggtaaggggttcagacacccatcagagctgcgcaaacacatgcgcatccacacaggagagaagccctaccagtgtcagtattgcgaatacagaagcgccgactcaagcaacctgaagactcatattaagaccaagcactccaaggaaatgccatttaagtgtgacatatgcctgctgacattctcggacaccaaagaggtgcaacagcacactctggtccatcaagagtctaaaactcatcagtgtctgcattgtgaccacaaatcttccaattccagcgaccttaagcggcacgtgatcagtgttcatactaaggattacccgcacaaatgtgagatgtgtgagaagggattccaccggccctcagaactgaagaaacacgtggctgtacacaaggggaagaaaatgcatcaatgccggcactgcgactttaagattgcagacccattcgtactttctagacacatcctgagcgtacacactaaagatctgccatttaggtgtaaacgctgccgcaaggggttccgccagcagaacgaactgaagaaacacatgaagacacactctgggcggaaagtctatcaatgcgagtactgtgagtattccacaaccgacgcctctggatttaagaggcatgttatctctattcacactaaggactatccacacagatgtgagtactgtaaaaaagggttccgtcgtccaagtgaaaagaatcagcatatcatgaggcatcataaagaggtcgggctcccctag

SEQ ID NO: 296501 - DNA, 2406 bp, Artificial Sequence
  derived and/or modified sequence
atggacgaggacgagttcgagctgcagccccaggagcccaacagcttttttgatggtatcggcgccgacgccacccacatggacggtgaccaaatcgtggttgaaattcaggaggctgtattcgtttcgaatatcgtggactcagatattacggtgcacaactttgttcccgatgaccccgactctgtagtgatccaggacgtcgtggaggatgtggtgattgaggaagatgttcagtgtagcgacattcttgaagaggcggatgtatcagaaaatgtgatcatacctgaacaggtgctggactcagatgtgaccgaagaggtgtcgctccctcattgcacggttcccgacgacgtgctcgcaagtgatatcacgtccactagtatgtctatgccagagcatgtccttacttctgaaagcatgcatgtatgtgatatcggacatgttgagcacatggtgcacgattctgtggtggaggcagaaatcattacagacccactcacgtccgacatagtttctgaagaggttttagtcgctgactgtgcccccgaggctgtgatagacgcatctggaatttccgtagaccagcaggacaatgacaaagctagttgcgaagattacctcatgatctcactggacgatgccggcaagattgaacacgatggatctacaggtgtgacgattgatgctgaaagcgagatggacccctgtaaggtcgactctacttgccccgaggtcataaaagtatacatctttaaggctgaccccggcgaggatgacctgggcggcacggtggacatagtcgaatcagagcctgaaaacgatcacggagtggagctcctggaccaaaactcatctataagagtgccgcgcgaaaaaatggtctacatgacggtgaatgatagtcaacaggaggacgaggatctgaatgtggcggagatcgcagacgaggtgtacatggaggtcatcgtgggggaagaggacgccgcagtagccgccgctgccgccgcagtgcatgagcagcaaattgatgaggacgaaatgaaaacattcgtcccaattgcctgggctgctgcgtatggcaataattctgacggaattgagaaccgcaatggtacagctagcgccctccttcatattgacgagtccgccggcctcgggcgcttggccaagcaaaagccaaagaaaaagaggcggcccgattcaaggcagtatcaaactgccatcatcattggtccggacgggcatcctctcaccgtctacccctgcatgatctgcgggaagaaatttaaatcaaggggctttctcaaaaggcacatgaagaatcatcccgagcacctggccaagaagaagtatcactgcacagactgtgactacactacgaacaagaagatatctctgcacaaccacctcgagtcccacaagcttacgtcgaaggctgagaaggcaatagaatgtgacgaatgcggcaagcacttttctcacgcaggcgcactgttcactcataagatggttcacaaagaaaagggcgccaacaaaatgcacaaatgtaagttctgtgaatatgaaacggcagagcaagggctgctgaataggcaccttttggccgtgcactccaagaatttccctcacatatgcgtagagtgtggcaaaggttttagacatcctagcgagctgcgcaagcatatgcgcattcacaccggagaaaaaccatatcaatgccagtattgcgagtatagatcagcagactcttccaacctgaagactcacattaaaaccaagcatagtaaggagatgccattcaagtgtgacatctgcctgctgaccttttctgacaccaaagaggtccagcagcacacactggtgcatcaagagtctaagacacaccagtgcctgcattgcgatcataaaagttctaacagttcagacctcaagcgtcatgtgatctcagtgcacacaaaagattacccacacaagtgcgagatgtgcgagaagggtttccatcgcccgagcgagctgaagaagcacgtggccgtgcataagggaaaaaaaatgcaccagtgtcgacactgcgactttaaaattgcagaccccttcgtcctgtcccggcatatcctgagcgttcatacgaaagaccttccatttcggtgcaaacgctgcagaaagggattcaggcaacagaatgagctgaaaaaacacatgaagactcacagtggacggaaggtttaccagtgtgagtactgcgagtattccaccacagacgccagcggatttaagcgccatgtgatttcaatccacaccaaggactaccctcatcgctgtgaatactgtaagaaaggttttaggaggccatccgagaaaaaccagcatatcatgagacaccacaaagaggttggacttccatag

SEQ ID NO: 296502 - DNA, 2406 bp, Artificial Sequence
  derived and/or modified sequence
atggacgaggatgagttcgagttgcagcctcaggagcctaactccttctttgatggaatcggtgccgacgctacacatatggacggagatcagatagttgtcgaaattcaggaagcggtgttcgtctccaacatcgtggactcggatattaccgtgcacaatttcgtgcctgatgaccctgattctgtggtgatacaggacgtcgtggaagacgttgtaatagaagaggatgtgcagtgctccgacatactggaggaagccgacgttagcgagaatgtgatcattccggaacaagttttggacagcgacgtgactgaggaggttagcctgcctcattgtacagtgcccgacgatgtgcttgcatccgatatcacttctacaagtatgtcaatgcccgaacatgtcctgacatccgaatcaatgcatgtgtgtgacatcgggcacgtggaacatatggtgcacgactcagtagtcgaggctgaaatcatcacagacccactcacctccgatattgtcagtgaggaagtcttagttgccgactgcgccccagaggccgttattgacgctagtggcatttccgttgaccagcaggacaacgataaagcatcttgtgaggattacctgatgatttccctggacgatgcagggaagatcgaacatgacgggagcactggcgtaacgattgatgccgaatccgaaatggatccatgcaaagtagattcgacttgccctgaggttatcaaggtctatatattcaaagccgacccaggggaagatgatctcgggggaaccgtggatatcgtggagtctgaacccgaaaacgatcatggtgtggagttactcgaccagaatagctccattcgggttccacgggagaagatggtgtatatgaccgttaatgactcacagcaagaagacgaggacctcaacgtagccgaaatagcagatgaagtatacatggaagtcatcgtgggagaagaagatgcggctgtggctgccgctgcggcagccgttcacgaacagcagatcgacgaagatgaaatgaaaacattcgtgcctattgcttgggccgctgcgtacggcaataattctgatgggattgaaaacagaaatggaacagcttccgccctcctccatatcgatgaaagcgccggtttgggtcggctggccaagcagaagccgaaaaagaagcgccgacccgattcccgccagtaccagaccgctatcatcatcggccctgatggtcacccgctcactgtgtacccgtgcatgatctgtggaaaaaagttcaagtcgcgtggatttctcaaacgacatatgaagaatcatcctgagcatctagcaaagaaaaaataccattgcaccgactgcgattatacgaccaataaaaagataagcctccacaatcacctggaatctcacaaactgactagtaaggctgagaaagcgatcgaatgcgacgagtgtgggaaacattttagtcacgccggagccctattcacccataaaatggtacacaaggaaaaaggagctaacaagatgcacaagtgcaaattttgcgaatatgaaaccgcagagcagggcctcttgaataggcatctgctggccgtgcacagtaagaactttcctcacatctgtgtcgagtgcggaaaggggtttcgccacccctcagagctgaggaagcatatgcggattcacaccggcgagaaaccttaccagtgccagtattgcgaatacagatcagctgacagcagtaacctcaaaacccatatcaaaaccaagcacagtaaagagatgccttttaaatgtgacatctgcctgctgaccttcagcgacacaaaggaagttcaacagcacacactggtgcatcaagagtctaagactcaccagtgtctgcattgcgaccataaatcttccaactcgtccgacttaaaacggcacgtgatttccgtgcacacaaaggactacccacataagtgtgagatgtgcgagaaaggctttcatcggccatctgagctcaaaaaacatgtcgccgtgcataagggcaagaagatgcaccaatgtaggcattgcgattttaaaatagcagaccccttcgtgctgtcacgacatatcctgagtgtgcataccaaagacctccccttccggtgcaaaaggtgtagaaaagggtttcggcagcagaacgaactgaaaaaacacatgaaaacacattccggtaggaaggtctaccagtgcgagtattgcgagtatagtacgactgacgcctctgggtttaagcgccacgtcatatcaatacacactaaagactacccccacaggtgtgagtactgcaagaaggggttcagaaggccatctgagaaaaatcaacacatcatgagacaccacaaagaggtggggctgccttag

SEQ ID NO: 296503 - DNA, 2406 bp, Artificial Sequence
  derived and/or modified sequence
atggatgaggacgaattcgagttgcagccccaagagccaaacagcttctttgatgggattggagcagatgcaacgcacatggacggggatcagattgtcgtcgagatccaagaggctgtctttgtgtcaaatatcgtggattcggatataaccgtgcacaattttgttcccgacgaccctgatagcgtggttatccaggacgttgtggaagatgtggtcatcgaggaggacgtacagtgttctgacatcctagaggaagctgacgtgtcagaaaacgtgataatccccgagcaggtgcttgactcagatgtgaccgaagaggtctcactgccacattgtaccgtcccagatgatgttttagccagtgatatcacgagcacctcaatgtctatgcccgagcacgtactgacttcggagtccatgcacgtgtgtgacattggacacgtggaacacatggtgcatgactctgtagtggaagccgagattatcacggacccgttgacatcggacatcgtttcggaagaagtcctcgtcgctgactgtgcaccagaagccgtgatagatgccagcgggatatcagtggatcagcaggacaacgataaggcatcgtgcgaggactatcttatgatctcacttgatgatgcgggaaaaatcgaacatgatggctcgacaggcgtcaccatcgacgccgagagcgagatggatccctgcaaagtggactccacatgcccggaggtgatcaaagtgtacattttcaaagccgatcctggagaggacgatttagggggtacggtggatatagtcgagtcagagcccgaaaatgaccatggcgtggagctactggaccaaaacagctctattagggtaccacgggaaaagatggtttacatgacagtgaacgattcacagcaggaggatgaggacctgaacgtggctgaaattgctgatgaagtgtacatggaagtaattgtcggggaggaggacgccgctgtagcggctgccgctgccgctgtgcatgaacagcagatagacgaagatgagatgaagacattcgtgcccattgcttgggcagccgcatacgggaacaattcggacgggatagagaatagaaatggaactgcttctgcactgctccacattgacgagtcggccggactggggagacttgctaaacagaagcccaaaaaaaagcgtcgacctgacagtcgacagtaccagacggcgattattatcggaccggacggacatccccttaccgtctatccatgcatgatctgtggcaaaaaatttaagtccagaggatttctgaagcgacacatgaagaatcacccagaacatcttgctaagaagaagtaccattgcacagactgtgattacacgactaacaagaaaatctcgctccacaaccacttagagtctcacaagctgacaagtaaggccgaaaaggcgattgagtgcgatgaatgcggcaaacattttagccacgccggtgcccttttcacacataagatggtccataaggagaaaggtgcaaataaaatgcacaagtgcaaattttgtgagtatgagaccgccgagcagggcctgctgaaccgacacctgctggcagtgcatagtaaaaatttcccccacatttgcgtggaatgcggaaagggcttcagacacccatccgagctgcggaaacacatgagaatacacactggtgagaaaccataccagtgtcagtattgcgagtatagaagcgccgattcttccaacctcaagacacacattaagacaaaacatagcaaggaaatgcctttcaaatgcgatatctgtttgttgacattcagcgatactaaagaagtccagcagcacacccttgttcatcaggaatctaagacgcaccagtgcttgcattgcgaccataaatcaagcaacagcagtgatcttaagagacacgttatcagtgtgcatacaaaggactacccccataagtgcgagatgtgcgagaaagggttccaccggccaagcgagctcaaaaagcatgtagcagttcataaaggcaagaagatgcaccagtgccggcactgcgattttaaaattgccgatcccttcgtcttaagcagacacatcctgtcggtccataccaaagacctgccatttaggtgcaagcgctgtcgcaagggttttcggcaacaaaatgaactgaagaaacacatgaagacacattctggcaggaaagtttatcaatgcgaatattgcgagtacagtactaccgatgcctctgggttcaagcggcacgtaatcagcatccacaccaaagactatccccatcgatgcgaatactgcaagaaggggttccgtcgcccttcagagaagaaccaacatatcatgagacatcacaaggaagtgggccttccttag

SEQ ID NO: 296504 - DNA, 2406 bp, Artificial Sequence
  derived and/or modified sequence
atggatgaggatgagtttgagcttcagccacaagagcccaactccttttttgatggaatcggagcagacgctacccacatggacggagaccaaatagtggttgagatacaggaggccgtgtttgtgagcaacatcgtggatagcgatatcacggttcacaactttgtgcccgatgatcctgacagtgttgtcattcaagatgtagttgaggatgtggtgatcgaggaagacgttcaatgttctgacatcctggaggaggccgatgtctctgaaaatgtgattatcccggaacaagtcctcgattctgacgtgacggaggaagtctctttgccccactgcaccgtccccgacgacgttctggcttctgatattacgagtacatccatgtccatgcccgaacacgtcctgacctctgagtctatgcatgtttgcgacattggacacgtggagcatatggttcacgattctgtggtagaagccgaaataatcactgacccattaacaagtgacatcgtgtcagaagaggtgcttgtggcagattgtgccccagaggccgtcatcgacgcttccgggatcagcgttgatcagcaggacaacgacaaggcatcctgcgaggactacctgatgatttctttggatgatgctggcaagatcgagcacgacgggtccactggagtgacaatcgatgccgaatccgaaatggatccctgtaaggttgactccacatgtcctgaggtcatcaaagtatatatttttaaggctgaccctggcgaagacgacctcggaggaaccgtggatatcgtggagagtgagccagaaaatgatcatggcgtggagctgctggaccagaacagttcaattcgagtacctcgggaaaagatggtgtatatgacagtgaacgattcgcagcaggaagatgaggatttgaacgtagctgagatagctgatgaagtgtatatggaagtgattgtaggcgaggaggatgctgccgtggccgccgctgcagcagccgtccacgagcagcagatagacgaagacgagatgaagacttttgttcctattgcatgggccgcagcttacggtaataacagcgacgggatagaaaacagaaacgggacagctagtgcgttactgcacatagacgagagcgcaggtctgggacgcctcgcaaagcagaagcccaagaaaaaacggcggcccgactcaagacagtaccagaccgccatcatcattggacctgatggtcaccctttaactgtgtacccctgcatgatctgcggtaaaaagttcaaatctaggggatttctgaaacgccatatgaaaaaccaccctgagcacctcgccaaaaagaagtatcactgtacagattgtgactacactactaacaagaagatcagtctccataatcatctggaaagccacaagcttacatctaaggccgaaaaagcaatcgaatgtgacgagtgcgggaaacactttagccatgctggggctctatttacccataaaatggtccataaggagaaaggcgccaacaagatgcataaatgcaaattctgcgagtacgagactgctgagcagggactgcttaatcgccatcttcttgccgtgcattcaaaaaactttcctcatatttgtgtcgaatgcggtaagggcttccggcacccaagcgagttaaggaagcacatgcgaattcatactggtgaaaagccctaccaatgccagtactgtgagtaccgcagtgccgatagtagcaatctgaaaacacacatcaaaacaaagcattctaaagaaatgccttttaaatgtgatatatgtctgctcaccttctccgacaccaaggaggttcagcagcataccttggttcaccaagaaagcaagacccatcagtgcctgcactgtgatcacaaatcttcaaattcaagcgatctgaagaggcatgtgatttccgtgcacactaaggattatccccacaagtgcgaaatgtgtgagaaaggatttcacagaccttccgaacttaaaaagcatgtcgcagttcacaaaggaaagaagatgcaccaatgtcgtcattgcgactttaagattgcagaccccttcgtattgagtcgccacatattatctgtgcacactaaggatctgccttttagatgcaagcggtgtagaaaaggatttaggcagcagaatgaactgaaaaaacacatgaagacccactccgggcgaaaggtgtaccaatgtgagtattgtgagtactccactacggatgcttctggctttaaaaggcacgttatctctatccatacgaaagattaccctcatcgttgcgagtactgtaagaagggctttcgaagaccaagcgagaagaatcagcacatcatgagacaccacaaggaagtgggactgccatag

SEQ ID NO: 296505 - DNA, 2406 bp, Artificial Sequence
  derived and/or modified sequence
atggacgaagacgagttcgagctccaaccacaggaacccaacagttttttcgacggaatcggggcggatgcgactcacatggacggcgatcagattgtggtggaaattcaagaagcagtgtttgtttcaaacatagtcgactcagacatcacggtgcataactttgttcctgatgacccagattccgtggtcattcaggacgttgtggaagacgtagtaatagaggaagatgttcaatgttccgatattctggaagaggcagatgtgagcgagaatgtgatcatcccagaacaggtgttggacagcgacgtcacagaagaagtgagcctcccacactgcaccgtcccagatgatgtcctggcctctgacatcactagcacatcaatgtctatgcctgagcacgttttgacttctgagtccatgcatgtgtgcgatattggtcacgtggagcacatggtgcatgattctgtcgttgaggccgagattataaccgaccctctgacttcagatattgtgagcgaggaagtattagtcgctgattgtgccccagaagcagtgatagacgcatctggaattagtgttgaccaacaagacaacgataaagcaagctgtgaggattatctcatgattagcctggatgatgctgggaagatagagcatgatggttcaaccggggtgacgatcgacgctgagtctgagatggacccttgcaaagttgatagcacatgccctgaagttattaaagtgtacatttttaaagctgaccccggcgaggatgacctgggcggcacagtagacatcgtggagtccgagcccgaaaatgaccacggagtcgaactgttggatcaaaacagctccattcgcgtgccaagagagaagatggtgtatatgactgtgaacgacagtcaacaggaggatgaagatctcaatgttgctgaaatcgcagatgaggtgtatatggaagtaattgtgggtgaagaggatgccgctgtggccgccgccgcggctgccgtgcacgaacagcaaatagatgaggatgaaatgaagacttttgtgcctattgcctgggctgccgcctatggaaataattccgacgggattgagaatcgcaatggcacagctagcgcactgcttcatattgacgagtcggccggattaggcaggttagcaaagcagaaacccaagaagaaacggagacctgacagcagacagtatcaaacagcaatcattattggtcccgatggccaccctttgacagtttatccatgcatgatctgcggcaaaaagtttaagagtcgcggctttctcaaaagacatatgaagaatcacccagaacacctggccaagaagaagtaccactgtacagattgcgattataccacaaataagaagatctcactccacaatcacctggagtcccacaagctgactagcaaagcagaaaaggctattgaatgcgacgagtgcggcaaacatttctcccacgccggagccctcttcacccacaaaatggttcacaaggagaagggtgccaataaaatgcacaagtgtaaattctgcgaatacgaaacagccgaacagggcctgctgaaccgacacttactcgcagtgcatagcaagaacttcccacacatctgcgtcgaatgtggtaaaggatttcgccacccatcagaactgcgaaaacatatgcgcatacacacaggggagaaaccctatcagtgccaatactgcgaatataggtcagccgactcttctaacctgaaaacccatatcaagacaaaacatagtaaagagatgccatttaagtgcgatatttgtttgcttactttttcagataccaaagaagtgcagcaacatactcttgttcatcaggaatccaagacccatcagtgtcttcattgcgaccacaaatcgagtaatagcagcgatttaaagaggcacgtgatctccgtgcacacaaaagattatccccacaagtgcgagatgtgcgaaaaaggcttccaccggccttctgagctgaagaaacatgtagcggtacacaagggaaaaaaaatgcatcaatgtagacactgcgattttaagattgccgacccctttgtgctgagcagacatattctcagcgtccatacgaaggatctcccctttagatgtaagaggtgtcgaaaagggtttcgccaacagaacgaattaaagaaacatatgaaaactcattctggtagaaaagtatatcagtgtgaatattgcgagtactccaccaccgacgcatccggctttaaacgacacgtcatttccatccacaccaaagattatccgcaccgttgcgaatactgcaagaaagggtttcgtcgacctagtgaaaagaatcaacatatcatgcgacatcataaagaggttgggttgccttag

SEQ ID NO: 296506 - DNA, 5239 bp, Artificial Sequence
  derived and/or modified sequence
gcctagtgcgcgcgcagtaacctgtttgtggcctggtcggcgtcccgtagggcgccctcccgcgctaggccggccggcgtggcgctcggcgccgaacaggccccgaggaggccgcagttaggcctagtgattatccagttgccctgagcggctgcggaggtgcgctccataagcgggcagggtgggaaaagttcgcccgtttgtccggaaggcagttgatggacctggggtcgacaccactgcggacgcagggcacggcacgggggcgagaaggcgaaggctgcaggcgtgaggagctgtgactaatgagaattaaaggccatggatgaagatgaatttgaattgcagccacaagagccaaactcattttttgatggaataggagctgatgctacacacatggatggtgatcagattgttgtggaaatacaagaagcagtttttgtttctaatattgtggattctgacataactgtgcataactttgttcctgatgacccagactcagttgtaatccaagatgttgttgaagatgttgtcatagaggaggatgttcagtgctcagatatcttagaagaggcagatgtatctgaaaatgtcatcattcctgagcaagtgctggactcagatgtaactgaagaagtttctttaccacactgcacagtcccagatgatgttttagcttctgacattacttcaacctcaatgtctatgccagaacatgttttaacgagtgaatccatgcatgtgtgtgacattggacatgttgaacatatggtgcatgatagtgtagtggaagcagaaatcattactgatcctctgacgagtgacatagtttcagaagaagtattggtagcagactgtgcccctgaagcagtcatagatgccagcgggatctcagtggaccagcaagataatgacaaagccagctgtgaggactacctaatgatttcgttggatgatgctggcaaaatagaacatgatggttccactggagtgaccatcgatgcagaatcagaaatggatccttgtaaagtggatagcacttgtcctgaagtcatcaaggtgtacatttttaaagctgaccctggagaagatgacttaggtggaactgtagacattgtggagagtgaacctgaaaatgatcatggagttgaactacttgatcagaacagcagtattcgtgttcccagggaaaagatggtttatatgactgtcaatgactctcaacaagaagatgaagatttaaatgttgctgaaattgctgatgaagtttatatggaagtgatcgtaggagaggaggatgctgctgttgcagcagcagcagctgctgtgcatgagcagcaaattgatgaggatgaaatgaaaaccttcgtaccaattgcatgggcagcagcttatggtaataattctgatggaattgaaaaccggaatggcactgcaagtgccctcttgcacatagatgagtctgctggccttggcagactggctaaacagaaaccaaagaaaaagagaagacctgattccaggcagtaccaaacagcaataattattggccctgatggtcatcctttgactgtctatccttgcatgatttgtgggaagaagtttaagtcgaggggttttttgaaaagacacatgaaaaaccatcctgaacaccttgccaagaagaagtaccactgtactgactgtgattacactaccaataagaagataagtttacataaccacctggagagccacaagctgaccagcaaggcagagaaggccattgaatgtgatgagtgtgggaagcatttttctcatgcaggggctttgtttactcacaaaatggtgcataaggaaaaaggggccaacaaaatgcacaagtgtaaattctgtgaatatgagacagctgaacaggggttattgaatcgccacctcttggcagtccacagcaagaactttcctcatatttgtgtggagtgtggtaaaggtttccgacacccgtcggaactgagaaagcacatgcgaatccataccggcgagaagccataccaatgccagtactgtgaatataggtctgcagactcttctaacttgaaaacacatataaaaacaaagcatagtaaagagatgccattcaagtgtgacatttgtcttctgactttctcagataccaaagaagtgcagcaacatactcttgtccaccaagaaagcaaaacacatcagtgtttgcattgcgaccacaagagttcaaactcaagtgatttgaaacgacatgtaatttcagttcatacgaaagactatcctcataagtgtgagatgtgcgagaaaggctttcacaggccttcagaacttaagaaacatgtggctgtccacaaaggtaaaaaaatgcaccaatgtagacattgtgactttaagattgcagacccatttgttctaagtcgccatattctctcagttcacacaaaggatcttccatttaggtgtaagagatgtagaaagggatttaggcaacaaaatgagcttaaaaagcatatgaagacacacagtggcaggaaagtatatcagtgtgagtactgtgagtatagcactacagatgcctcaggctttaaacggcacgttatttccattcatacaaaagactatcctcatcggtgtgagtactgcaagaaaggcttccgaagaccttcagaaaagaaccagcacataatgagacaccataaagaagttggtctgccctaacagtgtgtctacaagcttgtaaagatgttggccttgaagcagaaaattcattttttaaagccagtcttgttcacatccattactatacattgaattatgctgtgtaaaaatagaattattgcttctagtccacttttctttacattttattcaatacgctgtcctgaatcctattcagtttctttaatagatgaggaaaaatagcaacaagcaagttgcttataataaaataatttgtgattctatactgaattttcagtcataaaagctttactatttatttacatatttattcatgttcatggtactcttctaagacaaaatcagattgataactatgaaagtaacatttttgacccatttcctcctacacaagtgtttcacattggagacatctgctaatataaatgggaggttttactgtcaagtccaattagcaaaacgtggtaataatttttttgtcagtattttcagattacatgataaaattttacatttgagcttctagcattgattaatataggatattgaccacgtttatgtttaaatttcattttgttcagcagacaaaatgtacttcccttaactttcattaatagtgtttacatcttttgtcagcacagcaaacttttagaaagtaatagttttacttatttttatcttctgttttctctttgtactgctttgtcttgcattgtgttccaacacatgagacttactgctcactgaattttggagtcttttagaggtaaattgtggactcaggattttttgaaacttggtgtgtaactctaaatcttgtatatgcatctttgttgcttattacatatttacacacacaaccacaaattttaaacttatgatgaaaatttacaataacctgaaagatccagagatgtatgagagcattttgtaacttgttattcagttactaaatttgaggtgaataattaaaaagaaaaggacattaggagagtgaaaatcttctcttcaaataatctttgatagataaaaatggaaggtaagatgtttctagatagaatgttttcatacaatttcagcttcatatcataaatttttctggaaagctatttcagacatagatttcatagtatttttctgagaatcctgtgaaggaacgctgtctctttgcaaagtaaggaggactaagggaaaatgatggtaccatgtaacagaatgagagctaattccaaattagcaacttcatcctgctttctattttacattgagtaaagttttaaaaagacaacagtcaagttgattttgattagaagataaaagtacataatgaaaatccatggccttatttggaatatatatcactttccaaattttattatttatttgagagttaataagttaatgttattaagcagttaataatttatatgtatggatataatataaaatgaattcatataattaaaaagaatttggttaataagaatttggagaatggaaaatacatttttaggttccttaatttggctgttggtacctgtgtatttggaatattttaggggattcgaattttttttaacccacattacagctaccttctagctttagtatggtagtgcttcattcaacttttgctgtcaggtttttattttcacctttttctgtgccaccaattcaaaagttataggattaggaaatataaatttatatttggtgattggcagcctctgaaatgttagattaatttgatctagttctaaagtgctttagtcatatatgaatttaaacctagtaccatccaaaaccatgtaatggattttaagaatctgttaggccttcttagcctttatacatgtccctacctgatttttactgtccttcatgatcctgttcttgaaaacttcagtttgtatttgagaatcctttaaatctccttccaatttgttttctccctgaagtaatataaaaggaagtatttaagtgaaagtttaagagttttaaaacattctttaaaattaatacagatagttagctatttatcttttaaaaataaactaaggtaaaaaacgtgacactttacatatttcatatttttcatatagtctggaggtatacacagttgttttgtttttaaccacggtattgaaacctttaaaaggtaattaagcatttggtcaagtaaatatagaacatttgtataaagaaagaaatgaaattgtgcttaatgttatatactgttattatttgcaggctggttttaattcttaatttgattagcaaagctaaaaaagtggatgttgaagttgaaagttttaaagaggtacaaaatcttacaaggacataaattattatttggttgaaaaatagcctattagatattgtatgtcccttcctctgtacaaattgtaaaatacttaaaataactatgaagaattcatataggaagtgtgatactattgtaaatgtgtatttgagaatatgcaaaaataaaaataatattttactgttaataaatgtttacttgtatatg

SEQ ID NO: 296507 - DNA, 5113 bp, Artificial Sequence
  derived and/or modified sequence
gacggcgggcccgtgccggggagctgggccgctttttgtcagctccgaactcggcccctcctccctccctccgcccgccctaccagccggagcccggcccagtgctccagagaaaggccgtcctgcagcacccgccgctgtcgccgaccgcccgcacatccgtcgggagctgtgactaatgagaattaaaggccatggatgaagatgaatttgaattgcagccacaagagccaaactcattttttgatggaataggagctgatgctacacacatggatggtgatcagattgttgtggaaatacaagaagcagtttttgtttctaatattgtggattctgacataactgtgcataactttgttcctgatgacccagactcagttgtaatccaagatgttgttgaagatgttgtcatagaggaggatgttcagtgctcagatatcttagaagaggcagatgtatctgaaaatgtcatcattcctgagcaagtgctggactcagatgtaactgaagaagtttctttaccacactgcacagtcccagatgatgttttagcttctgacattacttcaacctcaatgtctatgccagaacatgttttaacgagtgaatccatgcatgtgtgtgacattggacatgttgaacatatggtgcatgatagtgtagtggaagcagaaatcattactgatcctctgacgagtgacatagtttcagaagaagtattggtagcagactgtgcccctgaagcagtcatagatgccagcgggatctcagtggaccagcaagataatgacaaagccagctgtgaggactacctaatgatttcgttggatgatgctggcaaaatagaacatgatggttccactggagtgaccatcgatgcagaatcagaaatggatccttgtaaagtggatagcacttgtcctgaagtcatcaaggtgtacatttttaaagctgaccctggagaagatgacttaggtggaactgtagacattgtggagagtgaacctgaaaatgatcatggagttgaactacttgatcagaacagcagtattcgtgttcccagggaaaagatggtttatatgactgtcaatgactctcaacaagaagatgaagatttaaatgttgctgaaattgctgatgaagtttatatggaagtgatcgtaggagaggaggatgctgctgttgcagcagcagcagctgctgtgcatgagcagcaaattgatgaggatgaaatgaaaaccttcgtaccaattgcatgggcagcagcttatggtaataattctgatggaattgaaaaccggaatggcactgcaagtgccctcttgcacatagatgagtctgctggccttggcagactggctaaacagaaaccaaagaaaaagagaagacctgattccaggcagtaccaaacagcaataattattggccctgatggtcatcctttgactgtctatccttgcatgatttgtgggaagaagtttaagtcgaggggttttttgaaaagacacatgaaaaaccatcctgaacaccttgccaagaagaagtaccactgtactgactgtgattacactaccaataagaagataagtttacataaccacctggagagccacaagctgaccagcaaggcagagaaggccattgaatgtgatgagtgtgggaagcatttttctcatgcaggggctttgtttactcacaaaatggtgcataaggaaaaaggggccaacaaaatgcacaagtgtaaattctgtgaatatgagacagctgaacaggggttattgaatcgccacctcttggcagtccacagcaagaactttcctcatatttgtgtggagtgtggtaaaggtttccgacacccgtcggaactgagaaagcacatgcgaatccataccggcgagaagccataccaatgccagtactgtgaatataggtctgcagactcttctaacttgaaaacacatataaaaacaaagcatagtaaagagatgccattcaagtgtgacatttgtcttctgactttctcagataccaaagaagtgcagcaacatactcttgtccaccaagaaagcaaaacacatcagtgtttgcattgcgaccacaagagttcaaactcaagtgatttgaaacgacatgtaatttcagttcatacgaaagactatcctcataagtgtgagatgtgcgagaaaggctttcacaggccttcagaacttaagaaacatgtggctgtccacaaaggtaaaaaaatgcaccaatgtagacattgtgactttaagattgcagacccatttgttctaagtcgccatattctctcagttcacacaaaggatcttccatttaggtgtaagagatgtagaaagggatttaggcaacaaaatgagcttaaaaagcatatgaagacacacagtggcaggaaagtatatcagtgtgagtactgtgagtatagcactacagatgcctcaggctttaaacggcacgttatttccattcatacaaaagactatcctcatcggtgtgagtactgcaagaaaggcttccgaagaccttcagaaaagaaccagcacataatgagacaccataaagaagttggtctgccctaacagtgtgtctacaagcttgtaaagatgttggccttgaagcagaaaattcattttttaaagccagtcttgttcacatccattactatacattgaattatgctgtgtaaaaatagaattattgcttctagtccacttttctttacattttattcaatacgctgtcctgaatcctattcagtttctttaatagatgaggaaaaatagcaacaagcaagttgcttataataaaataatttgtgattctatactgaattttcagtcataaaagctttactatttatttacatatttattcatgttcatggtactcttctaagacaaaatcagattgataactatgaaagtaacatttttgacccatttcctcctacacaagtgtttcacattggagacatctgctaatataaatgggaggttttactgtcaagtccaattagcaaaacgtggtaataatttttttgtcagtattttcagattacatgataaaattttacatttgagcttctagcattgattaatataggatattgaccacgtttatgtttaaatttcattttgttcagcagacaaaatgtacttcccttaactttcattaatagtgtttacatcttttgtcagcacagcaaacttttagaaagtaatagttttacttatttttatcttctgttttctctttgtactgctttgtcttgcattgtgttccaacacatgagacttactgctcactgaattttggagtcttttagaggtaaattgtggactcaggattttttgaaacttggtgtgtaactctaaatcttgtatatgcatctttgttgcttattacatatttacacacacaaccacaaattttaaacttatgatgaaaatttacaataacctgaaagatccagagatgtatgagagcattttgtaacttgttattcagttactaaatttgaggtgaataattaaaaagaaaaggacattaggagagtgaaaatcttctcttcaaataatctttgatagataaaaatggaaggtaagatgtttctagatagaatgttttcatacaatttcagcttcatatcataaatttttctggaaagctatttcagacatagatttcatagtatttttctgagaatcctgtgaaggaacgctgtctctttgcaaagtaaggaggactaagggaaaatgatggtaccatgtaacagaatgagagctaattccaaattagcaacttcatcctgctttctattttacattgagtaaagttttaaaaagacaacagtcaagttgattttgattagaagataaaagtacataatgaaaatccatggccttatttggaatatatatcactttccaaattttattatttatttgagagttaataagttaatgttattaagcagttaataatttatatgtatggatataatataaaatgaattcatataattaaaaagaatttggttaataagaatttggagaatggaaaatacatttttaggttccttaatttggctgttggtacctgtgtatttggaatattttaggggattcgaattttttttaacccacattacagctaccttctagctttagtatggtagtgcttcattcaacttttgctgtcaggtttttattttcacctttttctgtgccaccaattcaaaagttataggattaggaaatataaatttatatttggtgattggcagcctctgaaatgttagattaatttgatctagttctaaagtgctttagtcatatatgaatttaaacctagtaccatccaaaaccatgtaatggattttaagaatctgttaggccttcttagcctttatacatgtccctacctgatttttactgtccttcatgatcctgttcttgaaaacttcagtttgtatttgagaatcctttaaatctccttccaatttgttttctccctgaagtaatataaaaggaagtatttaagtgaaagtttaagagttttaaaacattctttaaaattaatacagatagttagctatttatcttttaaaaataaactaaggtaaaaaacgtgacactttacatatttcatatttttcatatagtctggaggtatacacagttgttttgtttttaaccacggtattgaaacctttaaaaggtaattaagcatttggtcaagtaaatatagaacatttgtataaagaaagaaatgaaattgtgcttaatgttatatactgttattatttgcaggctggttttaattcttaatttgattagcaaagctaaaaaagtggatgttgaagttgaaagttttaaagaggtacaaaatcttacaaggacataaattattatttggttgaaaaatagcctattagatattgtatgtcccttcctctgtacaaattgtaaaatacttaaaataactatgaagaattcatataggaagtgtgatactattgtaaatgtgtatttgagaatatgcaaaaataaaaataatattttactgttaataaatgtttacttgtatatga

SEQ ID NO: 296508 - protein, 220 aa, Artificial Sequence
  derived and/or modified sequence
MERYAGALEEVADGARQQERHYQLLSALQSLVKELPSSFQQRLSYTTLSDLALALLDGTVFEIVQGLLEIQHLTEKSLYNQRLRLQNEHRVLRQALRQKHQEAQQACRPHNLPVLQAAQQRELEAVEHRIREEQRAMDQKIVLELDRKVADQQSTLEKAGVAGFYVTTNPQELMLQMNLLELIRKLQQRGCWAGKAALGLGGPWQLPAAQCDQKGSPVPP

SEQ ID NO: 296509 - DNA, 663 bp, Artificial Sequence
  derived and/or modified sequence
atggagaggtatgccggggcactggaggaagtggctgatggcgcacgccagcaggaaagacactatcaactccttagcgccttgcagtcgctggtaaaggagctgccaagctccttccagcagcggctgagctatacaactctatctgacttggcattagccttgctggatgggactgtgttcgaaatcgtgcagggcctcctcgagatccagcatttgactgaaaaaagcttatataaccaacggctgcgccttcagaacgagcatagagtcctccggcaagccctgcggcagaagcatcaggaagcacaacaggcctgcagacctcataacttaccggtactgcaggcagcccagcaacgggagctggaggctgtggagcatagaatccgagaagaacagagagccatggatcagaagatcgtgcttgagctggacagaaaagtggcggatcagcaatccaccctggagaaggccggagttgcgggcttttacgtcactacaaacccacaggaattgatgttgcaaatgaacctgctcgagttaattagaaaactgcaacagaggggttgctgggccggtaaagccgctctggggctcggcggtccgtggcagttgccagccgcccagtgcgatcagaaggggtcacctgtgccgccctag

SEQ ID NO: 296510 - DNA, 663 bp, Artificial Sequence
  derived and/or modified sequence
atggagagatatgctggggccctggaggaggtggctgatggagcccggcagcaggagcggcactaccagctgctgagcgccctgcagagcctggtgaaggagctgcccagcagcttccagcagaggctgagctacaccaccctgagtgacctggccctggccctgctggatggcaccgtgtttgaaattgtgcagggcctgctggagatccagcacctgacagagaagagcctgtacaaccagaggctgcggctgcagaatgagcaccgggtgctgcggcaggccctgcggcagaagcaccaggaggcccagcaggcctgccggccccacaacctgcctgtgctgcaggccgcccagcagcgggagctggaggccgtggagcaccgcatccgggaggagcagagggccatggaccagaagatcgtgctggagctggacaggaaggtggccgaccagcagagcaccctggagaaggccggcgtggccggcttctacgtgaccaccaacccccaggagctgatgctgcagatgaacctgctggagctgatcaggaagctgcagcagaggggctgctgggccggcaaggccgccctgggcctgggcggcccctggcagctgcctgctgcccagtgtgaccagaagggcagccctgtgcccccatag

SEQ ID NO: 296511 - DNA, 663 bp, Artificial Sequence
  derived and/or modified sequence
atggagcggtacgccggcgccctggaggaggtggccgacggcgcccggcagcaggagcggcattatcaacttctgtccgccttgcagagtttggtgaaggaactgccatcttctttccaacagaggctgtcatacactacacttagcgacctggctctggccttgctcgatggcactgtgtttgaaatcgtccagggcctgctcgaaattcagcacttaactgagaaaagtctgtataaccaacggctacggttgcagaatgaacacagggtactgagacaggctctgcgtcagaaacatcaagaagctcagcaggcctgtcggccacacaatctgcccgtgttacaggctgcacagcaacgcgagctggaagcagtcgaacaccgcataagggaggagcaaagggccatggaccaaaagattgtgctagagctggacaggaaagtggcggatcagcaatctactttagaaaaggccggtgttgccgggttctacgtgacgactaatccacaggaacttatgcttcaaatgaatctcctcgaattaatcagaaaactccagcagcgaggttgttgggccggaaaagccgctctcgggctgggggggccatggcagctgccagccgctcagtgcgatcagaagggtagccccgtccctccttag

SEQ ID NO: 296512 - DNA, 663 bp, Artificial Sequence
  derived and/or modified sequence
atggaacgatatgctggggcacttgaggaagttgctgatggcgctcgacagcaggagcgccattatcagttgctatctgccctgcagagcctcgtcaaggagcttccttcatcctttcagcaacggctgagttacacaaccctgtcagacctagccctcgcactgcttgacggtactgtcttcgagatcgtccaggggttgctagagatccagcatctgaccgagaagtcactttacaaccagagactcaggctccaaaacgaacatcgggtgcttaggcaggccctgcgacagaagcatcaggaagcacagcaggcatgtcggccacataacctgcccgttcttcaggcagcccagcagcgggagttggaggcggtggaacaccggatacgggaggaacaacgggctatggatcagaagattgtgcttgaactggacagaaaagtggctgatcaacagtcaacccttgaaaaagctggggtcgctgggttttatgtcaccaccaacccgcaggaactgatgcttcagatgaatctgctggagctgatcaggaagctacagcagagagggtgctgggcgggaaaggccgcactgggtctgggtgggccttggcagctccccgctgctcagtgtgatcagaagggctccccggtcccaccatag

SEQ ID NO: 296513 - DNA, 663 bp, Artificial Sequence
  derived and/or modified sequence
atggagagatacgccggcgccctggaggaggtggccgacggcgccagacagcaggagagacactaccagctgctgagcgccctgcagagcctggtgaaggagctgcccagcagcttccagcagagactgagctacaccaccctgagcgacctggccctggccctgctggacggcaccgtgttcgagatcgtgcagggcctgctggagatccagcacctgaccgagaagagcctgtacaaccagagactgagactgcagaacgagcacagagtgctgagacaggccctgagacagaagcaccaggaggcccagcaggcctgcagaccccacaacctgcccgtgctgcaggccgcccagcagagagagctggaggccgtggagcacagaatcagagaggagcagagagccatggaccagaagatcgtgctggagctggacagaaaggtggccgaccagcagagcaccctggagaaggccggcgtggccggcttctacgtgaccaccaacccccaggagctgatgctgcagatgaacctgctggagctgatcagaaagctgcagcagagaggctgctgggccggcaaggccgccctgggcctgggcggcccctggcagctgcccgccgcccagtgcgaccagaagggcagccccgtgcccccctag

SEQ ID NO: 296514 - DNA, 1214 bp, Artificial Sequence
  derived and/or modified sequence
cgcgaggcgcgccgcgatcggggactgtcctaagacgggcggggcgcgctgcgctagggactgtcataaaaggggcgggacgcgccgcggtcgggatgacgtgagctgggggcgctcgtcgctgcagccggcggctagcgggcgtccgcgccatggagcgctacgcgggcgccttggaggaggtggcggacggtgcccggcagcaggagcgacactaccagctgctgtcggcgttacagagcctggtgaaggagttgcccagctcattccagcagcgcttgtcctacaccacgctgagcgacctggccctggcgcttctcgacggcaccgtgttcgaaatcgtgcaggggctactggagatccagcacctcaccgaaaagagcctgtacaaccagcgcctgcgcctacagaacgagcatcgagtgctcaggcaggcgctgcggcagaagcaccaggaagcccagcaggcctgccggccccataacctgcctgtgcttcaggcggctcagcagcgagaactagaggcggtggagcaccggatccgtgaggagcagcgggcgatggaccagaagatcgtcctggagctggaccggaaggtggctgaccagcagagcacactggagaaggcgggggtggctggcttctacgtgaccaccaacccacaggagctgatgctgcagatgaacctgctggaactcatccggaagctgcagcagaggggctgctgggcagggaaggcagccctggggctaggaggtccctggcagttgcctgctgcccagtgtgaccagaaaggcagccctgtcccaccatagccacaggcagcagaagtctgggcagagttcatcttcttgacctttggccactgccttcccagctgcccgcagggggttccccctgctgaggagagaccaggtggaccccagctgcctgtcacccttcatctgggacttgctgtcaaaccctaggatagtctcataaaggggaggctgggccagcctgctgctgtctgcttcagggccaggcagagagtgaggctgggggttctcacaccttactccaccgggcacatcccaacctgcactggggcccactcgagcgcttgttctggtctcagccgctcccttggcagctgcagcccccatgcagaagaggctcccaggcccaagctctgtgtgacccagagaaataaagatgcctcagtgtggcccgca

SEQ ID NO: 296515 - protein, 118 aa, Artificial Sequence
  derived and/or modified sequence
MTSQSQGIHQLLQAEKRAKDKLEEAKKRKGKRLKQAKEEAMVEIDQYRMQRDKEFRLKQSKIMGSQNNLSDEIEEQTLGKIQELNGHYNKYMESVMNQLLSMVCDMKPEIHVNYRATN

SEQ ID NO: 296516 - DNA, 357 bp, Artificial Sequence
  derived and/or modified sequence
atgaccagccagagccagggcatccaccagctgctgcaggccgagaagagagccaaggacaagctggaggaggccaagaagagaaagggcaagagactgaagcaggccaaggaggaggccatggtggagatcgaccagtacagaatgcagagagacaaggagttcagactgaagcagagcaagatcatgggcagccagaacaacctgagcgacgagatcgaggagcagaccctgggcaagatccaggagctgaacggccactacaacaagtacatggagagcgtgatgaaccagctgctgagcatggtgtgcgacatgaagcccgagatccacgtgaactacagagccaccaactag

SEQ ID NO: 296517 - DNA, 357 bp, Artificial Sequence
  derived and/or modified sequence
atgacaagccagagccagggaatacatcaattgcttcaagcagagaaaagagccaaggacaagctcgaagaggctaagaaacgcaagggaaagagactcaagcaagccaaagaggaggcaatggtggagatcgaccaatatcgaatgcagcgtgataaagaattcagacttaaacagtcaaaaattatgggctcacaaaataatttgtccgacgagattgaggagcagaccctaggaaagattcaggagttaaacggccactacaacaaatacatggagagcgtcatgaaccagctcctgagtatggtatgtgatatgaagcccgaaattcatgttaactaccgcgccacaaattag

SEQ ID NO: 296518 - DNA, 357 bp, Artificial Sequence
  derived and/or modified sequence
atgacatctcagagccagggtattcaccagttattgcaagcagaaaaacgagccaaagacaaactggaagaagctaaaaagcgaaaaggaaaaagactcaagcaggcaaaggaggaagcgatggtggaaatcgatcagtatcgaatgcagagagacaaagagtttcgtttaaaacagagcaagataatgggaagccagaacaacttgtcagatgagatcgaggaacagactctcggtaaaatccaggagcttaatggccattacaataagtatatggagagcgtgatgaaccagttactttccatggtgtgtgacatgaaacccgaaatccatgtgaactaccgcgccacaaattag

SEQ ID NO: 296519 - DNA, 357 bp, Artificial Sequence
  derived and/or modified sequence
atgaccagccagagccagggcatccaccagctgctgcaggccgagaagagggccaaggacaagctggaggaggccaagaagaggaagggcaagaggctgaagcaggccaaggaggaggccatggtggagattgaccagtacaggatgcagagggacaaggagttccggctgaagcagagcaagatcatgggcagccagaacaacctgagtgatgaaattgaggagcagaccctgggcaagatccaggagctgaatggccactacaacaagtacatggagagcgtgatgaaccagctgctgtccatggtgtgtgacatgaagccagagatccacgtgaactaccgggccaccaactag

SEQ ID NO: 296520 - DNA, 357 bp, Artificial Sequence
  derived and/or modified sequence
atgaccagccagagccagggcatccaccagctgctgcaggccgagaagcgagctaaggataagctagaggaggcaaagaagagaaaaggaaaaagacttaagcaggctaaggaggaagccatggtagagattgatcagtacaggatgcagcgggataaggaattccggctaaagcagtccaagataatgggctcccagaataacctcagcgacgagattgaggagcagacgttaggcaaaattcaggaattgaacggccactacaataagtacatggagagcgtcatgaatcaactgctgagcatggtgtgcgacatgaaacccgagatccacgtcaactatcgggctactaattag

SEQ ID NO: 296521 - DNA, 357 bp, Artificial Sequence
  derived and/or modified sequence
atgaccagccagagccagggcatccaccagctgctgcaggccgagaaacgagccaaagataagctcgaggaagctaagaaaaggaaagggaaacggttgaagcaggcaaaagaggaagcaatggtggaaatagaccaataccgaatgcagcgagataaagagtttagactgaagcagtccaagattatgggctcccagaataatctgtccgatgagatcgaggagcagactctgggaaagattcaggagttgaacggtcactacaataagtacatggaaagcgtgatgaatcaactgctgagcatggtttgcgatatgaagccagagatccatgttaactatcgtgccactaattag

SEQ ID NO: 296522 - DNA, 357 bp, Artificial Sequence
  derived and/or modified sequence
atgacctctcagagtcaggggatccatcagctgctccaggcggagaagcgcgctaaggacaaattggaggaggctaaaaaacgcaagggcaagcgactcaagcaagcaaaggaggaggctatggtcgagattgaccagtatagaatgcaacgggataaagaatttaggctgaaacaatctaaaataatgggctcccagaataacctcagtgacgagattgaggagcagacccttgggaagattcaagagctcaacggccactataataaatacatggagtccgtcatgaatcagttattgagtatggtttgcgacatgaaaccagagattcatgtgaactatagagctacaaattag

SEQ ID NO: 296523 - DNA, 357 bp, Artificial Sequence
  derived and/or modified sequence
atgacctctcagtcccagggcattcatcagctgctacaagcagagaaacgggctaaagacaagctggaggaagccaagaagaggaagggtaaacgcttaaagcaagcaaaagaagaagcaatggtggagatcgatcaataccgcatgcagcgcgacaaggagttccggcttaaacaaagtaagatcatgggctcccagaacaacctgagtgatgagattgaggaacaaacattaggcaagattcaggagctgaacggccattataacaagtacatggagtccgttatgaatcagcttctgagcatggtatgtgacatgaagccagagattcacgtgaattacagagccacaaattag

SEQ ID NO: 296524 - DNA, 628 bp, Artificial Sequence
  derived and/or modified sequence
tttataagtagatgcaacacctcatttatacctccttatctcatacagaagagctaagattggcagaaatgatttcacagaagccacttgcttggagcagactaccatgacaagccagtctcaggggatccaccagcttcttcaggcagaaaaacgggccaaggacaagctagaggaagccaagaagagaaaaggaaagcgattgaagcaagccaaggaggaagcaatggtagaaattgaccagtacagaatgcagagagataaagagtttcgactaaaacaatctaagataatgggctctcagaataatctctcagatgaaatagaagaacaaacactagggaagatacaagaacttaatggacactacaataagtatatggaaagtgtgatgaaccagctcttgagcatggtctgtgacatgaaaccagaaatccatgtgaactacagagccaccaactaaatgtacatcacagttttcaagaaaaaaaaaggtgtgtgagtgccacctggttgcttatggcttcgtatttttatgttgagaaatttgaaatgagaaccttaaatttacatttacaggaaatgtgacataactcatacatcggcactgaattaaacaaaacaaaat

SEQ ID NO: 296525 - DNA, 611 bp, Artificial Sequence
  derived and/or modified sequence
tgagttatatgttaatttctaaaagaataaatgaacccattacttcccagatttcacagaagccacttgcttggagcagactaccatgacaagccagtctcaggggatccaccagcttcttcaggcagaaaaacgggccaaggacaagctagaggaagccaagaagagaaaaggaaagcgattgaagcaagccaaggaggaagcaatggtagaaattgaccagtacagaatgcagagagataaagagtttcgactaaaacaatctaagataatgggctctcagaataatctctcagatgaaatagaagaacaaacactagggaagatacaagaacttaatggacactacaataagtatatggaaagtgtgatgaaccagctcttgagcatggtctgtgacatgaaaccagaaatccatgtgaactacagagccaccaactaaatgtacatcacagttttcaagaaaaaaaaaggtgtgtgagtgccacctggttgcttatggcttcgtatttttatgttgagaaatttgaaatgagaaccttaaatttacatttacaggaaatgtgacataactcatacatcggcactgaattaaacaaaacaaaatacaa

SEQ ID NO: 296526 - protein, 479 aa, Artificial Sequence
  derived and/or modified sequence
MSDVTIVKEGWVQKRGEYIKNWRPRYFLLKTDGSFIGYKEKPQDVDLPYPLNNFSVAKCQLMKTERPKPNTFIIRCLQWTTVIERTFHVDTPEEREEWTEAIQAVADRLQRQEEERMNCSPTSQIDNIGEEEMDASTTHHKRKTMNDFDYLKLLGKGTFGKVILVREKASGKYYAMKILKKEVIIAKDEVAHTLTESRVLKNTRHPFLTSLKYSFQTKDRLCFVMEYVNGGELFFHLSRERVFSEDRTRFYGAEIVSALDYLHSGKIVYRDLKLENLMLDKDGHIKITDFGLCKEGITDAATMKTFCGTPEYLAPEVLEDNDYGRAVDWWGLGVVMYEMMCGRLPFYNQDHEKLFELILMEDIKFPRTLSSDAKSLLSGLLIKDPNKRLGGGPDDAKEIMRHSFFSGVNWQDVYDKKLVPPFKPQVTSETDTRYFDEEFTAQTITITPPEKYDEDGMDCMDNERRPHFPQFSYSASGRE

SEQ ID NO: 296527 - DNA, 1440 bp, Artificial Sequence
  derived and/or modified sequence
atgagcgacgtgaccatcgtgaaggagggctgggtgcagaagagaggcgagtacatcaagaactggagacccagatacttcctgctgaagaccgacggcagcttcatcggctacaaggagaagccccaggacgtggacctgccctaccccctgaacaacttcagcgtggccaagtgccagctgatgaagaccgagagacccaagcccaacaccttcatcatcagatgcctgcagtggaccaccgtgatcgagagaaccttccacgtggacacccccgaggagagagaggagtggaccgaggccatccaggccgtggccgacagactgcagagacaggaggaggagagaatgaactgcagccccaccagccagatcgacaacatcggcgaggaggagatggacgccagcaccacccaccacaagagaaagaccatgaacgacttcgactacctgaagctgctgggcaagggcaccttcggcaaggtgatcctggtgagagagaaggccagcggcaagtactacgccatgaagatcctgaagaaggaggtgatcatcgccaaggacgaggtggcccacaccctgaccgagagcagagtgctgaagaacaccagacaccccttcctgaccagcctgaagtacagcttccagaccaaggacagactgtgcttcgtgatggagtacgtgaacggcggcgagctgttcttccacctgagcagagagagagtgttcagcgaggacagaaccagattctacggcgccgagatcgtgagcgccctggactacctgcacagcggcaagatcgtgtacagagacctgaagctggagaacctgatgctggacaaggacggccacatcaagatcaccgacttcggcctgtgcaaggagggcatcaccgacgccgccaccatgaagaccttctgcggcacccccgagtacctggcccccgaggtgctggaggacaacgactacggcagagccgtggactggtggggcctgggcgtggtgatgtacgagatgatgtgcggcagactgcccttctacaaccaggaccacgagaagctgttcgagctgatcctgatggaggacatcaagttccccagaaccctgagcagcgacgccaagagcctgctgagcggcctgctgatcaaggaccccaacaagagactgggcggcggccccgacgacgccaaggagatcatgagacacagcttcttcagcggcgtgaactggcaggacgtgtacgacaagaagctggtgccccccttcaagccccaggtgaccagcgagaccgacaccagatacttcgacgaggagttcaccgcccagaccatcaccatcaccccccccgagaagtacgacgaggacggcatggactgcatggacaacgagagaagaccccacttcccccagttcagctacagcgccagcggcagagagtag

SEQ ID NO: 296528 - DNA, 1440 bp, Artificial Sequence
  derived and/or modified sequence
atgagcgatgttacaattgtaaaggaaggctgggtacagaaaagaggcgagtacatcaagaattggcggccacgttattttctgctgaaaacagacggatcattcattgggtacaaggaaaaacctcaggacgtggacctgccctatcccctgaataacttttcagtggcaaagtgccagcttatgaaaactgaaagacctaaacccaacacctttatcattcgctgcctccaatggaccacagtgatcgagcgcacttttcatgttgatacaccggaagaaagggaggaatggaccgaggccattcaggctgtggcagaccgattgcagcgccaggaggaagagagaatgaattgctccccgactagccagattgataatataggcgaggaggaaatggatgcgtctactacacaccacaagagaaaaaccatgaatgacttcgattacctaaaacttcttggcaaaggcacatttggcaaggtgatccttgtgcgcgagaaggcctctgggaagtattacgctatgaaaattctgaagaaggaagttataatagctaaagatgaagtcgctcacactctgaccgaatccagggttcttaagaatacaaggcacccttttttgaccagcctcaagtactcattccaaactaaagatagactctgcttcgttatggaatatgtgaatggcggagaactatttttccacctctcaagggagcgcgtctttagcgaagataggaccaggttttatggggccgagatcgtgtcggcgttggattatctccactctgggaaaatagtgtacagggacctgaagctggagaacctgatgctggacaaagatgggcacattaagatcactgacttcggcctctgtaaagaagggatcaccgatgcagccactatgaaaaccttctgtggaacgcctgaatatttagccccggaggtgctggaagataacgactatggcagggctgtagactggtggggactgggcgtagtgatgtatgaaatgatgtgcgggagactgcctttctacaatcaagaccacgagaaattattcgaactgattctgatggaagacattaaattccctagaactctgagctcagacgccaagagtctgctgagcggattactgataaaagatcctaataagcgcctgggcggcggccctgatgacgctaaagaaattatgcggcattccttcttttccggcgtgaattggcaggacgtttatgacaagaagttggtgcctcctttcaagcctcaggtgaccagtgaaactgacacgcgctacttcgatgaagaatttacagctcagacaattacaatcacaccaccagaaaagtacgatgaggacggaatggactgcatggataacgaaagacggccgcatttcccccagttttcttacagtgcctcaggcagagagtag

SEQ ID NO: 296529 - DNA, 1440 bp, Artificial Sequence
  derived and/or modified sequence
atgagcgacgttacgatcgtgaaggagggatgggttcaaaaacggggagagtacatcaagaattggcggcctcgatactttctgctgaaaactgacggctctttcatcggttacaaagagaaacctcaggatgtcgaccttccttatccactgaataactttagcgtggccaagtgtcagctgatgaagaccgagcgcccgaaaccgaatacctttattatcaggtgtctgcagtggaccacagtgatcgagagaacgtttcacgtagacaccccggaagagagagaggaatggaccgaagctatacaggccgtcgccgatagactgcaaaggcaggaggaggaacggatgaactgctccccgacttctcagatcgataatataggcgaagaggaaatggacgccagtaccactcaccacaagcgcaaaaccatgaacgacttcgattacctgaaactgttgggaaagggcacatttggcaaggtcattctcgttcgggaaaaggccagcggcaaatattacgcaatgaaaatcttgaaaaaggaagttatcatagcgaaagatgaagtcgctcatactctgacggagtctagggtgttgaaaaacaccaggcacccttttttgacatccttaaagtactccttccagacgaaggatcggctctgttttgtgatggagtatgtgaacggcggcgaactgtttttccatctgagtcgggaacgtgtgttctcggaagatagaacgcgtttctacggggcagaaattgtctccgcactggactacttacattccggtaaaatcgtgtaccgcgatctgaagttggaaaacttgatgctggataaagatggccacatcaagattactgacttcggactgtgtaaagaaggtatcaccgacgccgccactatgaagacgttctgcgggacaccagaatacctcgctcctgaggtgctggaggataatgactatggcagagctgttgactggtggggattaggtgtcgtgatgtatgagatgatgtgtgggagacttcctttctacaatcaggatcatgaaaagctctttgaactcatactgatggaagatattaagtttccgagaacattgagcagcgacgcaaagtctttattatctgggttattgatcaaagatcctaataaaaggctgggaggcggacccgatgacgctaaggagatcatgagacactcctttttcagtggagtgaattggcaggacgtctacgacaagaaattagttccacccttcaagccacaggtgacttcagagacggatactcggtatttcgatgaggaattcaccgcacaaacaatcacaatcactccccctgagaagtacgatgaggatgggatggactgcatggataacgaaaggagaccgcactttccccagttctcgtacagtgcatcgggaagggagtag

SEQ ID NO: 296530 - DNA, 1440 bp, Artificial Sequence
  derived and/or modified sequence
atgtctgatgtgaccatcgtgaaggagggctgggtgcagaagagaggagagtacatcaagaactggaggccccgctacttcctgctgaagacagatggcagcttcatcggctacaaggagaagccccaggatgtggacctgccctaccccctgaacaacttctctgtggccaagtgccagctgatgaagacagagcggcccaagcccaacaccttcatcatccgctgcctgcagtggaccaccgtgattgaaagaaccttccacgtggacaccccagaggagcgggaggagtggacagaggccatccaggccgtggccgaccggctgcagaggcaggaggaggagaggatgaactgcagccccaccagccagattgacaacatcggggaggaggagatggatgccagcaccacccaccacaagaggaagaccatgaatgactttgactacctgaagctgctgggcaagggcaccttcggcaaggtgatcctggtgcgggagaaggccagcggcaagtactatgccatgaagatcctgaagaaggaggtgatcatcgccaaggatgaggtggcccacaccctgacagagagccgggtgctgaagaacaccaggcaccccttcctgaccagcctgaagtacagcttccagaccaaggaccggctgtgctttgtgatggagtatgtgaatggaggagagctgttcttccacctgagccgggagagggtcttcagcgaggacaggacccgcttctatggagctgagatcgtgtctgccctggactacctgcacagcggcaagatcgtgtacagagacctgaagctggagaacctgatgctggacaaggatggccacatcaagatcacagactttggcctgtgcaaggagggcatcacagatgctgccaccatgaagaccttctgtggcaccccagagtacctggcccctgaggtgctggaggacaatgactatggccgggctgtggactggtggggcctgggcgtggtgatgtatgagatgatgtgtggccgcctgcccttctacaaccaggaccacgagaagctgtttgagctgatcctgatggaggacatcaagttccccaggaccctgagcagtgatgccaagagcctgctgagcggcctgctgatcaaggaccccaacaagaggctgggcggcggcccagatgatgccaaggagatcatgaggcacagcttcttcagcggcgtgaactggcaggatgtgtatgacaagaagctggtgccccccttcaagccccaggtgaccagcgagacagacacccgctactttgatgaggagttcaccgcccagaccatcaccatcaccccacctgagaagtatgatgaagatggcatggactgcatggacaatgaaagaagaccccacttcccccagttctcctacagcgccagcggccgggagtag

SEQ ID NO: 296531 - DNA, 1440 bp, Artificial Sequence
  derived and/or modified sequence
atgagcgacgtgaccatcgtgaaggagggctgggtgcagaagcggggagaatatatcaagaactggaggccccggtattttctcttaaagacagacgggtcattcattggctataaggagaaacctcaggacgtggacctgccgtaccccttgaacaacttctctgtggccaagtgccaactcatgaagactgagaggcctaagcctaatacgttcattataaggtgccttcagtggaccaccgttattgaacggactttccacgtcgacacaccagaggaaagagaagaatggacagaggccatccaggctgtggcggaccggcttcaacgtcaagaggaagagaggatgaactgcagccctacttctcagatagataacattggggaggaagagatggacgcttcaactactcaccataagaggaaaaccatgaatgactttgattacctgaagcttctaggtaaaggaactttcggaaaggtgatcctggtgcgagagaaggcttccggtaagtactatgcgatgaagatactgaagaaggaggtcatcatcgccaaagacgaggtcgcccatactctcactgagtctagggtgttgaagaacacccggcacccgtttctgacaagcctcaagtactcctttcagactaaggaccgtctttgcttcgtcatggagtacgtcaatggaggcgagctgttttttcatctgtcccgggaacgcgtcttctcagaggatcggacccggttctacggtgcggaaatcgtgagcgctcttgactaccttcactccggtaagattgtgtaccgggacctcaagttagaaaacctgatgctcgacaaagacggtcacataaagataacagactttggattgtgcaaagagggaataactgacgcagccacgatgaagacattttgtgggactccagagtaccttgctcccgaggttcttgaagataatgactacggccgggccgtggattggtggggattaggggtagtaatgtacgaaatgatgtgcggcagactgcctttctataatcaggatcatgagaagctatttgagttaatcctaatggaggacataaaattcccgcggacgctttcaagcgacgctaagagtctcctgtctggccttctaatcaaggacccgaacaaaaggcttggcggcggacctgacgacgctaaagaaatcatgagacacagctttttttcgggcgttaattggcaggacgtgtacgacaaaaagcttgtgccccccttcaagccacaagtgaccagcgagactgacacaaggtacttcgacgaagagttcacagcacaaacaattaccattactccgcccgagaagtatgatgaggacggaatggactgcatggacaatgagcgaagacctcacttcccccagttttcttacagcgcaagcggccgtgaatag

SEQ ID NO: 296532 - DNA, 1440 bp, Artificial Sequence
  derived and/or modified sequence
atgagcgacgtgaccatcgtgaaggagggctgggtgcagaagcggggagaatatatcaaaaattggaggcctaggtatttcctcctcaagactgatggctcgtttatcggatataaggagaagcctcaggatgtggatcttccttatccactgaacaactttagcgttgcaaagtgtcaactaatgaagacggagcgcccaaagcctaacacttttattataagatgtctacaatggaccacagtaattgagcgcacgttccatgtagacactccggaggagcgagaagagtggaccgaggcaatccaggcagtggcagataggctccaacggcaagaggaggagagaatgaactgttcccccacaagccagatcgacaatatcggggaggaagagatggacgctagtactacacatcataaacggaaaacgatgaatgacttcgactaccttaaactgctgggcaagggaactttcggcaaggtgatacttgttcgagaaaaggcttccgggaaatactatgccatgaaaatcttgaagaaggaggtgatcatcgcgaaggacgaagtcgcccacacattgactgagtccagagtccttaagaacacccggcacccatttctgacaagtctgaagtactcattccagacgaaagatcgcttatgtttcgtgatggaatacgttaatggcggcgagttgtttttccacctttcacgagagcgggtcttcagcgaggatcggacacgcttttacggcgcagaaatcgtgtcagcgctggattatttgcactcaggaaagattgtctaccgggacctcaagcttgagaacctgatgctggataaggatggccacattaaaattactgacttcgggctgtgcaaagaaggtattactgacgcggccaccatgaagaccttttgtggtacccccgagtatcttgctcccgaagtgctggaagataatgattacggtcgtgccgtcgactggtggggactgggggtggttatgtatgaaatgatgtgcggccgtctgccattctacaaccaggaccacgagaaactgtttgaacttattctgatggaggacatcaagttccccaggaccctcagtagcgacgccaaatcacttctttcaggtctcctcataaaagaccccaacaaaagattggggggcgggcccgatgatgccaaagagattatgcggcacagcttcttctccggtgtcaattggcaggacgtctatgataaaaagctggtgccaccctttaaacctcaggtgacgagcgagaccgacacccgctacttcgatgaggagtttacagcgcagacaataacgatcaccccgcctgagaagtatgacgaagacggaatggactgcatggataatgaaagacgcccccacttcccacagttctcttatagcgcaagcggcagggaatag

SEQ ID NO: 296533 - DNA, 1440 bp, Artificial Sequence
  derived and/or modified sequence
atgagtgatgtcacaattgtgaaagaaggatgggtccaaaagcggggagagtatatcaaaaactggagaccccgatactttctcctgaaaacagacggatccttcattggatataaagagaaaccacaggatgtggaccttccatatccccttaacaacttcagtgtggcaaagtgtcagctcatgaagaccgagcgacccaaacccaacacattcattatcagatgtttacagtggacaacagtcatcgaacggacatttcatgtcgacacgccggaggaaagagaggaatggactgaagctatacaggccgtcgccgaccggctccagcggcaagaggaggagagaatgaactgtagccccacaagccagatcgacaacatcggtgaagaagaaatggacgcctccaccacacaccacaaaaggaagactatgaacgacttcgactatctgaaactgctcggcaaaggcacattcggtaaggttatccttgttcgagaaaaagccagcggcaaatactatgctatgaagatactcaaaaaagaagtgataatagcaaaggatgaggtggcccataccctcactgaaagcagagttctgaagaacactcggcatcctttcttgacaagtcttaagtactcattccaaacaaaggatcgactctgcttcgttatggaatacgtgaatgggggtgagctattctttcatcttagcagagaaagagtgtttagcgaagacaggacccggttctacggcgctgagattgtcagcgcgctggattatctccattcaggcaagattgtgtaccgcgatttgaagctggagaatttgatgttagacaaggacggacatatcaaaatcactgatttcggactgtgtaaggaaggcatcactgatgccgctactatgaaaactttttgtggaacccctgagtacttggcccctgaggttctggaagataacgattatggcagagcagtagactggtggggcctgggtgtggtcatgtacgagatgatgtgtgggaggctgccattctacaaccaggatcacgaaaagctttttgagttaatcttgatggaggatatcaaatttccacgaacacttagtagcgacgccaaatcgcttctgtctggactgctgattaaggatcccaataagcgcctcgggggaggcccagatgatgcaaaggaaatcatgcgccactccttcttctccggagtaaactggcaggatgtttatgacaaaaaactcgtgcccccatttaagccccaggtcacctctgagaccgataccaggtactttgatgaagagtttaccgctcagacaatcacaattactccacccgagaaatacgatgaggacggcatggattgtatggataatgagcgacggccacacttccctcagttctcctattctgcaagtggaagagagtag

SEQ ID NO: 296534 - DNA, 1440 bp, Artificial Sequence
  derived and/or modified sequence
atgagtgatgtgaccattgtgaaggaaggatgggtccagaagaggggtgaatacatcaagaactggcgcccaaggtactttctgctgaagaccgacgggtctttcatcggttacaaagagaaaccccaggacgtggacctgccataccccctgaacaacttctcggtggccaagtgccaactgatgaaaaccgaaagacctaagcctaacacattcatcatccggtgcctacagtggacaaccgtgattgaacggacattccacgtcgatacccccgaggagagggaggaatggacagaagccattcaggctgttgcggaccgcctgcagcggcaggaggaggagcgcatgaactgttcccccacaagccagattgataacattggggaagaggaaatggacgccagcacaacccaccacaagcgcaaaaccatgaatgatttcgattacctgaaactcctgggcaagggtacattcggtaaagtcatccttgtcagagaaaaagcatccggcaagtattacgccatgaaaattctgaagaaagaagtcataatcgccaaggacgaggtggcccacaccctgactgaaagcagggtgctgaaaaacacacggcacccctttctgacctctctaaagtacagcttccagaccaaggaccgcctctgtttcgtgatggaatacgttaacggaggcgagctgttctttcacttgtcaagggagagggtcttttctgaggatagaacacgattctacggggctgaaatcgtgtccgccctggactacctgcacagcggcaaaatcgtgtatcgggacctgaagctcgagaatctgatgctggacaaagatgggcacattaagattactgattttggtctgtgtaaggaggggataactgacgctgctaccatgaaaacattttgcgggacgccagaatacctcgctcccgaggttttggaggacaacgactacggccgtgcggttgattggtggggtctaggcgtggtaatgtacgagatgatgtgcggacgcctccccttttacaaccaagatcacgaaaaactctttgagttaatcctcatggaagacatcaaattcccaagaacgctctctagtgatgccaagtctcttctgtccggtctgctcattaaagaccctaacaagagactgggaggagggccagacgacgccaaagagataatgcggcatagtttcttcagcggcgtgaactggcaggacgtgtacgacaaaaagctcgtaccaccattcaagccacaggtgacttccgagacggatacaagatacttcgacgaggaatttacagcccagacaatcaccatcactcctccggagaaatacgacgaggatggaatggactgtatggacaacgaacgcaggccacactttccacagttttcttatagtgcctccggcagggaatag

SEQ ID NO: 296535 - DNA, 3588 bp, Artificial Sequence
  derived and/or modified sequence
gcagcagcagagaatccaaaccctaaagctgatatcacaaagtaccatttctccaagttgggggctcagaggggagtcatcatgagcgatgttaccattgtgaaagaaggttgggttcagaagaggggagaatatataaaaaactggaggccaagatacttccttttgaagacagatggctcattcataggatataaagagaaacctcaagatgtggatttaccttatcccctcaacaacttttcagtggcaaaatgccagttaatgaaaacagaacgaccaaagccaaacacatttataatcagatgtctccagtggactactgttatagagagaacatttcatgtagatactccagaggaaagggaagaatggacagaagctatccaggctgtagcagacagactgcagaggcaagaagaggagagaatgaattgtagtccaacttcacaaattgataatataggagaggaagagatggatgcctctacaacccatcataaaagaaagacaatgaatgattttgactatttgaaactactaggtaaaggcacttttgggaaagttattttggttcgagagaaggcaagtggaaaatactatgctatgaagattctgaagaaagaagtcattattgcaaaggatgaagtggcacacactctaactgaaagcagagtattaaagaacactagacatccctttttaacatccttgaaatattccttccagacaaaagaccgtttgtgttttgtgatggaatatgttaatgggggcgagctgtttttccatttgtcgagagagcgggtgttctctgaggaccgcacacgtttctatggtgcagaaattgtctctgccttggactatctacattccggaaagattgtgtaccgtgatctcaagttggagaatctaatgctggacaaagatggccacataaaaattacagattttggactttgcaaagaagggatcacagatgcagccaccatgaagacattctgtggcactccagaatatctggcaccagaggtgttagaagataatgactatggccgagcagtagactggtggggcctaggggttgtcatgtatgaaatgatgtgtgggaggttacctttctacaaccaggaccatgagaaactttttgaattaatattaatggaagacattaaatttcctcgaacactctcttcagatgcaaaatcattgctttcagggctcttgataaaggatccaaataaacgccttggtggaggaccagatgatgcaaaagaaattatgagacacagtttcttctctggagtaaactggcaagatgtatatgataaaaagcttgtacctccttttaaacctcaagtaacatctgagacagatactagatattttgatgaagaatttacagctcagactattacaataacaccacctgaaaaatatgatgaggatggtatggactgcatggacaatgagaggcggccgcatttccctcaattttcctactctgcaagtggacgagaataagtctctttcattctgctacttcactgtcatcttcaatttattactgaaaatgattcctggacatcaccagtcctagctcttacacatagcaggggcaccttccgacatcccagaccagccaagggtcctcacccctcgccacctttcaccctcatgaaaacacacatacacgcaaatacactccagtttttgtttttgcatgaaattgtatctcagtctaaggtctcatgctgttgctgctactgtcttactattatagcaactttaagaagtaattttccaacctttggaagtcatgagcccaccattgttcatttgtgcaccaattatcatcttttgatcttttagtttttccctcagtgaaggctaaatgagatacactgattctaggtacattttttaactttctagaagagaaaaactaactagactaagaagatttagtttataaattcagaacaagcaattgtggaagggtggtggcgtgcatatgtaaagcacatcagatccgtgcgtgaagtaggcatatatcactaagctgtggctggaattgattaggaagcatttggtagaaggactgaacaactgttgggatatatatatatatatataattttttttttttaaattcctggtggatactgtagaagaagcccatatcacatgtggatgtcgagacttcacgggcaatcatgagcaagtgaacactgttctaccaagaactgaaggcatatgcacagtcaaggtcacttaaagggtcttatgaaacaatttgagccagagagcatctttcccctgtgcttggaaaccttttttccttcttgacatttatcacctctgatggctgaagaatgtagacaggtataatgatactgcttttcaccaaaatttctacaccaaggtaaacaggtgtttgccttatttaattttttactttcagttctacgtgaattagctttttctcagatgttgaaactttgaatgtccttttatgattttgtttatattgcagtagtatttattttttagtgatgagaattgtatgtcatgttagcaaacgcagctccaacttatataaaatagacttactgcagttacttttgacccatgtgcaaggattgtacacgctgatgagaatcatgcactttttctcctctgttaaaaaaaatgataaggctctgaaatggaatatattggttagaatttggctttgggagaagagatgctgccatttaaccccttggtactgaaaatgagaaaatccccaactatgcatgccaaggggttaatgaaacaaatagctgttgacgtttgctcatttaagaatttgaaacgttatgatgacctggcaacaaaaagtaatgaagaaaattgagacctgagtgaagataagaaatgatctttacgtggcaaaatgaacacatcttgagtatttaggaaatgggcagtgaaggctaagaacctggtgtgtttcttgggatcatggtacatttatcactgaattaagccatcagggaaaaaacaacaaaaaaagagaacacctccagcttttctttttctgtatatactcatgtcccccagattccaacatttctcactgaaagggggcatgtatgcaaacctcatctttctccttcattaatgatgatcttcagattaaaccctttggtgctaggagctgacaatttccaaagcagcctgtgaagtcctaggggctgggggccactcttgcggcaagcagaaggccatcctactccgcggagtgatcatggaaatgtattttagttaaactctgacagctcccaaacggaagactacagcatgacgtagtattatgattgcattgtatgaaagagcaagtgactttctaagtaggatgaatcatattcatatgcagatgtcttagcctcttgacgctggaagtgtggatttatagctatgaaaccactgctggcagtgggtgggccactgggactgacgggggttaaagggcattttactaaggcagctaagacatattcagacatcaacgttatccttctttttcatatttctacctgagtgaag

SEQ ID NO: 296536 - DNA, 5127 bp, Artificial Sequence
  derived and/or modified sequence
ccctctcctccccccgcccccccccggctccatcctccgccgccgcccgagcagctgcggggccgccaccgccgccgccgccgttgcaggctgagtcatcactagagagtgggaagggcagcagcagcagagaatccaaaccctaaagctgatatcacaaagtaccatttctccaagttgggggctcagaggggagtcatcatgagcgatgttaccattgtgaaagaaggttgggttcagaagaggggagaatatataaaaaactggaggccaagatacttccttttgaagacagatggctcattcataggatataaagagaaacctcaagatgtggatttaccttatcccctcaacaacttttcagtggcaaaatgccagttaatgaaaacagaacgaccaaagccaaacacatttataatcagatgtctccagtggactactgttatagagagaacatttcatgtagatactccagaggaaagggaagaatggacagaagctatccaggctgtagcagacagactgcagaggcaagaagaggagagaatgaattgtagtccaacttcacaaattgataatataggagaggaagagatggatgcctctacaacccatcataaaagaaagacaatgaatgattttgactatttgaaactactaggtaaaggcacttttgggaaagttattttggttcgagagaaggcaagtggaaaatactatgctatgaagattctgaagaaagaagtcattattgcaaaggatgaagtggcacacactctaactgaaagcagagtattaaagaacactagacatccctttttaacatccttgaaatattccttccagacaaaagaccgtttgtgttttgtgatggaatatgttaatgggggcgagctgtttttccatttgtcgagagagcgggtgttctctgaggaccgcacacgtttctatggtgcagaaattgtctctgccttggactatctacattccggaaagattgtgtaccgtgatctcaagttggagaatctaatgctggacaaagatggccacataaaaattacagattttggactttgcaaagaagggatcacagatgcagccaccatgaagacattctgtggcactccagaatatctggcaccagaggtgttagaagataatgactatggccgagcagtagactggtggggcctaggggttgtcatgtatgaaatgatgtgtgggaggttacctttctacaaccaggaccatgagaaactttttgaattaatattaatggaagacattaaatttcctcgaacactctcttcagatgcaaaatcattgctttcagggctcttgataaaggatccaaataaacgccttggtggaggaccagatgatgcaaaagaaattatgagacacagtttcttctctggagtaaactggcaagatgtatatgataaaaagcttgtacctccttttaaacctcaagtaacatctgagacagatactagatattttgatgaagaatttacagctcagactattacaataacaccacctgaaaaatatgatgaggatggtatggactgcatggacaatgagaggcggccgcatttccctcaattttcctactctgcaagtggacgagaataagtctctttcattctgctacttcactgtcatcttcaatttattactgaaaatgattcctggacatcaccagtcctagctcttacacatagcaggggcaccttccgacatcccagaccagccaagggtcctcacccctcgccacctttcaccctcatgaaaacacacatacacgcaaatacactccagtttttgtttttgcatgaaattgtatctcagtctaaggtctcatgctgttgctgctactgtcttactattatagcaactttaagaagtaattttccaacctttggaagtcatgagcccaccattgttcatttgtgcaccaattatcatcttttgatcttttagtttttccctcagtgaaggctaaatgagatacactgattctaggtacattttttaactttctagaagagaaaaactaactagactaagaagatttagtttataaattcagaacaagcaattgtggaagggtggtggcgtgcatatgtaaagcacatcagatccgtgcgtgaagtaggcatatatcactaagctgtggctggaattgattaggaagcatttggtagaaggactgaacaactgttgggatatatatatatatatataattttttttttttaaattcctggtggatactgtagaagaagcccatatcacatgtggatgtcgagacttcacgggcaatcatgagcaagtgaacactgttctaccaagaactgaaggcatatgcacagtcaaggtcacttaaagggtcttatgaaacaatttgagccagagagcatctttcccctgtgcttggaaaccttttttccttcttgacatttatcacctctgatggctgaagaatgtagacaggtataatgatactgcttttcaccaaaatttctacaccaaggtaaacaggtgtttgccttatttaattttttactttcagttctacgtgaattagctttttctcagatgttgaaactttgaatgtccttttatgattttgtttatattgcagtagtatttattttttagtgatgagaattgtatgtcatgttagcaaacgcagctccaacttatataaaatagacttactgcagttacttttgacccatgtgcaaggattgtacacgctgatgagaatcatgcactttttctcctctgttaaaaaaaatgataaggctctgaaatggaatatattggttagaatttggctttgggagaagagatgctgccatttaaccccttggtactgaaaatgagaaaatccccaactatgcatgccaaggggttaatgaaacaaatagctgttgacgtttgctcatttaagaatttgaaacgttatgatgacctggcaacaaaaagtaatgaagaaaattgagacctgagtgaagataagaaatgatctttacgtggcaaaatgaacacatcttgagtatttaggaaatgggcagtgaaggctaagaacctggtgtgtttcttgggatcatggtacatttatcactgaattaagccatcagggaaaaaacaacaaaaaaagagaacacctccagcttttctttttctgtatatactcatgtcccccagattccaacatttctcactgaaagggggcatgtatgcaaacctcatctttctccttcattaatgatgatcttcagattaaaccctttggtgctaggagctgacaatttccaaagcagcctgtgaagtcctaggggctgggggccactcttgcggcaagcagaaggccatcctactccgcggagtgatcatggaaatgtattttagttaaactctgacagctcccaaacggaagactacagcatgacgtagtattatgattgcattgtatgaaagagcaagtgactttctaagtaggatgaatcatattcatatgcagatgtcttagcctcttgacgctggaagtgtggatttatagctatgaaaccactgctggcagtgggtgggccactgggactgacgggggttaaagggcattttactaaggcagctaagacatattcagacatcaacgttatccttctttttcatatttctacctgagtgaagttcatccttagtattgagtaggaagttacagtaaatggtagttcattcttacttacacacatagctaatcttttttttttcacttggaattatgttgaatgtttcattttgacaaaaaagtagactagaaggtatgttctttaagttgtcttgcatccattatataagaaagaaacaggtgagaggaagagcagaaagctgagactggctgatgttcagagcacttactcctctagagggaaagcatgacaccgaacactaagcacacagctttttgttgttttggttttttctcccgcaaatcttaaagtgattcccatgaccttggccaaggacacttcttaaagattaatgactggcactgacattgccccaggcgggccactcctcacactggctctcagttcccagccatgcctggggctcagtcacttctattccaccctctgagactccattggtgtcacacaaggtgtcttcttggctttgattttgagaatcccctattttcacttccagatctgtcagctgccatggaggaataatagaaaaccagaaatgcgtgtagagggagatttctaaaacttcccttgtgtcgcccatagttgtagttttgggttctggcaggtggaacaccctgaaacctggaatcattctatgagaatacagttcagactttgcagactccagcccatactaactgtcatgaagcttgacttcttgtcataatgcagccatcttggaggaaattggccatttctgcttagatggttggcagggtcgcgctcagctttgctttctacactaattacatagcattattcaagtattgttttccatttcccatccctgatttccagcttcttaaagctgactgttcttgcaggggccacttgcttctcctagagtacaaaagtaagggccttccttactaactgcagggtctctctattacacctcaacatacacactttgctgctactgtttgtactgtctacagtagaatttccttatcttgctcctggtagtgcattacaggcaagcatgaaatgtaaagtatttatttaaataaaaagaaaacctctaaattggtaattgaattacctccctgtagctttatagtttgtgacatttcttgaccttgctagttctttcattagatctgcgcaagatctagtcatctggttaaggattttaagcagatgcaactataaacccaagaaactgtattactattactgttggtcatactaaacctgtctatttcctgaagtatatgacccacaaggatgtggaataactaggagaaactgtttttgtacactgtacatccttagtatttttacacgtatatgatagggatgaacatgattttccttcgtacagacagcttaaataaagcactatgtcaatctgcta

SEQ ID NO: 296537 - DNA, 420 bp, Artificial Sequence
  derived and/or modified sequence
atgagcgacgtgaccatcgtgaaggagggctgggtgcagaagagaggcgagtacatcaagaactggagacccagatacttcctgctgaagaccgacggcagcttcatcggctacaaggagaagccccaggacgtggacctgccctaccccctgaacaacttcagcgtggccaagtgccagctgatgaagaccgagagacccaagcccaacaccttcatcatcagatgcctgcagtggaccaccgtgatcgagagaaccttccacgtggacacccccgaggagagagaggagtggaccgaggccatccaggccgtggccgacagactgcagagacaggaggaggagagaatgaactgcagccccaccagccagatcgacaacatcggcgaggaggagatggacgccagcaccacccactag

SEQ ID NO: 296538 - DNA, 420 bp, Artificial Sequence
  derived and/or modified sequence
atgtctgatgtgaccattgtgaaggaaggatgggtccagaagcggggcgaatatatcaagaattggcgtcccaggtacttcctgctcaaaaccgacggctcctttatcggctacaaagaaaaaccccaggacgtggacttgccttaccctctaaacaactttagcgtggctaagtgccagttaatgaagactgagaggccgaaacccaatacgtttatcattagatgcctgcagtggaccacagtcatcgagcgcaccttccacgtagacactcctgaagagcgggaggagtggactgaagcaatccaggctgtggccgaccgccttcaacgccaggaggaagagcggatgaattgctccccaactagtcaaatcgacaatattggagaagaagagatggatgcttccaccactcactag

SEQ ID NO: 296539 - DNA, 420 bp, Artificial Sequence
  derived and/or modified sequence
atgtctgatgtgaccatcgtgaaggagggctgggtgcagaagagaggagagtacatcaagaactggaggccccgctacttcctgctgaagacagatggcagcttcatcggctacaaggagaagccccaggatgtggacctgccctaccccctgaacaacttctctgtggccaagtgccagctgatgaagacagagcggcccaagcccaacaccttcatcatccgctgcctgcagtggaccaccgtgattgaaagaaccttccacgtggacaccccagaggagcgggaggagtggacagaggccatccaggccgtggccgaccggctgcagaggcaggaggaggagaggatgaactgcagccccaccagccagattgacaacatcggggaggaggagatggatgccagcaccacccactag

SEQ ID NO: 296540 - DNA, 420 bp, Artificial Sequence
  derived and/or modified sequence
atgagcgacgtgaccatcgtgaaggagggctgggtgcagaagcggggagaatatatcaagaactggcgacctagatatttcctgctgaagaccgacggttctttcatagggtacaaagagaagccccaggatgtggatctcccttaccctctgaacaacttttcagtagctaagtgccagctgatgaagactgaaaggcccaaacctaacacgtttattatacggtgccttcaatggacaactgtgattgagcggacttttcacgtggatactccagaggagcgggaagaatggaccgaggcgatccaggccgtcgccgacagattacagaggcaggaggaggaacggatgaactgcagtcctaccagccagattgataacatcggtgaggaagagatggacgcctcaaccacccactag

SEQ ID NO: 296541 - DNA, 420 bp, Artificial Sequence
  derived and/or modified sequence
atgtctgatgtaacaatcgtcaaagaaggctgggtccaaaaacggggagaatatattaagaactggcggccacggtactttctgctgaaaaccgatggttctttcatagggtataaagaaaaacctcaggacgtggatctgccttacccattgaataacttctctgtggctaagtgtcaacttatgaagaccgagaggccaaagccaaatacatttataatccgatgcttgcagtggacaacagttatagagcggacattccatgtggacacaccagaagagagggaagaatggacagaggctattcaggctgtcgccgatagactgcaaaggcaggaggaggagcggatgaattgctcgcctacatctcagatcgataacataggtgaggaagagatggatgcctcgacaacacattag

SEQ ID NO: 296542 - DNA, 560 bp, Artificial Sequence
  derived and/or modified sequence
attgggcaccgcccacttcgtgggcttccaggctgagtcatcactagagagtgggaagggcagcagcagcagagaatccaaaccctaaagctgatatcacaaagtaccatttctccaagttgggggctcagaggggagtcatcatgagcgatgttaccattgtgaaagaaggttgggttcagaagaggggagaatatataaaaaactggaggccaagatacttccttttgaagacagatggctcattcataggatataaagagaaacctcaagatgtggatttaccttatcccctcaacaacttttcagtggcaaaatgccagttaatgaaaacagaacgaccaaagccaaacacatttataatcagatgtctccagtggactactgttatagagagaacatttcatgtagatactccagaggaaagggaagaatggacagaagctatccaggctgtagcagacagactgcagaggcaagaagaggagagaatgaattgtagtccaacttcacaaattgataatataggagaggaagagatggatgcctctacaacccat

SEQ ID NO: 296543 - protein, 568 aa, Artificial Sequence
  derived and/or modified sequence
MKNKIQVVVLENEGLQQQLKSQRQEETLREQTLLDASGNMHNSWITTGEDSGVGETSKRPFSHDNADFGKAASAGEQLELEKLKLTYEEKCEIEESQLKFLRNDLAEYQRTCEDLKEQLKHKEFLLAANTCNRVGGLCLKCAQHEAVLSQTHTNVHMQTIERLVKERDDLMSALVSVRSSLADTQQREASAYEQVKQVLQISEEANFEKTKALIQCDQLRKELERQAERLEKELASQQEKRAIEKDMMKKEITKEREYMGSKMLILSQNIAQLEAQVEKVTKEKISAINQLEEIQSQLASREMDVTKVCGEMRYQLNKTNMEKDEAEKEHREFRAKTNRDLEIKDQEIEKLRIELDESKQHLEQEQQKAALAREECLRLTELLGESEHQLHLTRQEKDSIQQSFSKEAKAQALQAQQREQELTQKIQQMEAQHDKTENEQYLLLTSQNTFLTKLKEECCTLAKKLEQISQKTRSEIAQLSQEKRYTYDKLGKLQRRNEELEEQCVQHGRVHETMKQRLRQLDKHSQATAQQLVQLLSKQNQLLLERQSLSEEVDRLRTQLPSMPQSDC

SEQ ID NO: 296544 - DNA, 1707 bp, Artificial Sequence
  derived and/or modified sequence
atgaagaataaaattcaggtggtagtactggagaacgaaggcctccagcagcagctcaaatcccagcgacaggaggaaacactcagagagcagacactgctggatgctagtggcaacatgcacaacagctggatcaccactggagaagactctggtgtcggcgagacaagcaaacgaccattctcacatgataatgcggattttggcaaagcggcctccgctggcgaacaactggagctcgagaagcttaaactgacgtacgaagagaagtgtgagatagaagagtcgcaactcaaattccttcgaaacgatctggcagagtatcagcgaacctgtgaagatctcaaggagcaattaaagcacaaagagtttctgctcgcagctaatacttgcaacagagtcggtggtttatgtctgaagtgtgcccagcatgaggccgttctatcccagactcatactaatgtgcatatgcaaacaatcgaaaggcttgtgaaggagagggacgacctcatgtctgccttggtttccgtacgttctagtttggccgacacgcagcaacgagaagcctccgcttatgagcaggttaagcaggtgcttcaaataagcgaagaagccaacttcgaaaaaaccaaggccctcattcagtgtgaccagctccgcaaagaactcgagaggcaggccgaaagactggagaaagagctagccagccagcaagaaaagcgcgcaatagaaaaagatatgatgaagaaagaaatcactaaagaaagggaatacatgggcagcaagatgctgatcctgtctcaaaatatcgcccaacttgaggctcaggtggagaaggtaaccaaggaaaagatctcagccatcaatcagctggaggagatccagagtcaactcgcatccagggaaatggacgtcaccaaggtctgcggcgagatgcgttatcagctgaacaaaacaaatatggagaaagacgaagctgaaaaagagcaccgagagtttagagccaagacaaaccgtgaccttgagatcaaggaccaagagattgaaaagttgcgcatcgaactagacgaatctaagcaacacttagaacaggaacagcagaaagcagcactcgcgagggaggaatgcctgagactgacggaactgctcggcgaatccgagcatcagctgcatctgacacgccaggaaaaggactcgatccagcagagcttcagcaaagaggccaaggctcaggcactgcaggctcagcagcgggagcaggaactgacgcaaaaaatccaacagatggaagcccagcatgataagacagaaaatgaacagtacctcctgctgactagccaaaataccttcctgaccaaactgaaagaggagtgttgcacactagcgaagaagttggagcagatttcccagaaaaccaggagcgagatcgcccagctgagccaggaaaaacgatacacctacgacaagctgggcaagttgcagagaagaaacgaagagctggaggagcagtgcgtccagcacgggcgagtccatgagactatgaaacagcggttacgtcagctggacaaacattctcaagctacagcacagcagttggttcagttactctcaaagcaaaatcagctcttactagagagacaatcactgtctgaggaagtggaccggttgcggactcaactcccctctatgcctcagtccgattgttag

SEQ ID NO: 296545 - DNA, 1707 bp, Artificial Sequence
  derived and/or modified sequence
atgaagaacaagatccaggtggtggtgctggagaatgaaggcctgcagcagcagctgaagagccagaggcaggaggagaccctgcgggagcagaccctgctggatgccagcggcaacatgcacaacagctggatcaccactggagaagattctggagtgggggagaccagcaagaggcccttcagccatgacaatgctgactttgggaaggccgccagcgctggggagcagctggagctggagaagctgaagctgacctatgaggagaagtgtgaaattgaggagagccagctgaagttcctgagaaatgacctggccgagtaccagaggacctgtgaggacctgaaggagcagctgaagcacaaggagttcctgctggccgccaacacctgcaacagagtgggcggcctgtgcctgaagtgtgcccagcacgaggccgtgctgagccagacccacaccaacgtgcacatgcagaccatcgagcggctggtgaaggagagagatgacctgatgtctgccctggtgtctgtgcgcagcagcctggccgacacccagcagcgggaggccagcgcctatgagcaggtgaagcaggtgctgcagatcagcgaggaggccaactttgagaagaccaaggccctgatccagtgtgaccagctgaggaaggagctggagcggcaggccgagcggctggagaaggagctggccagccagcaggagaagagggccatcgagaaggacatgatgaagaaggagatcaccaaggagcgggagtacatgggcagcaagatgctgatcctgagccagaacatcgcccagctggaggcccaggtggagaaggtgaccaaggagaagatcagcgccatcaaccagctggaggagatccagagccagctggccagccgggagatggatgtgaccaaggtgtgtggggagatgagataccagctgaacaagaccaacatggagaaggatgaggccgagaaggagcaccgggagttccgggccaagaccaacagagacctggagatcaaggaccaggagattgagaagctgagaattgagctggatgagagcaagcagcacctggagcaggagcagcagaaggccgccctggcccgggaggagtgcctgcggctgacagagctgctgggggagagcgagcaccagctgcacctgacccggcaggagaaggacagcatccagcagagcttcagcaaggaggccaaggcccaggccctgcaggcccagcagcgggagcaggagctgacccagaagatccagcagatggaggcccagcacgacaagacagaaaatgagcagtacctgctgctgaccagccagaacaccttcctgaccaagctgaaggaggagtgctgcaccctggccaagaagctggagcagatcagccagaagaccaggtctgagatcgcccagctgagccaggagaagcgctacacctatgacaagctgggcaagctgcagaggagaaatgaggagctggaggagcagtgtgtgcagcacggccgggtgcatgagaccatgaagcagaggctgcggcagctggacaagcacagccaggccacagcccagcagctggtgcagctgctgagcaagcagaaccagctgctgctggagcggcagagcctgtctgaggaggtggaccggctgcggacccagctgcccagcatgccccagagcgactgctag

SEQ ID NO: 296546 - DNA, 1707 bp, Artificial Sequence
  derived and/or modified sequence
atgaagaacaagatccaggtggtggtgctggagaacgagggcctgcagcagcagctcaaatctcagaggcaggaggaaaccctgcgcgaacagaccctcctagatgcttctggaaacatgcataactcatggatcaccactggcgaggattctggcgtgggagagacctctaaaagaccatttagccatgacaacgctgatttcggaaaagctgcgtctgccggcgagcagttggaactggaaaaactcaagcttacctatgaagagaaatgcgaaatcgaggaaagccagctgaagttccttagaaatgacttagcagagtaccagcgtacttgcgaagacctcaaagaacagctgaagcacaaagagtttctgctggccgccaatacttgtaatagggtcgggggtctgtgtctcaaatgcgcacagcacgaggccgtgctctcccagacccataccaatgtgcatatgcagacaatagaacgcctggtgaaagagagggatgacctgatgagcgccttagtcagcgtgcgctctagtctggcggacacccaacagagggaggctagtgcctacgagcaagtgaaacaggtgctgcagatttcagaggaagccaattttgaaaagaccaaagcgctgatacagtgtgatcaattgaggaaggaacttgagcgacaggccgagaggctggagaaggagctcgcgtcccaacaggaaaaaagagctattgaaaaagatatgatgaagaaagagatcacaaaggagagagagtacatggggtccaagatgttgatcttgagccagaacattgcacagctcgaagcccaggtagaaaaagtgaccaaggaaaagattagtgccattaatcagcttgaagagatacagagtcaactcgcaagcagggaaatggatgtcactaaggtatgcggcgaaatgaggtatcagcttaataaaacaaatatggagaaagatgaggccgagaaggagcaccgcgaattccgtgctaaaacgaatcgcgatctcgagattaaggaccaggagatcgagaagttgagaattgagctggacgagagtaagcagcacttggaacaggagcagcagaaggccgctctggccagagaggaatgtctgagactgacagagctgctgggggagtctgagcatcagttgcatctgacacggcaggagaaggattctattcagcaatcttttagcaaggaagcaaaggctcaggcgttgcaggctcagcaacgcgagcaagagctgacccaaaagatacaacagatggaagctcagcacgacaaaaccgagaacgaacagtacctcctccttacttcacagaacactttcctgacaaagttaaaggaggagtgctgtacgctggcaaaaaagttggaacaaatctcccagaagacaagaagtgagattgctcagctgtcacaagagaagaggtacacatatgacaaactgggcaaacttcaaagaagaaacgaagagttggaagagcagtgcgtccaacacggccgcgttcacgaaactatgaaacagaggctcagacagctggacaaacatagccaggcaaccgcccagcagcttgttcaactgttgtccaagcagaatcagctgctgctggaacgccaatctctgtccgaggaggttgacagacttaggacccaactcccgtccatgccccaatctgattgctag

SEQ ID NO: 296547 - DNA, 1707 bp, Artificial Sequence
  derived and/or modified sequence
atgaaaaataaaatccaggtagtggtgctcgaaaacgagggtttgcagcagcagctgaagagccagagacaggaagaaacacttagggagcaaactcttctggatgcctccggtaacatgcataacagctggattactaccggtgaagacagcggcgtaggtgaaacaagcaagcgtcctttcagccatgataacgcggactttgggaaggccgcttccgcaggtgagcagctggaattagagaaactaaagttaacgtatgaggagaaatgtgaaatcgaggagtcccagcttaagttcctaaggaacgatttggccgaataccagcggacatgcgaagatctgaaagagcaactcaagcacaaggagttcctcttagctgccaatacatgcaatcgcgtcggcggactgtgtctaaagtgcgcccaacacgaggctgtgctgtcacaaacccacactaatgtccacatgcaaactatcgagcggttggtgaaggaacgtgatgacctgatgagcgcccttgtatctgtccgctcttctctggctgatacacaacagcgtgaggcttccgcttacgaacaggtcaaacaggtgctgcaaattagcgaagaggccaattttgagaaaacaaaggcgctgatccagtgtgatcagttacgcaaagagctagagcgacaagcggaacggctggaaaaggagcttgcgagtcagcaggaaaagagagccattgagaaggatatgatgaaaaaggagataacgaaagagcgcgaatacatgggctcgaagatgctgattttaagtcagaatatcgcacaactcgaggcccaagtcgagaaagttaccaaagagaagattagtgcaatcaatcagctcgaggaaatacagagtcagctagcatcacgcgagatggatgtgacaaaagtgtgtggggagatgcgatatcagctcaataaaaccaacatggaaaaggacgaagctgaaaaggagcatcgggaattccgggctaagaccaaccgggacctcgagatcaaggaccaggaaattgagaagctccgcatagagttagatgagagcaaacagcacttagagcaagagcagcagaaagccgcactggccagagaggagtgtctccggctgacggagctgcttggagaatctgaacatcaactgcacctgacacgccaggaaaaagattctatccagcagagtttcagcaaggaggctaaagcacaggccttgcaggcgcaacagcgggagcaggagctgacacagaagattcaacagatggaagctcaacacgacaagactgagaacgagcagtacctcctgctgacatcccagaacacattcctcacgaagttaaaagaagaatgctgcactctcgccaagaagctggaacagatctcgcagaagactcggtccgagatagcacagctgagtcaggagaaaagatatacctatgataagttgggcaaactgcagcgcagaaacgaggaactggaggaacagtgcgtgcagcatggaagggtacacgagactatgaagcagagactcagacaactggacaagcactcccaggccaccgcccagcagctcgttcaacttttgagcaaacagaatcagctgctcctagagcgccagagtctcagcgaagaggtagaccgcctgagaactcaattgccctctatgccccagagtgattgttag

SEQ ID NO: 296548 - DNA, 2198 bp, Artificial Sequence
  derived and/or modified sequence
aggaagcaggcgggcgctccccggccacaggcctgttgttctcggaagggagaaagctggacatttccccacgtaactcccagctctgggcctagagtgcgtgcatggcgaagtccccggagaactctaccctggaggagattctggggcagtatcaacggagtctccggggaggaactctctggaatgaaaaataaaatacaagtagttgtgcttgaaaacgaagggctccagcaacagctaaaatctcaaagacaagaggagacactgagggaacaaacacttctggatgcatccggaaacatgcacaattcttggattacaacaggtgaagattctggggtgggcgaaacctccaaaagaccattttcccatgacaatgcagattttggcaaagctgcatctgctggtgagcagctagaactggagaagctaaaacttacttatgaggaaaagtgtgaaattgaggaatcccaattgaagtttttgaggaacgacttagctgaatatcagagaacttgtgaagatcttaaagagcaactaaagcataaagaatttcttctggctgctaatacttgtaaccgtgttggtggtctttgtttgaaatgtgctcagcatgaagctgttctttcccaaacccatactaatgttcatatgcagaccatcgaaagactggttaaagaaagagatgacttgatgtctgcactagtttccgtaaggagcagcttggcagatacgcagcaaagagaagcaagtgcttatgaacaggtgaaacaagttttgcaaatatctgaggaagccaattttgaaaaaaccaaggctttaatccagtgtgaccagttgaggaaggagctggagaggcaggcggagcgacttgaaaaagaacttgcatctcagcaagagaaaagggccattgagaaagacatgatgaaaaaggaaataacgaaagaaagggagtacatgggatcaaagatgttgatcttgtctcagaatattgcccaactggaggcccaggtggaaaaggttacaaaggaaaagatttcagctattaatcaactggaggaaattcaaagccagctggcttctcgggaaatggatgtcacaaaggtgtgtggagaaatgcgctatcagctgaataaaaccaacatggagaaggatgaggcagaaaaggagcacagagagttcagagcaaaaactaacagggatcttgaaattaaagatcaggaaatagagaaattgagaatagaactggatgaaagcaaacaacacttggaacaggagcagcagaaggcagccctggccagagaggagtgcctgagactaacagaactgctgggcgaatctgagcaccaactgcacctcaccagacaggaaaaagatagcattcagcagagctttagcaaggaagcaaaggcccaagcccttcaggcccagcaaagagagcaggagctgacacagaagatacagcaaatggaggcccagcatgacaaaactgaaaatgaacagtatttgttgctgacctcccagaatacatttttgacaaagttaaaggaagaatgctgtacattagccaagaaactggaacaaatctctcaaaaaaccagatctgaaatagctcaactcagtcaagaaaaaaggtatacatatgataaattgggaaagttacagagaagaaatgaagaattggaggaacagtgtgtccagcatgggagagtacatgagacgatgaagcaaaggctaaggcagctggataagcacagccaggccacagcccagcagctggtgcagctcctcagcaagcagaaccagcttctcctggagaggcagagcctgtcggaagaggtggaccggctgcggacccagttacccagcatgccacaatctgattgctgacctggatggaacagagtgaaataaatgatttacaaagagatatttacattcatctggtttagacttaatatgccacaacgcaccacgaccttcccagggtgacaccgcctcagcctgcagtggggctggtcctcatcaacgcgggcgctgtccccgcacgcagtcgggctggagctggagtctgactctagctgagcagagctcctggtgtatgttttcagaaatggcttgaagttatgtgtttaaatctgctcattcgtatgctaggttatacatatgattttcaataaatgaactttttaaag

SEQ ID NO: 296549 - DNA, 1707 bp, Artificial Sequence
  derived and/or modified sequence
atgaagaacaagatccaggtggtggtgctggagaacgagggcctgcagcagcagctgaagagccagagacaggaggagaccctgagagagcagaccctgctggacgccagcggcaacatgcacaacagctggatcaccaccggcgaggacagcggcgtgggcgagaccagcaagagacccttcagccacgacaacgccgacttcggcaaggccgccagcgccggcgagcagctggagctggagaagctgaagctgacctacgaggagaagtgcgagatcgaggagagccagctgaagttcctgagaaacgacctggccgagtaccagagaacctgcgaggacctgaaggagcagctgaagcacaaggagttcctgctggccgccaacacctgcaacagagtgggcggcctgtgcctgaagtgcgcccagcacgaggccgtgctgagccagacccacaccaacgtgcacatgcagaccatcgagagactggtgaaggagagagacgacctgatgagcgccctggtgagcgtgagaagcagcctggccgacacccagcagagagaggccagcgcctacgagcaggtgaagcaggtgctgcagatcagcgaggaggccaacttcgagaagaccaaggccctgatccagtgcgaccagctgagaaaggagctggagagacaggccgagagactggagaaggagctggccagccagcaggagaagagagccatcgagaaggacatgatgaagaaggagatcaccaaggagagagagtacatgggcagcaagatgctgatcctgagccagaacatcgcccagctggaggcccaggtggagaaggtgaccaaggagaagatcagcgccatcaaccagctggaggagatccagagccagctggccagcagagagatggacgtgaccaaggtgtgcggcgagatgagataccagctgaacaagaccaacatggagaaggacgaggccgagaaggagcacagagagttcagagccaagaccaacagagacctggagatcaaggaccaggagatcgagaagctgagaatcgagctggacgagagcaagcagcacctggagcaggagcagcagaaggccgccctggccagagaggagtgcctgagactgaccgagctgctgggcgagagcgagcaccagctgcacctgaccagacaggagaaggacagcatccagcagagcttcagcaaggaggccaaggcccaggccctgcaggcccagcagagagagcaggagctgacccagaagatccagcagatggaggcccagcacgacaagaccgagaacgagcagtacctgctgctgaccagccagaacaccttcctgaccaagctgaaggaggagtgctgcaccctggccaagaagctggagcagatcagccagaagaccagaagcgagatcgcccagctgagccaggagaagagatacacctacgacaagctgggcaagctgcagagaagaaacgaggagctggaggagcagtgcgtgcagcacggcagagtgcacgagaccatgaagcagagactgagacagctggacaagcacagccaggccaccgcccagcagctggtgcagctgctgagcaagcagaaccagctgctgctggagagacagagcctgagcgaggaggtggacagactgagaacccagctgcccagcatgccccagagcgactgctag

SEQ ID NO: 296550 - protein, 670 aa, Artificial Sequence
  derived and/or modified sequence
MAKSPENSTLEEILGQYQRSLREHASRSIHQLTCALKEGDVTIGEDAPNLSFSTSVGNEDARTAWPELQQSHAVNQLKDLLRQQADKESEVSPSRRRKMSPLRSLEHEETNMPTMHDLVHTINDQSQYIHHLEAEVKFCKEELSGMKNKIQVVVLENEGLQQQLKSQRQEETLREQTLLDASEKLKLTYEEKCEIEESQLKFLRNDLAEYQRTCEDLKEQLKHKEFLLAANTCNRVGGLCLKCAQHEAVLSQTHTNVHMQTIERLVKERDDLMSALVSVRSSLADTQQREASAYEQVKQVLQISEEANFEKTKALIQCDQLRKELERQAERLEKELASQQEKRAIEKDMMKKEITKEREYMGSKMLILSQNIAQLEAQVEKVTKEKISAINQLEEIQSQLASREMDVTKVCGEMRYQLNKTNMEKDEAEKEHREFRAKTNRDLEIKDQEIEKLRIELDESKQHLEQEQQKAALAREECLRLTELLGESEHQLHLTRQEKDSIQQSFSKEAKAQALQAQQREQELTQKIQQMEAQHDKTENEQYLLLTSQNTFLTKLKEECCTLAKKLEQISQKTRSEIAQLSQEKRYTYDKLGKLQRRNEELEEQCVQHGRVHETMKQRLRQLDKHSQATAQQLVQLLSKQNQLLLERQSLSEEVDRLRTQLPSMPQSDC

SEQ ID NO: 296551 - DNA, 2013 bp, Artificial Sequence
  derived and/or modified sequence
atggctaagtcccctgagaactccacattagaggagattcttggacagtatcaaaggtccttacgggagcatgcctcgaggagcattcaccagctcacctgtgcactcaaagagggggacgtgacaatcggtgaggatgcccctaatttaagcttttcaacgagcgtggggaacgaggatgcgagaaccgcgtggcctgagttgcagcagtctcacgctgtaaatcagctgaaagacttactccggcagcaggcagataaggagtcagaagtttccccatctcgacgacggaagatgagtccactcagaagcttggagcatgaagagaccaacatgcccaccatgcacgacctcgtacacacaataaacgaccagtcacaatacattcaccaccttgaggccgaggtcaagttctgtaaggaggagctaagcggaatgaaaaacaaaatccaggtagtggtgctggagaatgagggcctccaacagcaactgaaatcccagcgccaggaagagactctgagagaacaaaccctcctggacgcatccgaaaagttgaaacttacgtacgaggagaagtgcgagatcgaggaatcccagctgaaatttctcagaaacgacctggcggagtatcagagaacttgcgaagacctaaaggaacagctcaagcataaagagttcctgttggctgcaaatacttgcaacagggtgggagggttgtgtctgaaatgcgctcagcacgaagcagtgctaagccagacacacactaatgtgcacatgcagactatcgagcggctggtgaaggaacgtgacgacttaatgtccgcattagtaagcgttcgctccagtctggcggatacgcagcagagagaggctagtgcgtatgaacaggtcaagcaagtgttgcaaatctcagaagaagcaaacttcgaaaaaaccaaggcactcatccagtgtgatcagttgcggaaggagctcgaacgccaggccgaacgcctcgagaaagagttggcctcccaacaagaaaaacgggccatagagaaagacatgatgaagaaggagatcaccaaagagagagaatatatggggagcaagatgctaatactgtcacagaatatcgctcaactggaagcccaggttgaaaaagtgaccaaagagaagatttccgcaattaatcagctcgaggaaatccaatcccagctggcaagccgcgaaatggatgtaaccaaagtttgtggagaaatgcgttaccaattgaacaaaaccaacatggagaaggacgaggccgagaaagagcacagggaatttcgagccaaaacaaaccgagatctggagatcaaggatcaggaaatcgaaaagctacggattgagctggatgagagcaaacagcacctcgagcaggaacaacagaaggctgctctggctagagaggagtgcctgcgcctgacggaactcttgggcgagtccgagcaccaactacacctaacccggcaggaaaaggactcaattcagcagtccttttctaaggaggccaaggcccaggcgctccaggctcagcagagggagcaggagctcactcagaagattcaacaaatggaggctcagcatgataagacggaaaatgaacagtatctcctgctaaccagccagaatacatttctgacgaagctgaaagaggagtgctgtactcttgcaaagaaattggaacaaattagtcaaaagacccgtagcgagatcgctcagctgtctcaggaaaaacgctacacctacgataagctcggaaagttacagcggcggaatgaggaactcgaagaacaatgtgtgcagcacggcagagtacacgagaccatgaaacaaagactgaggcagctggacaaacattctcaagctacagctcaacagctggtgcagctgctctccaaacagaaccaactgctcctcgaacgccagtcactaagcgaggaggttgatcgcctcagaacccaactgccaagtatgcctcaaagcgactgttag

SEQ ID NO: 296552 - DNA, 2013 bp, Artificial Sequence
  derived and/or modified sequence
atggccaagagccctgagaacagcaccctggaggagatcctgggccagtaccagaggagcctgcgggagcacgccagccgcagcatccaccagctgacctgtgccctgaaggagggagatgtgaccatcggagaagatgcccccaacctgtccttcagcacctctgtgggcaatgaagatgccaggacagcctggccagagctgcagcagagccatgctgtgaaccagctgaaggacctgctgcggcagcaggccgacaaggagagcgaggtgagccccagcagaagaaggaagatgagccccctgcggagcctggagcacgaggagaccaacatgcccaccatgcatgacctggtgcacaccatcaatgaccagagccagtacatccaccacctggaggccgaggtgaagttctgcaaggaggagctgagcggcatgaagaacaagatccaggtggtggtgctggagaatgaaggcctgcagcagcagctgaagagccagaggcaggaggagaccctgcgggagcagaccctgctggatgccagcgagaagctgaagctgacctatgaggagaagtgtgaaattgaggagagccagctgaagttcctgagaaatgacctggccgagtaccagaggacctgtgaggacctgaaggagcagctgaagcacaaggagttcctgctggccgccaacacctgcaacagagtgggcggcctgtgcctgaagtgtgcccagcacgaggccgtgctgagccagacccacaccaacgtgcacatgcagaccatcgagcggctggtgaaggagagagatgacctgatgtctgccctggtgtctgtgcgcagcagcctggccgacacccagcagcgggaggccagcgcctatgagcaggtgaagcaggtgctgcagatcagcgaggaggccaactttgagaagaccaaggccctgatccagtgtgaccagctgaggaaggagctggagcggcaggccgagcggctggagaaggagctggccagccagcaggagaagagggccatcgagaaggacatgatgaagaaggagatcaccaaggagcgggagtacatgggcagcaagatgctgatcctgagccagaacatcgcccagctggaggcccaggtggagaaggtgaccaaggagaagatcagcgccatcaaccagctggaggagatccagagccagctggccagccgggagatggatgtgaccaaggtgtgtggggagatgagataccagctgaacaagaccaacatggagaaggatgaggccgagaaggagcaccgggagttccgggccaagaccaacagagacctggagatcaaggaccaggagattgagaagctgagaattgagctggatgagagcaagcagcacctggagcaggagcagcagaaggccgccctggcccgggaggagtgcctgcggctgacagagctgctgggggagagcgagcaccagctgcacctgacccggcaggagaaggacagcatccagcagagcttcagcaaggaggccaaggcccaggccctgcaggcccagcagcgggagcaggagctgacccagaagatccagcagatggaggcccagcacgacaagacagaaaatgagcagtacctgctgctgaccagccagaacaccttcctgaccaagctgaaggaggagtgctgcaccctggccaagaagctggagcagatcagccagaagaccaggtctgagatcgcccagctgagccaggagaagcgctacacctatgacaagctgggcaagctgcagaggagaaatgaggagctggaggagcagtgtgtgcagcacggccgggtgcatgagaccatgaagcagaggctgcggcagctggacaagcacagccaggccacagcccagcagctggtgcagctgctgagcaagcagaaccagctgctgctggagcggcagagcctgtctgaggaggtggaccggctgcggacccagctgcccagcatgccccagagcgactgctag

SEQ ID NO: 296553 - DNA, 2013 bp, Artificial Sequence
  derived and/or modified sequence
atggccaagagccccgagaacagcaccctggaggagatcctgggccaataccagcggtccctgagagagcatgcttccagaagtatccaccaactcacatgcgccctcaaagagggcgacgttaccattggtgaagatgccccgaatctctctttcagcacaagcgtgggcaacgaggacgctcgcacggcctggcctgagttgcagcagagccatgccgtcaaccagcttaaggatctgctaagacagcaggctgataaagagtccgaggtgtctcccagccgacggaggaaaatgtctcctttgagatctctagagcatgaagagaccaatatgccaactatgcatgacttagtacacaccatcaatgaccagagccaatacattcaccatctcgaggctgaagtcaagttctgcaaggaggagctatctggcatgaaaaataagatccaggtggtggttctggaaaatgaaggccttcagcagcaacttaagagccaacggcaggaagaaactcttcgcgagcaaacactgcttgatgcgagcgagaagttaaaacttacttacgaagaaaagtgcgaaattgaagaatcccaactcaagtttctgaggaacgacctggccgagtaccaacgtacttgtgaagatcttaaagaacagcttaaacataaagagtttcttctggccgccaacacttgtaaccgggttggcggcctgtgtctcaaatgcgcacagcatgaggcagtacttagtcagactcacaccaacgttcatatgcagacgatcgaaagactggtgaaggagagggacgacttgatgtctgccctggtgtcagtcaggagcagcctagctgacacccagcagagggaagccagtgcgtacgaacaggtaaaacaagtgctccagatttctgaggaggccaacttcgaaaaaactaaggctctgattcagtgcgaccagctcagaaaggagttagagcgccaggctgagagacttgagaaagagttagcttctcagcaagaaaaacgagcgatcgagaaagacatgatgaaaaaggagattacgaaggagagagagtatatgggtagcaagatgcttatcctgtcccagaatatcgcccagctcgaggcacaagtcgaaaaagtcactaaggaaaagatctccgcaattaatcagctggaggaaatccagagccagctggcctctcgtgaaatggacgtcactaaagtttgtggggaaatgcgctatcaactgaacaagaccaacatggagaaagatgaggcagagaaggagcatcgcgagtttcgcgccaagacgaaccgggatttagaaattaaagaccaggaaattgagaagttgcgaattgagctggacgagtccaagcaacacctcgagcaggagcagcagaaagccgccctggctcgtgaggaatgtttacgtctgacagagctgctcggcgaaagcgagcatcaactgcacttgactagacaagagaaggacagcatacaacagagtttcagtaaggaagctaaggcacaggccctccaggctcagcagagagagcaggagctgacacagaagatacagcaaatggaagcccagcatgataaaacagaaaacgaacagtatttgcttttaacgtcgcagaatacctttctcacaaagctgaaagaagaatgctgcacactcgccaaaaagttggagcaaatttcccagaagactaggagcgagattgcgcagctgtcccaggagaaacggtacacatacgataagcttggcaagctgcagagacgcaatgaggaactcgaagagcagtgcgtccagcatggtagggtgcatgagacaatgaaacagcgtctccggcagctggataaacatagtcaggccaccgcccaacaactggttcaactgctgtccaaacaaaaccaattgctgctggaaagacagagcctcagcgaggaggttgaccgcctacggacccaactgccgtcgatgccacagtctgactgttag

SEQ ID NO: 296554 - DNA, 2013 bp, Artificial Sequence
  derived and/or modified sequence
atggcaaagtcccctgagaactccacactggaggagatcctcgggcagtatcagaggtcacttcgcgagcacgcgagccgcagcatccatcaattgacctgtgctctgaaggagggggacgttacaatcggggaagacgcaccaaacctgtctttttcaacatcggtgggtaacgaagacgccaggacagcgtggccagaattgcagcagtcccacgctgttaaccagctaaaggatctgcttagacagcaggctgataaggagtcagaagtgagtcctagtcgcaggagaaaaatgagtcccctccgcagcctggagcacgaggaaaccaacatgcctactatgcatgacctggtgcacacaattaacgaccaatctcagtacatacatcacctagaggcagaggtgaagttctgtaaagaggaactgtcaggcatgaaaaacaagatccaggtggttgtcctggaaaacgagggacttcagcaacagctgaaatcacagaggcaggaggagacactcagagagcagaccctgttggacgccagcgaaaaactaaagctgacgtatgaggaaaagtgcgagattgaggaatcccagctgaagttcttgagaaacgatctagcagaataccaacggacgtgcgaagaccttaaggagcagctgaaacacaaagagttcttgcttgccgctaatacctgtaatcgcgtgggaggactatgtctgaaatgtgcacagcacgaagcagtgttgagtcagacacacacaaacgttcacatgcagacaattgagaggctcgtcaaagagcgggatgacctgatgtccgccctggtctcagtgcggtccagtctagccgatacccagcagagggaggcatccgcctacgagcaagtaaagcaagttcttcaaatttccgaagaggcgaactttgaaaaaactaaggctctcattcagtgtgaccaactaagaaaagaactcgagagacaagccgaacggctcgagaaggaactggcctctcagcaggaaaaacgggcaatagaaaaagatatgatgaagaaggagataacaaaggaaagagaatatatggggagcaagatgctgatactgtctcaaaacattgcacaactagaagcccaggttgagaaggtgacaaaggagaagatctcagctattaatcagctagaggaaatacaaagccagttggcctcacgtgaaatggatgtgaccaaggtctgcggcgaaatgagataccaactgaacaaaacgaatatggagaaagacgaagctgagaaggagcatagagaatttcgggctaagacgaatcgggacctggagattaaggatcaagagatcgaaaaactccggatcgagctggatgaaagtaagcaacatcttgagcaagaacagcaaaaagctgctctcgcacgcgaggaatgcctcagactgacagagctgctcggcgagagcgagcaccaacttcatctgacccggcaggagaaggactctattcagcaatccttctccaaagaggccaaggcgcaggctttgcaagcccaacagagggagcaagaactcactcaaaaaatccagcagatggaggcacagcatgacaaaactgagaatgaacagtacctgctgttgacttcccagaacaccttcctgactaaactgaaagaggagtgctgcaccctggccaagaagttggagcagatctcccaaaagacgaggtccgaaatcgcccagttatctcaggaaaaacgatatacatacgataaacttggaaagctccagcgacgaaacgaagagcttgaagagcaatgcgttcagcatggaagggttcacgaaaccatgaagcagcggcttcggcaactcgataaacattctcaggcgacggcccaacagctagtgcagcttctcagtaagcagaaccagctcctgctcgagcgccaatctctcagcgaggaagtcgatagactgagaacacagctcccatctatgccacagtctgactgctag

SEQ ID NO: 296555 - DNA, 2470 bp, Artificial Sequence
  derived and/or modified sequence
agcccccaagagctctgtgcgggattctaggctcccctgtgacagccgcggcaggaagcaggcgggcgctccccggccacaggcctgttgttctcggaagggagaaagctggacatttccccacgtaactcccagctctgggcctagagtgcgtgcatggcgaagtccccggagaactctaccctggaggagattctggggcagtatcaacggagtctccgggaacatgccagcagaagcattcaccaactgacatgtgccctgaaagaaggcgatgtcactattggagaagatgcaccaaatctttcttttagcaccagtgtgggaaatgaggacgccaggacagcctggcccgaattacaacagagccatgctgttaatcagctcaaagatttgttgcgccaacaagcagataaggaaagtgaagtatctccgtcaagaagaagaaaaatgtcccccttgaggtcattagaacatgaggaaaccaatatgcctactatgcacgaccttgttcatactattaatgaccagtctcaatatattcatcatttagaggcagaagttaagttctgcaaggaggaactctctggaatgaaaaataaaatacaagtagttgtgcttgaaaacgaagggctccagcaacagctaaaatctcaaagacaagaggagacactgagggaacaaacacttctggatgcatccgagaagctaaaacttacttatgaggaaaagtgtgaaattgaggaatcccaattgaagtttttgaggaacgacttagctgaatatcagagaacttgtgaagatcttaaagagcaactaaagcataaagaatttcttctggctgctaatacttgtaaccgtgttggtggtctttgtttgaaatgtgctcagcatgaagctgttctttcccaaacccatactaatgttcatatgcagaccatcgaaagactggttaaagaaagagatgacttgatgtctgcactagtttccgtaaggagcagcttggcagatacgcagcaaagagaagcaagtgcttatgaacaggtgaaacaagttttgcaaatatctgaggaagccaattttgaaaaaaccaaggctttaatccagtgtgaccagttgaggaaggagctggagaggcaggcggagcgacttgaaaaagaacttgcatctcagcaagagaaaagggccattgagaaagacatgatgaaaaaggaaataacgaaagaaagggagtacatgggatcaaagatgttgatcttgtctcagaatattgcccaactggaggcccaggtggaaaaggttacaaaggaaaagatttcagctattaatcaactggaggaaattcaaagccagctggcttctcgggaaatggatgtcacaaaggtgtgtggagaaatgcgctatcagctgaataaaaccaacatggagaaggatgaggcagaaaaggagcacagagagttcagagcaaaaactaacagggatcttgaaattaaagatcaggaaatagagaaattgagaatagaactggatgaaagcaaacaacacttggaacaggagcagcagaaggcagccctggccagagaggagtgcctgagactaacagaactgctgggcgaatctgagcaccaactgcacctcaccagacaggaaaaagatagcattcagcagagctttagcaaggaagcaaaggcccaagcccttcaggcccagcaaagagagcaggagctgacacagaagatacagcaaatggaggcccagcatgacaaaactgaaaatgaacagtatttgttgctgacctcccagaatacatttttgacaaagttaaaggaagaatgctgtacattagccaagaaactggaacaaatctctcaaaaaaccagatctgaaatagctcaactcagtcaagaaaaaaggtatacatatgataaattgggaaagttacagagaagaaatgaagaattggaggaacagtgtgtccagcatgggagagtacatgagacgatgaagcaaaggctaaggcagctggataagcacagccaggccacagcccagcagctggtgcagctcctcagcaagcagaaccagcttctcctggagaggcagagcctgtcggaagaggtggaccggctgcggacccagttacccagcatgccacaatctgattgctgacctggatggaacagagtgaaataaatgatttacaaagagatatttacattcatctggtttagacttaatatgccacaacgcaccacgaccttcccagggtgacaccgcctcagcctgcagtggggctggtcctcatcaacgcgggcgctgtccccgcacgcagtcgggctggagctggagtctgactctagctgagcagagctcctggtgtatgttttcagaaatggcttgaagttatgtgtttaaatctgctcattcgtatgctaggttatacatatgattttcaataaatgaacttttt

SEQ ID NO: 296556 - DNA, 2013 bp, Artificial Sequence
  derived and/or modified sequence
atggccaagagccccgagaacagcaccctggaggagatcctgggccagtaccagagaagcctgagagagcacgccagcagaagcatccaccagctgacctgcgccctgaaggagggcgacgtgaccatcggcgaggacgcccccaacctgagcttcagcaccagcgtgggcaacgaggacgccagaaccgcctggcccgagctgcagcagagccacgccgtgaaccagctgaaggacctgctgagacagcaggccgacaaggagagcgaggtgagccccagcagaagaagaaagatgagccccctgagaagcctggagcacgaggagaccaacatgcccaccatgcacgacctggtgcacaccatcaacgaccagagccagtacatccaccacctggaggccgaggtgaagttctgcaaggaggagctgagcggcatgaagaacaagatccaggtggtggtgctggagaacgagggcctgcagcagcagctgaagagccagagacaggaggagaccctgagagagcagaccctgctggacgccagcgagaagctgaagctgacctacgaggagaagtgcgagatcgaggagagccagctgaagttcctgagaaacgacctggccgagtaccagagaacctgcgaggacctgaaggagcagctgaagcacaaggagttcctgctggccgccaacacctgcaacagagtgggcggcctgtgcctgaagtgcgcccagcacgaggccgtgctgagccagacccacaccaacgtgcacatgcagaccatcgagagactggtgaaggagagagacgacctgatgagcgccctggtgagcgtgagaagcagcctggccgacacccagcagagagaggccagcgcctacgagcaggtgaagcaggtgctgcagatcagcgaggaggccaacttcgagaagaccaaggccctgatccagtgcgaccagctgagaaaggagctggagagacaggccgagagactggagaaggagctggccagccagcaggagaagagagccatcgagaaggacatgatgaagaaggagatcaccaaggagagagagtacatgggcagcaagatgctgatcctgagccagaacatcgcccagctggaggcccaggtggagaaggtgaccaaggagaagatcagcgccatcaaccagctggaggagatccagagccagctggccagcagagagatggacgtgaccaaggtgtgcggcgagatgagataccagctgaacaagaccaacatggagaaggacgaggccgagaaggagcacagagagttcagagccaagaccaacagagacctggagatcaaggaccaggagatcgagaagctgagaatcgagctggacgagagcaagcagcacctggagcaggagcagcagaaggccgccctggccagagaggagtgcctgagactgaccgagctgctgggcgagagcgagcaccagctgcacctgaccagacaggagaaggacagcatccagcagagcttcagcaaggaggccaaggcccaggccctgcaggcccagcagagagagcaggagctgacccagaagatccagcagatggaggcccagcacgacaagaccgagaacgagcagtacctgctgctgaccagccagaacaccttcctgaccaagctgaaggaggagtgctgcaccctggccaagaagctggagcagatcagccagaagaccagaagcgagatcgcccagctgagccaggagaagagatacacctacgacaagctgggcaagctgcagagaagaaacgaggagctggaggagcagtgcgtgcagcacggcagagtgcacgagaccatgaagcagagactgagacagctggacaagcacagccaggccaccgcccagcagctggtgcagctgctgagcaagcagaaccagctgctgctggagagacagagcctgagcgaggaggtggacagactgagaacccagctgcccagcatgccccagagcgactgctag

SEQ ID NO: 296557 - protein, 360 aa, Artificial Sequence
  derived and/or modified sequence
MAKSPENSTLEEILGQYQRSLREHASRSIHQLTCALKEGDVTIGEDAPNLSFSTSVGNEDARTAWPELQQSHAVNQLKDLLRQQADKESEVSPSRRRKMSPLRSLEHEETNMPTMHDLVHTINDQSQYIHHLEAEVKFCKEELSGMKNKIQVVVLENEGLQQQLKSQRQEETLREQTLLDASGNMHNSWITTGEDSGVGETSKRPFSHDNADFGKAASAGEQLELEKLKLTYEEKCEIEESQLKFLRNDLAEYQRTCEDLKEQLKHKEFLLAANTCNRVGGLCLKCAQHEAVLSQTHTNVHMQTIERLVKERDDLMSALVSVRSSLADTQQREASAYEQVKQVLQISEEANFEKTKHPSQ

SEQ ID NO: 296558 - DNA, 1083 bp, Artificial Sequence
  derived and/or modified sequence
atggccaagtctcctgaaaattccactcttgaagaaattctgggccaataccagagatcgctcagagaacacgcctcacgtagtatccatcaactgacatgcgcacttaaagagggtgatgtgacaatcggggaggacgcccctaatctctctttttccacatcagtgggaaatgaagatgctagaacagcctggcccgagctgcagcagagccacgctgtgaatcagctcaaggacctgctacgccaacaagccgacaaagagagtgaggtgagcccatcccgacggcggaaaatgagcccactgcgctctctggagcacgaagagaccaatatgccaacgatgcacgaccttgtgcacaccatcaatgatcagagccagtacattcaccatctggaggctgaggttaaattctgtaaggaagagctgtctggaatgaaaaacaaaatccaagtggtggtcctcgagaacgaaggactgcaacagcagctcaagagccagcgacaggaggaaaccctgcgagagcagacactcctggacgccagtggcaatatgcataattcttggattacgactggtgaggactcaggtgtgggcgagaccagcaaaaggccgttctcgcatgataatgcggactttgggaaagcggctagcgcaggtgagcaactcgaattggaaaaactgaagctgacttatgaggaaaagtgtgagatcgaagaaagtcaattaaaattcttgcgaaatgacctggccgaatatcagagaacgtgcgaagacctcaaagaacagctcaagcacaaggaattcctccttgctgccaatacgtgtaaccgtgtgggaggcctgtgcttgaagtgcgcacagcatgaagcggtgctttcccagactcacaccaatgttcacatgcaaaccatcgagcgtctcgtgaaagaaagagacgacctgatgtccgctttggtctccgtgaggtcatctctggccgacacacagcagcgtgaggcgagcgcatacgagcaggtaaagcaggtgctacagattagcgaggaagcaaattttgagaagacaaaacatccaagtcagtag

SEQ ID NO: 296559 - DNA, 1083 bp, Artificial Sequence
  derived and/or modified sequence
atggccaagagccctgagaacagcaccctggaggagatcctgggccagtaccagaggagcctgcgggagcacgccagccgcagcatccaccagctgacctgtgccctgaaggagggagatgtgaccatcggagaagatgcccccaacctgtccttcagcacctctgtgggcaatgaagatgccaggacagcctggccagagctgcagcagagccatgctgtgaaccagctgaaggacctgctgcggcagcaggccgacaaggagagcgaggtgagccccagcagaagaaggaagatgagccccctgcggagcctggagcacgaggagaccaacatgcccaccatgcatgacctggtgcacaccatcaatgaccagagccagtacatccaccacctggaggccgaggtgaagttctgcaaggaggagctgagcggcatgaagaacaagatccaggtggtggtgctggagaatgaaggcctgcagcagcagctgaagagccagaggcaggaggagaccctgcgggagcagaccctgctggatgccagcggcaacatgcacaacagctggatcaccaccggggaggacagcggcgtgggggagaccagcaagaggcccttcagccatgacaatgctgactttgggaaggccgccagcgctggggagcagctggagctggagaagctgaagctgacctatgaggagaagtgtgaaattgaggagagccagctgaagttcctgagaaatgacctggccgagtaccagaggacctgtgaggacctgaaggagcagctgaagcacaaggagttcctgctggccgccaacacctgcaacagagtgggcggcctgtgcctgaagtgtgcccagcatgaagctgtgctgagccagacccacaccaacgtgcacatgcagaccatcgagcggctggtgaaggagagagatgacctgatgtctgccctggtgtctgtgcgcagcagcctggccgacacccagcagcgggaggccagcgcctatgagcaggtgaagcaggtgctgcagatcagcgaggaggccaactttgagaagaccaagcaccccagccagtag

SEQ ID NO: 296560 - DNA, 1083 bp, Artificial Sequence
  derived and/or modified sequence
atggccaagagccccgagaacagcaccctggaggagatcctgggccagtatcagagatcactgcgagagcacgcctcaaggtccattcatcaacttacttgcgcactgaaagaaggggatgtcacgatcggagaggacgcacctaatcttagctttagcacttccgtcggcaacgaagatgctcgtacagcctggcccgagctccagcagagtcacgcggtgaaccaactgaaggatttgctgcgacagcaagccgacaaggagtcagaagtgtcgccgtctaggcgccgcaagatgagccccttacgctccctggaacatgaagaaacaaacatgccaactatgcacgacctggtccacactataaacgatcagtcgcagtatattcaccatcttgaggctgaggttaaattctgcaaggaagagctgtccggcatgaagaataagatccaggttgtcgtgttagaaaatgaagggcttcagcaacagctgaaaagccagcggcaggaggagaccctgcgagaacaaaccttgcttgatgcctcaggaaacatgcacaacagttggatcacaacaggcgaggacagcggggtcggcgaaacctccaagaggccattctctcacgacaacgcggatttcgggaaagcagccagcgccggagagcaattagagctagagaaattaaagctgacatacgaagagaagtgtgagatagaggagagccagctcaaattcctcagaaacgatcttgctgagtatcaaagaacatgcgaagacttgaaagaacagctgaaacacaaggaattcttgctggccgccaatacttgcaaccgcgtcgggggcttgtgtcttaaatgtgctcagcatgaggctgtattaagccaaacacatacaaatgtgcatatgcagacaattgagcggttggtgaaagagcgtgatgaccttatgtccgccctggtcagtgtgaggtctagcctagccgacacccagcaaagggaagcctcagcttatgagcaggttaagcaggtgctccagatctcggaggaagctaattttgagaaaaccaagcacccttcccagtag

SEQ ID NO: 296561 - DNA, 1083 bp, Artificial Sequence
  derived and/or modified sequence
atggccaaatcacctgagaatagcactctggaggagatactcgggcagtaccaacggagtctgagggaacatgcatcccgatctatacaccagctgacttgtgccctcaaggagggcgacgtgactataggcgaggatgccccaaatctatcattcagcacctccgtgggaaatgaagatgccagaacagcgtggcctgagctccagcaaagccacgcagtaaaccaactgaaagacctcctccggcagcaggccgacaaagaatccgaggtgagtcccagcagacgacggaaaatgtcaccgctgaggtccctggagcacgaagagaccaatatgccaacgatgcacgacctagtccacaccattaatgaccagagccagtacattcaccatttggaagctgaggtgaagttctgcaaggaagaacttagtggaatgaagaacaagatacaggtagtggttcttgaaaatgaagggctgcaacagcagttgaagtcccagagacaagaagaaacactcagggagcaaacgctgctggatgcttcaggcaacatgcacaacagctggattactacaggtgaagactccggggtcggtgaaaccagcaaaaggccatttagccatgacaacgccgatttcggcaaggccgctagcgccggagagcagctggagttggagaagctgaagctaacctatgaggaaaaatgcgaaattgaagagtcccaactgaagttcttgcggaatgaccttgcggaataccagcgcacttgcgaggatctgaaagagcagctcaagcacaaagagttccttctggctgctaatacatgcaatcgcgttggtggcctgtgcctgaaatgcgcccaacacgaggccgtcttgagtcagacacataccaatgtgcatatgcagacaattgagcgccttgtcaaagaaagagatgatctgatgagcgccctcgtatctgtgcgatcctcattggccgatactcaacagcgagaagcctctgcatacgaacaggtgaagcaggtcctgcaaatcagcgaggaggctaacttcgagaagaccaaacaccctagccagtag

SEQ ID NO: 296562 - DNA, 1239 bp, Artificial Sequence
  derived and/or modified sequence
agcccccaagagctctgtgcgggattctaggctcccctgtgacagccgcggcaggaagcaggcgggcgctccccggccacaggcctgttgttctcggaagggagaaagctggacatttccccacgtaactcccagctctgggcctagagtgcgtgcatggcgaagtccccggagaactctaccctggaggagattctggggcagtatcaacggagtctccgggaacatgccagcagaagcattcaccaactgacatgtgccctgaaagaaggcgatgtcactattggagaagatgcaccaaatctttcttttagcaccagtgtgggaaatgaggacgccaggacagcctggcccgaattacaacagagccatgctgttaatcagctcaaagatttgttgcgccaacaagcagataaggaaagtgaagtatctccgtcaagaagaagaaaaatgtcccccttgaggtcattagaacatgaggaaaccaatatgcctactatgcacgaccttgttcatactattaatgaccagtctcaatatattcatcatttagaggcagaagttaagttctgcaaggaggaactctctggaatgaaaaataaaatacaagtagttgtgcttgaaaacgaagggctccagcaacagctaaaatctcaaagacaagaggagacactgagggaacaaacacttctggatgcatccggaaacatgcacaattcttggattacaacaggtgaagattctggggtgggcgaaacctccaaaagaccattttcccatgacaatgcagattttggcaaagctgcatctgctggtgagcagctagaactggagaagctaaaacttacttatgaggaaaagtgtgaaattgaggaatcccaattgaagtttttgaggaacgacttagctgaatatcagagaacttgtgaagatcttaaagagcaactaaagcataaagaatttcttctggctgctaatacttgtaaccgtgttggtggtctttgtttgaaatgtgctcagcatgaagctgttctttcccaaacccatactaatgttcatatgcagaccatcgaaagactggttaaagaaagagatgacttgatgtctgcactagtttccgtaaggagcagcttggcagatacgcagcaaagagaagcaagtgcttatgaacaggtgaaacaagttttgcaaatatctgaggaagccaattttgaaaaaaccaagcacccttcacaatag

SEQ ID NO: 296563 - DNA, 1083 bp, Artificial Sequence
  derived and/or modified sequence
atggccaagagccccgagaacagcaccctggaggagatcctgggccagtaccagagaagcctgagagagcacgccagcagaagcatccaccagctgacctgcgccctgaaggagggcgacgtgaccatcggcgaggacgcccccaacctgagcttcagcaccagcgtgggcaacgaggacgccagaaccgcctggcccgagctgcagcagagccacgccgtgaaccagctgaaggacctgctgagacagcaggccgacaaggagagcgaggtgagccccagcagaagaagaaagatgagccccctgagaagcctggagcacgaggagaccaacatgcccaccatgcacgacctggtgcacaccatcaacgaccagagccagtacatccaccacctggaggccgaggtgaagttctgcaaggaggagctgagcggcatgaagaacaagatccaggtggtggtgctggagaacgagggcctgcagcagcagctgaagagccagagacaggaggagaccctgagagagcagaccctgctggacgccagcggcaacatgcacaacagctggatcaccaccggcgaggacagcggcgtgggcgagaccagcaagagacccttcagccacgacaacgccgacttcggcaaggccgccagcgccggcgagcagctggagctggagaagctgaagctgacctacgaggagaagtgcgagatcgaggagagccagctgaagttcctgagaaacgacctggccgagtaccagagaacctgcgaggacctgaaggagcagctgaagcacaaggagttcctgctggccgccaacacctgcaacagagtgggcggcctgtgcctgaagtgcgcccagcacgaggccgtgctgagccagacccacaccaacgtgcacatgcagaccatcgagagactggtgaaggagagagacgacctgatgagcgccctggtgagcgtgagaagcagcctggccgacacccagcagagagaggccagcgcctacgagcaggtgaagcaggtgctgcagatcagcgaggaggccaacttcgagaagaccaagcaccccagccagtag

SEQ ID NO: 296564 - protein, 65 aa, Artificial Sequence
  derived and/or modified sequence
MDSPVTVEWKAQSDSARSKTLTGAGGRAGAHHLWSGHLHAQEEQESSTRICINRVPELTEKTIVP

SEQ ID NO: 296565 - DNA, 198 bp, Artificial Sequence
  derived and/or modified sequence
atggatagtcccgtcactgttgaatggaaggcacaatctgatagcgcaaggagcaaaaccctcacaggagcaggcggaagagctggggcccaccacctgtggtccgggcacctgcacgcccaggaggagcaggagtcgtccacccggatttgcattaatcgcgtgccagaacttaccgaaaagacaattgtgccgtag

SEQ ID NO: 296566 - DNA, 198 bp, Artificial Sequence
  derived and/or modified sequence
atggactcacccgtcaccgttgaatggaaagctcagagcgattccgccagaagtaaaactctgactggcgcgggagggagggcaggcgcccatcatctatggagcggccatctccatgctcaggaggaacaggagtccagtacgagaatctgtatcaatcgcgtgcccgaactcactgaaaagacaatcgtaccatag

SEQ ID NO: 296567 - DNA, 198 bp, Artificial Sequence
  derived and/or modified sequence
atggacagccctgtgacagtggagtggaaggcccagagcgacagcgcccggagcaagaccctgaccggggccggcggccgggccggggcccaccacctgtggagcggccacctgcacgcccaggaggagcaggagagcagcacccgcatctgcatcaacagagtgcctgagctgacagagaagaccatcgtgccctag

SEQ ID NO: 296568 - DNA, 198 bp, Artificial Sequence
  derived and/or modified sequence
atggacagccccgtgaccgtggagtggaaggcccagagcgacagcgcgaggtccaaaaccctgaccggagcaggtggaagggccggtgctcaccatctctggtcaggccatctgcatgcccaggaggagcaagagagttccacaagaatctgtatcaacagagtcccggaactcacggaaaagaccatcgtcccctag

SEQ ID NO: 296569 - DNA, 198 bp, Artificial Sequence
  derived and/or modified sequence
atggacagccccgtgaccgtggagtggaaggcccagagcgacagcgccaggtccaagacactcacaggcgccggcggccgagcaggcgcacatcacttgtggagcggacacctgcacgcccaggaggaacaggagtcctccacccgaatctgtatcaatcgggtgcctgagttaacagaaaaaacaattgtcccctag

SEQ ID NO: 296570 - DNA, 198 bp, Artificial Sequence
  derived and/or modified sequence
atggactcgccagtcactgtggagtggaaggcacagagtgattccgcccgtagtaagacactcactggggctgggggacgggcaggtgcacaccatttatggtcaggtcacctgcatgcccaagaagaacaggagtcatccacgagaatatgcattaacagggtcccggaactgacggaaaagaccatcgttccgtag

SEQ ID NO: 296571 - DNA, 198 bp, Artificial Sequence
  derived and/or modified sequence
atggactcaccagttacagtggagtggaaggcacagagcgatagtgcacgcagcaagacacttacgggggcaggtggaagagcaggcgcacaccacctttggtccggccaccttcacgcacaggaagaacaagaaagttctactcgaatttgtatcaatagggtgcctgaactgaccgagaagacaatcgtgccatag

SEQ ID NO: 296572 - DNA, 198 bp, Artificial Sequence
  derived and/or modified sequence
atggacagccccgtgaccgtggagtggaaggcccagagcgacagcgccagaagcaagaccctgaccggcgccggcggcagagccggcgcccaccacctgtggagcggccacctgcacgcccaggaggagcaggagagcagcaccagaatctgcatcaacagagtgcccgagctgaccgagaagaccatcgtgccctag

SEQ ID NO: 296573 - protein, 393 aa, Artificial Sequence
  derived and/or modified sequence
MDENESNQSLMTSSQYPKEAVRKRQNSARNSGASDSSRFSRKSFKLDYRLEEDVTKSKKGKDGRFVNPWPTWKNPSIPNVLRWLIMEKDHSSVPSSKEELDKELPVLKPYFITNPEEAGVREAGLRVTWLGHATVMVEMDELIFLTDPIFSSRASPSQYMGPKRFRRSPCTISELPPIDAVLISHNHYDHLDYNSVIALNERFGNELRWFVPLGLLDWMQKCGCENVIELDWWEENCVPGHDKVTFVFTPSQHWCKRTLMDDNKVLWGSWSVLGPWNRFFFAGDTGYCPAFEEIGKRFGPFDLAAIPIGAYEPRWFMKYQHVDPEEAVRIHTDVQTKKSMAIHWGTFALANEHYLEPPVKLNEALERYGLNAEDFFVLKHGESRYLNNDDENF

SEQ ID NO: 296574 - protein, 124 aa, Artificial Sequence
  derived and/or modified sequence
MDENESNQSLMTSSQYPKEAVRKRQNSARNSGASDSSRFSRKSFKLDYRLEEDVTKSKKGKDGRFVNPWPTWKNPSIPNVLRWLIMEKDHSSVPSSKEELDKELPVLKPYFITNPEEAGVREAG

SEQ ID NO: 296575 - protein, 466 aa, Artificial Sequence
  derived and/or modified sequence
MARRRELKRCLQLLASSAEPARRARVRKNPSACRGRPSRYAAALCAGTLWPEAAELRRRALPATPSASSSPKDMDENESNQSLMTSSQYPKEAVRKRQNSARNSGASDSSRFSRKSFKLDYRLEEDVTKSKKGKDGRFVNPWPTWKNPSIPNVLRWLIMEKDHSSVPSSKEELDKELPVLKPYFITNPEEAGVREAGLRVTWLGHATVMVEMDELIFLTDPIFSSRASPSQYMGPKRFRRSPCTISELPPIDAVLISHNHYDHLDYNSVIALNERFGNELRWFVPLGLLDWMQKCGCENVIELDWWEENCVPGHDKVTFVFTPSQHWCKRTLMDDNKVLWGSWSVLGPWNRFFFAGDTGYCPAFEEIGKRFGPFDLAAIPIGAYEPRWFMKYQHVDPEEAVRIHTDVQTKKSMAIHWGTFALANEHYLEPPVKLNEALERYGLNAEDFFVLKHGESRYLNNDDENF

SEQ ID NO: 296576 - DNA, 1182 bp, Artificial Sequence
  derived and/or modified sequence
atggacgagaacgagagcaaccagagcctgatgaccagcagccagtaccccaaggaggccgtgagaaagagacagaacagcgccagaaacagcggcgccagcgacagcagcagattcagcagaaagagcttcaagctggactacagactggaggaggacgtgaccaagagcaagaagggcaaggacggcagattcgtgaacccctggcccacctggaagaaccccagcatccccaacgtgctgagatggctgatcatggagaaggaccacagcagcgtgcccagcagcaaggaggagctggacaaggagctgcccgtgctgaagccctacttcatcaccaaccccgaggaggccggcgtgagagaggccggcctgagagtgacctggctgggccacgccaccgtgatggtggagatggacgagctgatcttcctgaccgaccccatcttcagcagcagagccagccccagccagtacatgggccccaagagattcagaagaagcccctgcaccatcagcgagctgccccccatcgacgccgtgctgatcagccacaaccactacgaccacctggactacaacagcgtgatcgccctgaacgagagattcggcaacgagctgagatggttcgtgcccctgggcctgctggactggatgcagaagtgcggctgcgagaacgtgatcgagctggactggtgggaggagaactgcgtgcccggccacgacaaggtgaccttcgtgttcacccccagccagcactggtgcaagagaaccctgatggacgacaacaaggtgctgtggggcagctggagcgtgctgggcccctggaacagattcttcttcgccggcgacaccggctactgccccgccttcgaggagatcggcaagagattcggccccttcgacctggccgccatccccatcggcgcctacgagcccagatggttcatgaagtaccagcacgtggaccccgaggaggccgtgagaatccacaccgacgtgcagaccaagaagagcatggccatccactggggcaccttcgccctggccaacgagcactacctggagccccccgtgaagctgaacgaggccctggagagatacggcctgaacgccgaggacttcttcgtgctgaagcacggcgagagcagatacctgaacaacgacgacgagaacttctag

SEQ ID NO: 296577 - DNA, 681 bp, Artificial Sequence
  derived and/or modified sequence
atggatgaaaacaatggcctacttctgctcgaacttaacccccccaatccctgggatttgcagcccagaagccctgaggagctcgcttttggcgaggtccaaattacatacttgacacatgcctgcatggacctcaaactgggcgataaaaggatggtgttcgacccctggttaatcggacccgcgttcgctagagggtggtggctgcttcacgagcccccctcagattggttggagcggttatgtcaagcggacctcatctatattagtcatctgcacagcgatcacctgagctatccaaccctgaagaagcttgccggcagaagaccagatattccaatatacgtcggaaataccgaaaggcccgtgttttggaatttaaatcagtccggtgtgcagctgacgaatataaatgtcgtgcctttcggtatctggcagcaggtcgacaagaatttgagattcatgattttgatggatggggtccatccagaaatggacacatgcattatcgtggaatataaaggacacaagatcctgaatatagttgactgtacccgccccaacggcggaaggctccctatgaaggtggcactcatgatgtcagactttgcaggtggcgcttctggcttccccatgactttttccggcgggaagtttacagccgaggaaacattaatttag

SEQ ID NO: 296578 - DNA, 522 bp, Artificial Sequence
  derived and/or modified sequence
atggatgaaaataatggccttctgctgctggaattaaatccgccaaatccctgggatctgcagccgcgaagtccagaagagctggcgttcggcgaagtccaaatcacatacctgactcatgcgtgtatggacctgaagctaggagataaacggatggtcttcgatccttggctcattggcccagcctttgctcgggggtggtggctcttacacgaacccccttcagactggttagagaggctgtgccaggccgacttgatctatataagccacctgcatagcgatcacttgagctaccctaccctgaaaaaactggctggaaggcgccctgatatccccatctatgtgggcaacaccgagagacccgtgttctggaatctaaaccagagcggcgtccaactgaccaacatcaatgtggtgcccttcggaatttggcagcaggtggataaaaatctgagatttatgattctcatggatggggtgcatccagagatggatacatgcataattgtcgaatactag

SEQ ID NO: 296579 - DNA, 1182 bp, Artificial Sequence
  derived and/or modified sequence
atggatgaaaacgagagtaatcaatccctcatgacttccagccagtatcctaaagaagcggtgcggaagcgtcagaactcagccaggaacagcggagcttctgacagttcccggttcagcaggaagtctttcaaattggactatcgactagaggaggatgtgaccaaatccaaaaagggaaaggatgggaggtttgtaaacccttggccaacgtggaaaaatccttctataccaaatgtgctgcgctggctgatcatggaaaaggatcacagttctgtgccttccagcaaggaggagctcgataaagaattacctgtcttaaaaccttattttatcaccaatccagaggaagctggagtacgtgaggccggactgagagtcacttggctcgggcatgcaaccgtaatggtagaaatggacgaactgatattccttactgaccctattttttcctcccgcgccagtcccagtcaatatatgggtccaaaaaggttcaggaggtccccttgcacaatctccgagctgccacctattgacgctgtactgatttctcacaatcactacgaccaccttgactacaatagtgttatagcacttaacgaacggttcggcaatgaactcagatggtttgttccattagggttgctggactggatgcagaaatgcggatgcgagaatgtcatcgaacttgactggtgggaagagaactgtgttcctggtcatgacaaggtcacctttgtcttcactccatcccagcactggtgtaaacgaactttgatggacgacaataaggtcctgtgggggtcttggagcgtccttgggccttggaaccgtttttttttcgccggggacaccggctattgccctgctttcgaagagatcggaaagcgcttcggaccatttgaccttgcagctattccaatcggggcatacgaaccaagatggtttatgaaataccaacacgttgatcctgaggaagctgtacggattcacacagacgtgcaaacaaagaagagcatggctatccattggggcacctttgcccttgccaatgagcactacctggaacccccagtcaaattgaacgaggcactagaacgatacggactgaatgctgaggatttttttgtcctgaaacatggcgagagccgttaccttaacaatgacgatgagaatttttag

SEQ ID NO: 296580 - DNA, 1182 bp, Artificial Sequence
  derived and/or modified sequence
atggatgaaaatgaaagcaaccagagcctgatgaccagcagccagtaccccaaggaggccgtgaggaagaggcagaacagcgccagaaattctggggccagtgacagcagccgcttcagcaggaagagcttcaagctggactaccgcctggaggaggatgtgaccaagagcaagaagggcaaggatggccgctttgtgaacccctggcccacctggaagaaccccagcatccccaacgtgctgcgctggctgatcatggagaaggaccacagctctgtgcccagcagcaaggaggagctggacaaggagctgcctgtgctgaagccctacttcatcaccaaccctgaggaggccggcgtgcgggaggccggcctgcgggtgacctggctgggccacgccaccgtgatggtggagatggatgagctgatcttcctgacagaccccatcttcagcagccgggccagccccagccagtacatgggccccaagcgcttccgccgcagcccctgcaccatcagcgagctgccccccattgatgctgtgctgatcagccacaaccactatgaccacctggactacaacagcgtgattgccctgaatgaaagatttggaaatgagctgcgctggtttgtgcccctgggcctgctggactggatgcagaagtgtggctgtgaaaatgtcatcgagctggactggtgggaggagaactgtgtgcccggccatgacaaggtgacctttgtgttcacccccagccagcactggtgcaagaggaccctgatggatgacaacaaggtgctgtggggctcctggagcgtgctgggcccctggaaccgcttcttctttgctggggacaccggctactgcccagcctttgaggagatcggcaagcgcttcggcccctttgacctggccgccatccccatcggggcctatgagccccgctggttcatgaagtaccagcacgtggaccctgaggaggccgtgcgcatccacacagatgtgcagaccaagaagtccatggccatccactggggcacctttgccctggccaatgagcactacctggagccccctgtgaagctgaatgaggccctggagagatatggcctgaatgctgaggacttctttgtgctgaagcacggggagagccgctacctgaacaatgatgatgagaacttctag

SEQ ID NO: 296581 - DNA, 663 bp, Artificial Sequence
  derived and/or modified sequence
atggacgagaacaacggcctgctgctgctggagctgaacccccccaatccatgggacctccaaccccgatccccagaggagttagccttcggcgaggtccagatcacttatttgacacatgcctgtatggatttgaaacttggtgacaagcgaatggttttcgacccgtggctcatcggcccagcgttcgcgagaggatggtggctccttcatgagccaccgagcgactggcttgagcgactgtgtcaggcagatctcatctatatctcccacctacattccgatcacctgtcctatcccacgctgaagaaacttgccggccgaaggcccgatataccaatttacgtggggaacaccgagagacctgttttttggaatctaaatcagtccggcgtgcagctgactaacataaatgtcgtcccattcggtatttggcagcaggtagataaaaatctgaggtttatgatactgatggatggagtccaccccgagatggatacctgcataatcgttgagtacaagggccacaaaatcctgaatattgtcgattgtacaaggcccaatggaggcagattaccaatgaaggtggctctgatgatgagtgacttcgctggtggtgcaagtgggtttcctatgacgtttagcggtggcaagttcacttag

SEQ ID NO: 296582 - DNA, 522 bp, Artificial Sequence
  derived and/or modified sequence
atggacgagaacaacggcctgctgctgctggagctgaacccccccaatccctgggatctgcagccaaggagtccagaggagctagcttttggagaggtgcagattacctacttgacacatgcctgtatggatctcaaactgggggacaaacggatggtctttgacccttggcttatcggacccgcctttgcgcggggttggtggttgctgcacgaaccaccttcagattggcttgaacggctgtgccaggctgatttaatctatattagccacttgcatagcgaccacctctcgtacccaaccctcaagaagttggccgggagacgtccagacatcccaatatatgttggaaatactgagcgtccagtcttctggaacctaaaccagtcaggtgtgcagctgaccaatatcaacgtggtgcccttcggaatctggcagcaggtggacaagaatttaaggtttatgattttgatggatggtgtgcaccccgaaatggacacttgtattattgtggaatattag

SEQ ID NO: 296583 - DNA, 1182 bp, Artificial Sequence
  derived and/or modified sequence
atggacgagaacgagagcaaccagagcctgatgaccagcagccagtacccaaaggaggcagtgaggaagcgccagaactctgcacgcaacagtggtgcaagcgacagctcacgtttcagccggaagtcttttaagttagactataggcttgaggaagatgtgacaaaaagcaagaagggcaaggacgggagatttgtcaatccctggccaacttggaaaaacccgagtatccccaacgttctccgatggctgatcatggaaaaggatcacagcagtgtgccttcctcaaaagaggaactggacaaagagctgcctgtgctgaaaccgtattttatcacaaatcccgaggaggccggcgtgagggaggcagggctgagagtgacttggttgggccacgctacagtgatggtcgagatggacgaattgatatttctcacggatcctatcttttcgagcagagccagccccagtcagtacatgggacccaagcgatttagacgtagcccgtgcaccatatccgaactcccaccaatcgatgccgtcctcatttcacataatcattacgaccatcttgactacaactcagtcatagcactgaatgagaggttcggaaatgaactcagatggttcgtccctttgggactcctggactggatgcagaagtgcgggtgcgaaaatgtaatcgagctggattggtgggaggagaactgcgttccaggtcatgacaaggtaaccttcgtgttcactccatcccagcactggtgcaaacggaccctgatggacgacaataaagtgctgtggggcagctggtctgtgctcgggccatggaacagattcttctttgcaggagacactgggtactgcccagctttcgaagaaattggtaagagatttggaccctttgacctggcggccattcctattggcgcatacgaacctaggtggttcatgaaatatcagcacgtggatcccgaggaagcggtgagaattcatactgatgttcagacaaaaaagtcaatggctattcactgggggacttttgcactcgccaatgaacattaccttgaacctcctgtgaaactgaatgaggctctcgagaggtatggtctcaacgctgaggacttttttgtgctgaaacacggcgagtctaggtatctgaacaacgatgacgagaatttttag

SEQ ID NO: 296584 - DNA, 4972 bp, Artificial Sequence
  derived and/or modified sequence
cccgcggcccgggatcccgagtgtccggagctccgtggtttctgttggacctcgcgggaggcggttttctcccgcctgctgtgctctgtgacctctctgctgcctcctccacggtctctgggcggagcaatccacactgctgagcctggggtggtttggaattcttcggcgaagtggagcgggctgagagtgggtttcccgtccccgagccctccctcatctcggagatgccgcacttgtgagcgacagggcttcatttgaattttcgcacctcgcgagttgcggagcctgcatctctgaagctgcctcggtgaagagccacagcattattttttttctctttgggagagtagctgtctgggatttgagatcctatcttccctgcaaattaccaggttgcatcttcactgataggaatacatttcttcaccaaaggacatggatgaaaatgaaagcaaccagtctctgatgacaagcagccaatatcctaaagaagcagtaagaaaacgtcaaaattcagcacggaattccggagcaagtgattcttctaggttttctaggaaaagcttcaaactggattatagactagaagaagatgtaactaaatccaagaaaggaaaagatgggagatttgtgaatccgtggccaacatggaaaaacccctctattccaaatgttctcagatggctgataatggagaaagatcacagcagtgttccaagttctaaagaggaactagacaaagaactcccagtgcttaagccatattttatcactaaccctgaagaagctggagtgagggaagctggcttaagagtcacatggctgggacatgccacggtaatggtggaaatggatgagctcatatttctcacggatcccatctttagctctcgtgcttcaccatcgcagtacatgggtccaaagcgatttcgtcgttccccgtgcacaataagtgaactccctccaatagatgcggtccttatcagtcacaaccactatgaccatctggactacaattctgtcattgctttgaatgagcgatttggtaatgagttgagatggtttgtgcctttgggtctccttgactggatgcaaaaatgtggctgtgagaatgtgattgagttggactggtgggaggagaattgtgtccccggacatgataaggtcacttttgtctttacaccttcccagcactggtgtaaaaggactctaatggatgacaacaaggtgctatggggcagctggtctgtcttggggccttggaatcgattttttttcgcaggagatactggttattgccctgcttttgaagagataggaaaaagatttggaccttttgaccttgcagctattcccatcggagcttatgaaccgaggtggtttatgaaataccagcatgtagacccagaagaagctgtaaggattcacactgatgtccaaacaaagaaatctatggcaattcactggggaacttttgccttagcaaatgagcattacttagagcctccagtgaagctgaatgaagctctagagagatacggacttaacgctgaagatttttttgtcttgaagcatggagaatcaagatacctaaataatgatgatgaaaacttttaataaataatttcctgaggtgaaaaaccgatattgaagattcatttttcttttttccattcttcaggaccttcggcaaggtgagtcaaggctctctacctacctagatgtttttcagaggcctacaaatacaagtatctttcttatatgcacattctaataaatgatgaaattcagtccaacatgcttattataaacatagcaattcttgctctatcaaattagcttatatgccaaatattaaatatggtttatttaggtaagcataaaaacataggggctatcatttttaaagacttgattttctctattgtggtaaaatatataaatacatatttgccattttaaacatttaccattttaaccatttttaagtgtacagttctttcgcattaatgcacccatgaccaccattcacttaaatttttaaaagaacagtatattctttttttcctagagccttcagatgagagggaacagtatattctattgcacgtctacaattcccaaaagacctcttactttgggaggccaaggtgggtgggtcacttgaacccaggagtttgacatcaacctgggcaacatggtgacctcccgtctctctcggaaaaaaaaaaagaaaaaagaaaaagccgggtgaggtggtgtgtacctgtagtcacaggtacttgggaggctgaggtgggaggatcacttgagcccaggagatagaggctgcagtgagctgtgatcgtaccactgcactccagcctgggcgacaaaatgagaccctgtctcaaaagaaagccctctccttagctgagcagaggaagggaaggagtgtggctatgagaatatgatttatgccattttctgtttttaaatctagaagatcttctaagcacaaatacagctacaatgaaatattttacagacaaaatgttaatagaccatattctttgaattaaatttgtttttaattttctctacacattttttttttcctggagtctcttagctctaaatatatcaatcagatttataattttttttacctgattcagatgtcttacatttttatattaaatgaaccttaagcatgattcttttggtaagccagtatgaatgccagtggttggggggcggggggggagtcagttgacataagatttagtcctaataaggactctgtattcacttgattattctgacccttcctaagggagggaggtggattagataccactggaggcccattctgtattcctaatccagtctcagcactttattcatacaaaataatcaaaataggttttctacaccaaatgctacccaggcagtgctctataatttatttgcacacctgtatgtgtggtgccacgttagccactaaatctgaacttttaccctgctttcatcatggatttttttgtgtaacctgaaacaagtcaccagtgctcactgtgcctgtttcctcatttgcaacaagaggataattccgacctacctctgaaaaatgtgtagattaaatgagtttttaaagcactttagaaaatataagggagaaaatgatttcttaagatatcactgcctaatatagacaggtatatttgaaagctaaatacaggttaatgcttttgataatgtattgttcctgttgcaaatttaagcattatatattaggagactaaacattgaaaactttcactgatttttaaattggagtaatagcctaaataagtgtaaataatctttatcaaaatttagtgtttatctacaaagatgcgaatcagtcaaggggaaatgtgtatgcaatgtgtgtgtatatgatgtatgcgaacatatgtgattttggggtactaaagcacaaaaaaatcccccataaaataaaccttcctgaaaagactgatcataaactttttcactccaagcagatgtgaatcaagatgttaggtttatggtgagttagctttgaggtgtgttgccctaatactagccagcgttgttgtagccatattccctgctgctgcacgccgaattgaaaatccatctcttacctcttctctatgaagcaagccaggtatgtcttgcttaagtatttcttctccatgaatggccttaacattattttgtattcacgtgtactgtttaactgagggtctcaaagcactttaaactgttgtgttctatttccactcgtctggcctgcctcatttttctaggcccttttgtaagctgtaattttttattaccactcatgttctttctacactgacactattcattaagaacatcaagcttcatctctgcttacagaatctcaccttattgagtgggttccactttatttttcatttgttatctacattttgaagggtttatgtgcaaagtgaaaacaaattttgaaaaataagacaaatccattctcttcttcaattcagtctaatatgcattgtagtgtcttttaatcagtcttatcctctaagtcaacttcattttcctcttcgtgaatacccatagcaatatgtaagattttattgaagtttcctgtgataactgaggaatactttgctatgcctcactgcccaatagggtgggtcatcaattaggagaaatcccaaattataaaagccaacatatgccgtgacctacgtaggaaaagatgtatttgtgcatcttctttctgggtagttaaaaattactccctcttttctctagcattttgacatttcagactcaatgctctgatctctagggagtgtgattattcaaactaatgagaggacaagaagacacagttttagaatctactgctgctaaagcacattaaaaacaaatcctggtttttaatgtatgcatagtttcatatttaatgaatatgctttcattaaatagggaggtagatttgaaaaaaccgttataaagaaatgtgccttttggggaatgaatacttttgttcatgtctagcccactgggaattttgttttcaccttatactgagtcctttttctaatgtaaaaatatttcttccaagtttgatttctgtatcagggtaacattgagaacacacatatttctgtttgaggatttgtgacttcctatggaaacagtcttgcatctatgtatttacaaatgaaatttaaagtattcttaaagctttgccttaaatactgcttgcatactgatttacttaatgctaagcatggcaggggttataaatttaaatactataagacctggctgaatcccagatgtatcaataaattgttatagtagcttatggaaaatgctattaaagataaattttcatacattgtatttttagtcaagtaaaatatggatgaaaattaataaagtactgtcaagggaaaaaata

SEQ ID NO: 296585 - DNA, 1182 bp, Artificial Sequence
  derived and/or modified sequence
atggacgagaatgagagcaatcagtccctcatgaccagttctcagtaccccaaggaggccgtcagaaaacgccagaatagcgcccgtaactcaggggcatctgactcatctagattcagcagaaagtcatttaaacttgattacagacttgaggaagacgtcacaaagagcaaaaaaggcaaggatggtcgtttcgtaaacccctggccgacctggaagaatcccagcattccaaacgtgctgcgatggttgattatggagaaagaccacagctcagttccttcatctaaggaggagctggataaggagttgcccgtgctgaagccctattttatcaccaatccagaggaggctggcgtgagagaggccggattgagggtcacctggctcggccacgctaccgtgatggtcgagatggacgagctgattttcctgacggatcccatcttcagcagtagggcttcccctagtcagtacatgggtcccaaaaggttccggcgaagcccctgcacaatttctgagctcccgcctatcgatgctgttctcatcagccacaaccactacgaccatctcgactacaacagtgtcatagctctgaacgaacgattcggcaatgagttgcgctggttcgtacctctgggcctgttagattggatgcagaaatgtggctgcgagaatgtaatagaacttgattggtgggaagagaactgtgtcccgggacacgataaagtcacctttgtatttacccccagccaacactggtgcaaacgaactttgatggatgataataaagtactgtggggctcctggtccgtcctcgggccatggaaccggtttttcttcgctggagatacggggtattgccccgcattcgaagagattggaaaacggtttggtccattcgacctggccgcaatcccaataggtgcttacgagcccagatggtttatgaaatatcagcatgtggaccccgaagaggctgtgaggatacacacagacgtccagacaaaaaagagcatggcaatacactggggcacatttgctcttgccaatgagcactatctggagcccccagtaaagcttaacgaggcacttgagaggtatgggcttaatgccgaggactttttcgttctgaaacacggtgagagccggtacctgaataacgatgatgaaaatttctag

SEQ ID NO: 296586 - DNA, 1182 bp, Artificial Sequence
  derived and/or modified sequence
atggacgaaaatgagtccaatcagagcctgatgacctcttcccaataccccaaggaagctgtgcggaaacgccagaactcagcacggaatagcggcgcgtccgactcatcgcgcttttctaggaaatcttttaagctcgactaccgactggaagaggacgttacaaagtcaaaaaaaggcaaagatggacgctttgtaaatccctggcctacctggaaaaatccctctatccccaatgtcttgaggtggctcattatggaaaaggaccactctagcgtaccttcgtccaaggaagagctggataaggaacttcctgtgctcaagccttacttcattaccaatcccgaggaggccggagtacgcgaggctggcttaagagtgacctggctcggtcatgccaccgtgatggtggagatggacgagttgatcttcctaaccgaccctatcttttccagcagagcttccccatcccagtacatgggtcccaagcggttccgtcgcagcccttgcacaatctcagaactccctcctattgatgccgtgctgatctctcacaatcattacgatcacctggattataattcagtgatagcactgaacgaacgcttcggcaacgaactaagatggttcgtaccactggggctgctggattggatgcagaaatgcggctgcgaaaatgttattgaactggattggtgggaggaaaactgcgtccccggacatgacaaggtgacctttgtttttacaccatcccagcattggtgcaagaggaccctcatggacgacaataaagtcctgtggggatcctggagcgttctcggtccttggaatcggttcttttttgctggagacactggttactgtccagcctttgaggagattgggaaacggttcggcccatttgatctggcagccatccccattggggcatacgagccaaggtggttcatgaagtaccagcacgtagatcccgaagaggccgtacggattcatacagacgtgcagactaagaaaagtatggcgatccattggggtacattcgccctggcaaacgagcattacctcgagccaccagttaaattgaatgaagcgctggaacgatacggtctgaacgcagaggatttctttgtgctgaagcacggggaaagccgctatctgaacaacgacgacgagaatttctag

SEQ ID NO: 296587 - DNA, 375 bp, Artificial Sequence
  derived and/or modified sequence
atggatgagaacgagtctaaccaaagcctcatgaccagtagccagtaccctaaggaggccgttcggaaaaggcagaattccgctcgaaattccggcgccagcgattcctccaggttttcccgtaagagtttcaagctggactatagactggaagaggatgttactaaaagtaaaaagggaaaagatggccggtttgtgaatccgtggcctacatggaagaacccatcaattcccaatgtcttacggtggctcattatggagaaggatcactcaagcgtcccatcctcaaaagaggagttagataaggagttgcccgtgctcaagccctattttataacgaaccccgaagaagccggcgtgcgcgaggccggctag

SEQ ID NO: 296588 - DNA, 1182 bp, Artificial Sequence
  derived and/or modified sequence
atggacgagaacgaatccaaccaatctctgatgacaagctctcagtatcccaaagaagccgttagaaagcggcagaactcagcccggaactccggcgccagtgactcttccagattcagtcggaagagcttcaagctcgactatcgactggaagaggatgtaactaaaagcaagaagggcaaggacggccgcttcgtaaacccttggcctacttggaaaaacccttcgattcccaatgttctgcggtggctgatcatggagaaagatcattctagtgtgccttcctcgaaggaggagctggataaggaattgccagtgttaaagccgtacttcatcaccaatcctgaggaagctggtgtccgggaggctgggttgcgcgtcacatggttgggacacgctaccgtcatggttgaaatggatgagctcatcttcctgactgaccctatctttagctcccgcgcctctccatctcagtatatgggccctaaaaggtttagaagaagcccctgcactatttctgagttgcctccgatcgacgcagtccttatcagccacaatcactacgaccacctggattacaattcggtgatcgctctgaacgaaaggtttgggaatgaactaaggtggtttgttccactggggcttttggactggatgcaaaagtgtgggtgtgagaacgtcattgaactagactggtgggaagagaactgtgtgcctggacatgacaaggtgacatttgtgtttactccttctcaacactggtgcaaacggacactgatggacgataacaaggtgctgtggggctcctggagtgtactgggcccctggaaccgcttcttcttcgccggcgacactgggtactgtcctgcatttgaggaaatcggcaagaggttcgggccattcgacctggctgctattccaattggcgcctatgagcctcgttggtttatgaagtatcagcacgtagatcccgaagaagctgtgcgtattcatactgatgttcagaccaaaaagagcatggccatacattggggtacatttgctctggcaaatgagcattatctagagccccctgtgaaactgaacgaagccctcgagcggtatgggctgaatgctgaagacttctttgtgctgaaacatggcgaatccagatacctgaacaatgacgacgaaaatttctag

SEQ ID NO: 296589 - DNA, 1182 bp, Artificial Sequence
  derived and/or modified sequence
atggatgaaaacgagtccaaccaatccctcatgacatccagccaatacccaaaggaagctgtccgaaagcggcaaaactcagctaggaactccggagccagcgacagcagtcggttctccaggaagtcgtttaagctagactacaggctagaagaggacgtgaccaagtcaaaaaaagggaaggacggacgattcgttaacccttggcccacatggaaaaacccatctattcccaatgtcctccgttggctgatcatggaaaaggatcactcttcggttccgtcgagtaaggaggaactggacaaggagcttcctgtgcttaagccctattttatcacgaaccctgaagaagccggagtgagggaggccgggctgagagttacgtggttgggacatgcaacagtgatggtcgaaatggacgagctgatcttcttgaccgatcctatcttttcatctcgggcctcaccatctcagtacatgggtccaaagagatttagaagaagtccctgtaccataagcgagctcccgccaattgacgccgtgttgatcagtcacaatcactacgaccacttagactataacagtgttattgctctgaatgaacggttcgggaatgagcttcggtggtttgtaccactgggcctactagattggatgcagaagtgcgggtgcgaaaatgtgatagagctagactggtgggaagagaattgcgttcccgggcacgacaaggtcacatttgtattcactccttctcagcactggtgcaagcggaccctgatggacgataataaggtgctgtgggggagttggtctgtgctgggcccatggaacagatttttttttgccggagatacaggatattgcccagcctttgaagagattggcaaacgcttcggcccctttgacttggccgcaatccccataggcgcctacgagccccgctggttcatgaagtatcagcacgtggatccagaggaggccgtgcgaatacacaccgacgttcagactaaaaagagcatggccatacactgggggacttttgcactggcaaacgagcattatctggagcctcctgtgaaacttaacgaagcactggaaagatacggcctcaacgcagaggacttttttgtattgaaacacggcgaaagcaggtatctgaacaacgacgacgaaaacttttag

SEQ ID NO: 296590 - DNA, 1401 bp, Artificial Sequence
  derived and/or modified sequence
atggccagacgccgcgagctgaagagatgtctgcaacttctggcgagcagcgccgagcccgctagacgggcacgcgtccgcaagaacccatccgcatgcaggggacgcccctcgcgatacgctgccgcattatgcgcgggaactctgtggcctgaggccgcagagctgcgccgtcgtgccttaccagcaactccaagcgcgtcttcaagcccaaaagatatggacgagaatgagtcaaaccagagcctgatgacctcatcccaataccctaaagaggcagtgagaaagcgccagaatagcgcaagaaactcaggtgcctcagattcttctcgattttctagaaaatccttcaaactcgactatcgactggaggaggacgtgaccaaatccaaaaagggcaaagatgggcggttcgtcaatccttggcctacatggaagaatccaagcattccgaatgtgttgaggtggctgatcatggagaaagatcattctagtgtgccaagctctaaggaagagctggacaaggagctccccgtgctgaagccctatttcatcaccaatccagaggaggctggcgtcagagaggccggcctgagagtgacctggcttggacatgccaccgtgatggtcgagatggatgagcttattttcctcaccgacccaatctttagctctagagcctctcccagtcaatatatgggcccgaagcggtttagaagatctccctgcacaataagcgagctcccgcctatcgacgctgtcctgatctctcataatcactatgaccacctggactacaacagtgtcatcgccctgaacgagcggttcggtaatgaactgaggtggttcgtgcccttaggcctgctggattggatgcagaaatgtggttgcgaaaatgtgatcgagttggattggtgggaggagaattgtgtccccggccatgacaaggtaactttcgtgttcacacctagtcaacactggtgtaaaaggaccctgatggatgataataaagtgctgtgggggtcatggtctgtgctgggtccctggaatcgtttctttttcgctggcgataccggctattgccccgcatttgaggagataggtaagcgattcggaccatttgatctggcagctattccaatcggggcatatgagccaaggtggttcatgaagtaccagcacgtggaccccgaagaggcagtccgcatccatacagatgttcagaccaagaagtccatggcaatccactggggcaccttcgccctcgcgaacgaacattacctcgaaccccctgttaaattgaatgaggctctagagcgatatggtcttaacgcagaagacttcttcgtgcttaaacatggcgagtctcgctatctcaataatgatgacgagaacttctag

SEQ ID NO: 296591 - DNA, 1182 bp, Artificial Sequence
  derived and/or modified sequence
atggacgaaaacgagtccaaccagagcctcatgacaagtagccagtacccaaaggaagcggtccgcaagagacagaactcagcgcggaacagtggtgccagtgattctagtaggtttagccgtaagtcatttaaactggattataggctggaagaggatgtcaccaagagtaaaaaagggaaagatggcagattcgtcaacccttggcccacttggaagaacccatctattcccaatgtcctgcgttggctaattatggagaaagaccatagcagcgtaccctctagcaaggaagagctcgacaaagagctgcccgtcctaaaaccctacttcattacaaaccccgaggaagccggcgtaagagaagcgggcttaagagtgacttggctcggtcacgccaccgtgatggttgagatggatgagttgatctttctgacagatcctatcttttcctccagagcaagtcccagccagtacatgggcccaaagaggtttcgacggagcccctgtaccatatctgagctaccccccatcgacgctgttttgataagccataatcattacgaccacctcgactacaacagtgtgatagccctgaatgagagatttgggaatgagctgcgatggttcgtgcctctgggcttgttagactggatgcaaaagtgtggatgtgaaaacgttatcgagctcgattggtgggaggaaaattgtgtccccgggcatgataaagtgacctttgtcttcaccccaagtcagcactggtgtaaacgcactctcatggacgataataaagtgctgtggggatcctggagcgtgctgggcccatggaataggttcttcttcgctggcgacacaggttattgccctgcattcgaggaaattggcaaacgcttcggtcccttcgacttggcggctattcctatcggcgcctacgagccacgttggttcatgaagtatcagcacgtagacccagaagaagcggtgagaatccacaccgatgtccagacaaagaagtcaatggctatccactggggaacattcgcactggcgaacgaacactacctcgaaccaccagtgaagctcaatgaagccctggagagatacgggctgaacgccgaggacttttttgtgctgaagcacggagaaagccgctacctgaataatgacgatgagaacttctag

SEQ ID NO: 296592 - DNA, 375 bp, Artificial Sequence
  derived and/or modified sequence
atggatgaaaatgaaagcaaccagagcctgatgaccagcagccagtaccccaaggaggccgtgaggaagaggcagaacagcgccagaaattctggggccagtgacagcagccgcttcagcaggaagagcttcaagctggactaccgcctggaggaggatgtgaccaagagcaagaagggcaaggatggccgctttgtgaacccctggcccacctggaagaaccccagcatccccaacgtgctgcgctggctgatcatggagaaggaccacagctctgtgcccagcagcaaggaggagctggacaaggagctgcctgtgctgaagccctacttcatcaccaaccctgaggaggccggcgtgcgggaggccggctag

SEQ ID NO: 296593 - DNA, 1401 bp, Artificial Sequence
  derived and/or modified sequence
atggcccggcggcgggagctgaagcgctgcctgcagctgctggccagcagcgctgagcccgcccggcgggcccgggtgaggaagaaccccagcgcctgccggggccggcccagccgctatgctgctgccctgtgtgccggcaccctgtggccagaggccgctgagctgcggcggcgggccctgcctgccacccccagcgccagcagcagccccaaggacatggatgaaaatgaaagcaaccagagcctgatgaccagcagccagtaccccaaggaggccgtgaggaagaggcagaacagcgccaggaacagcggggccagtgacagcagccgcttcagcaggaagagcttcaagctggactaccgcctggaggaggatgtgaccaagagcaagaagggcaaggatggccgctttgtgaacccctggcccacctggaagaaccccagcatccccaacgtgctgcgctggctgatcatggagaaggaccacagctctgtgcccagcagcaaggaggagctggacaaggagctgcctgtgctgaagccctacttcatcaccaaccctgaggaggccggcgtgcgggaggccggcctgcgggtgacctggctgggccacgccaccgtgatggtggagatggatgagctgatcttcctgacagaccccatcttcagcagccgggccagccccagccagtacatgggccccaagcgcttcagaagaagcccctgcaccatcagcgagctgccccccattgatgctgtgctgatcagccacaaccactatgaccacctggactacaacagcgtcatcgccctgaatgaaagatttggaaatgagctgcgctggtttgtgcccctgggcctgctggactggatgcagaagtgtggctgtgaaaatgtgattgagctggactggtgggaggagaactgtgtgcccggccatgacaaggtgacctttgtgttcacccccagccagcactggtgcaagaggaccctgatggatgacaacaaggtgctgtggggctcctggagcgtgctgggcccctggaaccgcttcttctttgctggggacaccggctactgcccagcctttgaggagatcggcaagagatttggcccctttgacctggccgccatccccatcggggcctatgagccccgctggttcatgaagtaccagcacgtggaccctgaggaggccgtgcgcatccacacagatgtgcagaccaagaagtccatggccatccactggggcacctttgccctggccaatgagcactacctggagccccctgtgaagctgaatgaggccctggagagatatggcctgaatgctgaggacttctttgtgctgaagcatggagagagccgctacctgaacaatgatgatgagaacttctag

SEQ ID NO: 296594 - DNA, 4988 bp, Artificial Sequence
  derived and/or modified sequence
ctcgcgggaggcggttttctcccgcctgctgtgctctgtgacctctctgctgcctcctccacggtctctgggcggagcaatccacactgctgagcctggggtggtttggaattcttcggcgaagtggagcgggctgagattcttcaccaaaggacatggatgaaaatgaaagcaaccagtctctgatgacaagcagccaatatcctaaagaagcagtaagaaaacgtcaaaattcagcacggaattccggagcaagtgattcttctaggttttctaggaaaagcttcaaactggattatagactagaagaagatgtaactaaatccaagaaaggaaaagatgggagatttgtgaatccgtggccaacatggaaaaacccctctattccaaatgttctcagatggctgataatggagaaagatcacagcagtgttccaagttctaaagaggaactagacaaagaactcccagtgcttaagccatattttatcactaaccctgaagaagctggagtgagggaagctggcttaagagtcacatggctgggacatgccacggtaatggtggaaatggatgagctcatatttctcacggatcccatctttagctctcgtgcttcaccatcgcagtacatgggtccaaagcgatttcgtcgttccccgtgcacaataagtgaactccctccaatagatgcggtccttatcagtcacaaccactatgaccatctggactacaattctgtcattgctttgaatgagcgatttggtaatgagttgagatggtttgtgcctttgggtctccttgactggatgcaaaaatgtggctgtgagaatgtgattgagttggactggtgggaggagaattgtgtccccggacatgataaggtcacttttgtctttacaccttcccagcactggtgtaaaaggactctaatggatgacaacaaggtgctatggggcagctggtctgtcttggggccttggaatcgattttttttcgcaggagatactggttattgccctgcttttgaagagataggaaaaagatttggaccttttgaccttgcagctattcccatcggagcttatgaaccgaggtggtttatgaaataccagcatgtagacccagaagaagctgtaaggattcacactgatgtccaaacaaagaaatctatggcaattcactggggaacttttgccttagcaaatgagcattacttagagcctccagtgaagctgaatgaagctctagagagatacggacttaacgctgaagatttttttgtcttgaagcatggagaatcaagatacctaaataatgatgatgaaaacttttaataaatgtgagcacaggcacttttaatgaaaaaggcatcatctaagtttaaaaacaaatgaaaagacttagaaattcatgaatattgtgattattttacatttggaaacaacttctgcaagtttatgttttatgttttgtgtaataacttgcttcctagtatgatcagctcatgtacactatgagagggttcaggggtgggtcatttaaataatgaattggctaatgtggattttaaatttcatatcatgatataagcactgcaatggaaatgtttttactaaaacattatatttttgtggtactagaatttcctgaggtgaaaaaccgatattgaagattcatttttcttttttccattcttcaggaccttcggcaaggtgagtcaaggctctctacctacctagatgtttttcagaggcctacaaatacaagtatctttcttatatgcacattctaataaatgatgaaattcagtccaacatgcttattataaacatagcaattcttgctctatcaaattagcttatatgccaaatattaaatatggtttatttaggtaagcataaaaacataggggctatcatttttaaagacttgattttctctattgtggtaaaatatataaatacatatttgccattttaaacatttaccattttaaccatttttaagtgtacagttctttcgcattaatgcacccatgaccaccattcacttaaatttttaaaagaacagtatattctttttttcctagagccttcagatgagagggaacagtatattctattgcacgtctacaattcccaaaagacctcttactttgggaggccaaggtgggtgggtcacttgaacccaggagtttgacatcaacctgggcaacatggtgacctcccgtctctctcggaaaaaaaaaaagaaaaaagaaaaagccgggtgaggtggtgtgtacctgtagtcacaggtacttgggaggctgaggtgggaggatcacttgagcccaggagatagaggctgcagtgagctgtgatcgtaccactgcactccagcctgggcgacaaaatgagaccctgtctcaaaagaaagccctctccttagctgagcagaggaagggaaggagtgtggctatgagaatatgatttatgccattttctgtttttaaatctagaagatcttctaagcacaaatacagctacaatgaaatattttacagacaaaatgttaatagaccatattctttgaattaaatttgtttttaattttctctacacattttttttttcctggagtctcttagctctaaatatatcaatcagatttataattttttttacctgattcagatgtcttacatttttatattaaatgaaccttaagcatgattcttttggtaagccagtatgaatgccagtggttggggggcggggggggagtcagttgacataagatttagtcctaataaggactctgtattcacttgattattctgacccttcctaagggagggaggtggattagataccactggaggcccattctgtattcctaatccagtctcagcactttattcatacaaaataatcaaaataggttttctacaccaaatgctacccaggcagtgctctataatttatttgcacacctgtatgtgtggtgccacgttagccactaaatctgaacttttaccctgctttcatcatggatttttttgtgtaacctgaaacaagtcaccagtgctcactgtgcctgtttcctcatttgcaacaagaggataattccgacctacctctgaaaaatgtgtagattaaatgagtttttaaagcactttagaaaatataagggagaaaatgatttcttaagatatcactgcctaatatagacaggtatatttgaaagctaaatacaggttaatgcttttgataatgtattgttcctgttgcaaatttaagcattatatattaggagactaaacattgaaaactttcactgatttttaaattggagtaatagcctaaataagtgtaaataatctttatcaaaatttagtgtttatctacaaagatgcgaatcagtcaaggggaaatgtgtatgcaatgtgtgtgtatatgatgtatgcgaacatatgtgattttggggtactaaagcacaaaaaaatcccccataaaataaaccttcctgaaaagactgatcataaactttttcactccaagcagatgtgaatcaagatgttaggtttatggtgagttagctttgaggtgtgttgccctaatactagccagcgttgttgtagccatattccctgctgctgcacgccgaattgaaaatccatctcttacctcttctctatgaagcaagccaggtatgtcttgcttaagtatttcttctccatgaatggccttaacattattttgtattcacgtgtactgtttaactgagggtctcaaagcactttaaactgttgtgttctatttccactcgtctggcctgcctcatttttctaggcccttttgtaagctgtaattttttattaccactcatgttctttctacactgacactattcattaagaacatcaagcttcatctctgcttacagaatctcaccttattgagtgggttccactttatttttcatttgttatctacattttgaagggtttatgtgcaaagtgaaaacaaattttgaaaaataagacaaatccattctcttcttcaattcagtctaatatgcattgtagtgtcttttaatcagtcttatcctctaagtcaacttcattttcctcttcgtgaatacccatagcaatatgtaagattttattgaagtttcctgtgataactgaggaatactttgctatgcctcactgcccaatagggtgggtcatcaattaggagaaatcccaaattataaaagccaacatatgccgtgacctacgtaggaaaagatgtatttgtgcatcttctttctgggtagttaaaaattactccctcttttctctagcattttgacatttcagactcaatgctctgatctctagggagtgtgattattcaaactaatgagaggacaagaagacacagttttagaatctactgctgctaaagcacattaaaaacaaatcctggtttttaatgtatgcatagtttcatatttaatgaatatgctttcattaaatagggaggtagatttgaaaaaaccgttataaagaaatgtgccttttggggaatgaatacttttgttcatgtctagcccactgggaattttgttttcaccttatactgagtcctttttctaatgtaaaaatatttcttccaagtttgatttctgtatcagggtaacattgagaacacacatatttctgtttgaggatttgtgacttcctatggaaacagtcttgcatctatgtatttacaaatgaaatttaaagtattcttaaagctttgccttaaatactgcttgcatactgatttacttaatgctaagcatggcaggggttataaatttaaatactataagacctggctgaatcccagatgtatcaataaattgttatagtagcttatggaaaatgctattaaagataaattttcatacattgtatttttagtcaagtaaaatatggatgaaaattaataaagtactgtcaagggaaaaaa

SEQ ID NO: 296595 - DNA, 565 bp, Artificial Sequence
  derived and/or modified sequence
acactgctgagcctggggtggtttggaattcttcggcgaagtggagcgggctgagagtgggtttcccgtccccgagccctccctcatctcggagatgccgcacttgtgagcgacagggcttcatttgaattttcgcacctcgcgagttgcggagcctgcatctctgaagctgcctcgttcttcaccaaaggacatggatgaaaatgaaagcaaccagtctctgatgacaagcagccaatatcctaaagaagcagtaagaaaacgtcaaaattcagcacggaattccggagcaagtgattcttctaggttttctaggaaaagcttcaaactggattatagactagaagaagatgtaactaaatccaagaaaggaaaagatgggagatttgtgaatccgtggccaacatggaaaaacccctctattccaaatgttctcagatggctgataatggagaaagatcacagcagtgttccaagttctaaagaggaactagacaaagaactcccagtgcttaagccatattttatcactaaccctgaagaagctggagtgagggaagctggc

SEQ ID NO: 296596 - DNA, 2672 bp, Artificial Sequence
  derived and/or modified sequence
ggagagtagctgtctgggatttgagatcctatcttccctgcaaattaccaggttgcatcttcactgataggaatacatttcttcaccaaaggacatggatgaaaatgaaagcaaccagtctctgatgacaagcagccaatatcctaaagaagcagtaagaaaacgtcaaaattcagcacggaattccggagcaagtgattcttctaggttttctaggaaaagcttcaaactggattatagactagaagaagatgtaactaaatccaagaaaggaaaagatgggagatttgtgaatccgtggccaacatggaaaaacccctctattccaaatgttctcagatggctgataatggagaaagatcacagcagtgttccaagttctaaagaggaactagacaaagaactcccagtgcttaagccatattttatcactaaccctgaagaagctggagtgagggaagctggcttaagagtcacatggctgggacatgccacggtaatggtggaaatggatgagctcatatttctcacggatcccatctttagctctcgtgcttcaccatcgcagtacatgggtccaaagcgatttcgtcgttccccgtgcacaataagtgaactccctccaatagatgcggtccttatcagtcacaaccactatgaccatctggactacaattctgtcattgctttgaatgagcgatttggtaatgagttgagatggtttgtgcctttgggtctccttgactggatgcaaaaatgtggctgtgagaatgtgattgagttggactggtgggaggagaattgtgtccccggacatgataaggtcacttttgtctttacaccttcccagcactggtgtaaaaggactctaatggatgacaacaaggtgctatggggcagctggtctgtcttggggccttggaatcgattttttttcgcaggagatactggttattgccctgcttttgaagagataggaaaaagatttggaccttttgaccttgcagctattcccatcggagcttatgaaccgaggtggtttatgaaataccagcatgtagacccagaagaagctgtaaggattcacactgatgtccaaacaaagaaatctatggcaattcactggggaacttttgccttagcaaatgagcattacttagagcctccagtgaagctgaatgaagctctagagagatacggacttaacgctgaagatttttttgtcttgaagcatggagaatcaagatacctaaataatgatgatgaaaacttttaataaataatttcctgaggtgaaaaaccgatattgaagattcatttttcttttttccattcttcaggaccttcggcaagatgtgaatcaagatgttaggtttatggtgagttagctttgaggtgtgttgccctaatactagccagcgttgttgtagccatattccctgctgctgcacgccgaattgaaaatccatctcttacctcttctctatgaagcaagccaggtatgtcttgcttaagtatttcttctccatgaatggccttaacattattttgtattcacgtgtactgtttaactgagggtctcaaagcactttaaactgttgtgttctatttccactcgtctggcctgcctcatttttctaggcccttttgtaagctgtaattttttattaccactcatgttctttctacactgacactattcattaagaacatcaagcttcatctctgcttacagaatctcaccttattgagtgggttccactttatttttcatttgttatctacattttgaagggtttatgtgcaaagtgaaaacaaattttgaaaaataagacaaatccattctcttcttcaattcagtctaatatgcattgtagtgtcttttaatcagtcttatcctctaagtcaacttcattttcctcttcgtgaatacccatagcaatatgtaagattttattgaagtttcctgtgataactgaggaatactttgctatgcctcactgcccaatagggtgggtcatcaattaggagaaatcccaaattataaaagccaacatatgccgtgacctacgtaggaaaagatgtatttgtgcatcttctttctgggtagttaaaaattactccctcttttctctagcattttgacatttcagactcaatgctctgatctctagggagtgtgattattcaaactaatgagaggacaagaagacacagttttagaatctactgctgctaaagcacattaaaaacaaatcctggtttttaatgtatgcatagtttcatatttaatgaatatgctttcattaaatagggaggtagatttgaaaaaaccgttataaagaaatgtgccttttggggaatgaatacttttgttcatgtctagcccactgggaattttgttttcaccttatactgagtcctttttctaatgtaaaaatatttcttccaagtttgatttctgtatcagggtaacattgagaacacacatatttctgtttgaggatttgtgacttcctatggaaacagtcttgcatctatgtatttacaaatgaaatttaaagtattcttaaagctttgccttaaatactgcttgcatactgatttacttaatgctaagcatggcaggggttataaatttaaatactataagacctggctgaatcccagat

SEQ ID NO: 296597 - DNA, 1822 bp, Artificial Sequence
  derived and/or modified sequence
gaaggaggccaccgctggccctgctgtcagattcgaaggtcataataagggagtgacccggcgacgactcgccccaacgatggcgaggcggcgagagctgaagcgctgcctgcagctgctggcgtcctcggcggagccagcgcggcgggctcgggttaggaagaacccgagcgcctgccgcggtcgcccctcccgctacgcggcggcgctttgcgcggggactctgtggccggaagccgcggaactgaggcggcgcgcgctcccggccaccccaagcgcgagttcttcaccaaaggacatggatgaaaatgaaagcaaccagtctctgatgacaagcagccaatatcctaaagaagcagtaagaaaacgtcaaaattcagcacggaattccggagcaagtgattcttctaggttttctaggaaaagcttcaaactggattatagactagaagaagatgtaactaaatccaagaaaggaaaagatgggagatttgtgaatccgtggccaacatggaaaaacccctctattccaaatgttctcagatggctgataatggagaaagatcacagcagtgttccaagttctaaagaggaactagacaaagaactcccagtgcttaagccatattttatcactaaccctgaagaagctggagtgagggaagctggcttaagagtcacatggctgggacatgccacggtaatggtggaaatggatgagctcatatttctcacggatcccatctttagctctcgtgcttcaccatcgcagtacatgggtccaaagcgatttcgtcgttccccgtgcacaataagtgaactccctccaatagatgcggtccttatcagtcacaaccactatgaccatctggactacaattctgtcattgctttgaatgagcgatttggtaatgagttgagatggtttgtgcctttgggtctccttgactggatgcaaaaatgtggctgtgagaatgtgattgagttggactggtgggaggagaattgtgtccccggacatgataaggtcacttttgtctttacaccttcccagcactggtgtaaaaggactctaatggatgacaacaaggtgctatggggcagctggtctgtcttggggccttggaatcgattttttttcgcaggagatactggttattgccctgcttttgaagagataggaaaaagatttggaccttttgaccttgcagctattcccatcggagcttatgaaccgaggtggtttatgaaataccagcatgtagacccagaagaagctgtaaggattcacactgatgtccaaacaaagaaatctatggcaattcactggggaacttttgccttagcaaatgagcattacttagagcctccagtgaagctgaatgaagctctagagagatacggacttaacgctgaagatttttttgtcttgaagcatggagaatcaagatacctaaataatgatgatgaaaacttttaataaatgtgagcacaggcacttttaatgaaaaaggcatcatctaagtttaaaaacaaatgaaaagacttagaaattcatgaatattgtgattattttacatttggaaacaacttctgcaagtttatgttttatgttttgtgtaataacttgcttcctagtatgatcagctcatgtacactatgagagggttcaggggtgggtcatttaaataatgaattggctaatgtggattttaaatttcatatcatgatataagcactgcaatggaaatgtttttactaaaacattatatttttgtggtactagaatttcctgaggtgaaaaaccgatattgaagattca

SEQ ID NO: 296598 - DNA, 2380 bp, Artificial Sequence
  derived and/or modified sequence
aattcttcggcgaagtggagcgggctgagagtgggtttcccgtccccgagccctccctcatctcggagatgccgcacttgtgagcgacagggcttcatttgaattttcgcacctcgcgagttgcggagcctgcatctctgaagctgcctcggtgaagagccacagcattattttttttctctttgggagagtagctgtctgggatttgagatcctatcttccctgcaaattaccaggttgcatcttcactgataggaatacatttcttcaccaaaggacatggatgaaaatgaaagcaaccagtctctgatgacaagcagccaatatcctaaagaagcagtaagaaaacgtcaaaattcagcacggaattccggagcaagtgattcttctaggttttctaggaaaagcttcaaactggattatagactagaagaagatgtaactaaatccaagaaaggaaaagatgggagatttgtgaatccgtggccaacatggaaaaacccctctattccaaatgttctcagatggctgataatggagaaagatcacagcagtgttccaagttctaaagaggaactagacaaagaactcccagtgcttaagccatattttatcactaaccctgaagaagctggagtgagggaagctggcttaagagtcacatggctgggacatgccacggtaatggtggaaatggatgagctcatatttctcacggatcccatctttagctctcgtgcttcaccatcgcagtacatgggtccaaagcgatttcgtcgttccccgtgcacaataagtgaactccctccaatagatgcggtccttatcagtcacaaccactatgaccatctggactacaattctgtcattgctttgaatgagcgatttggtaatgagttgagatggtttgtgcctttgggtctccttgactggatgcaaaaatgtggctgtgagaatgtgattgagttggactggtgggaggagaattgtgtccccggacatgataaggtcacttttgtctttacaccttcccagcactggtgtaaaaggactctaatggatgacaacaaggtgctatggggcagctggtctgtcttggggccttggaatcgattttttttcgcaggagatactggttattgccctgcttttgaagagataggaaaaagatttggaccttttgaccttgcagctattcccatcggagcttatgaaccgaggtggtttatgaaataccagcatgtagacccagaagaagctgtaaggattcacactgatgtccaaacaaagaaatctatggcaattcactggggaacttttgccttagcaaatgagcattacttagagcctccagtgaagctgaatgaagctctagagagatacggacttaacgctgaagatttttttgtcttgaagcatggagaatcaagatacctaaataatgatgatgaaaacttttaataaatgtgagcacaggcacttttaatgaaaaaggcatcatctaagtttaaaaacaaatgaaaagacttagaaattcatgaatattgtgattattttacatttggaaacaacttctgcaagtttatgttttatgttttgtgtaataacttgcttcctagtatgatcagctcatgtacactatgagagggttcaggggtgggtcatttaaataatgaattggctaatgtggattttaaatttcatatcatgatataagcactgcaatggaaatgtttttactaaaacattatatttttgtggtactagaatttcctgaggtgaaaaaccgatattgaagattcatttttcttttttccattcttcaggaccttcggcaaggtgagtcaaggctctctacctacctagatgtttttcagaggcctacaaatacaagtatctttcttatatgcacattctaataaatgatgaaattcagtccaacatgcttattataaacatagcaattcttgctctatcaaattagcttatatgccaaatattaaatatggtttatttaggtaagcataaaaacataggggctatcatttttaaagacttgattttctctattgtggtaaaatatataaatacatatttgccattttaaacatttaccattttaaccatttttaagtgtacagttctttcgcattaatgcacccatgaccaccattcacttaaatttttaaaagaacagtatattctttttttcctagagccttcagatgagagggaacagtatattctattgcacgtctacaattcccaaaagacctcttactttgggaggccaaggtgggtgggtcacttgaacccaggagtttgacatcaacctgggcaacatggtgacctcccgtctctctcggaaaaaaaaaaagaa

SEQ ID NO: 296599 - DNA, 1182 bp, Artificial Sequence
  derived and/or modified sequence
atggacgagaacgagagcaaccagagcctgatgaccagcagccagtaccctaaagaagcggtgagaaaaaggcagaacagcgcccgaaattctggcgcttcagactcttcgcgtttttcccggaaatccttcaaactggattatcgccttgaggaggatgtcactaagagcaaaaaagggaaagacgggagatttgtgaatccatggcctacatggaagaacccgtctattccgaacgtgctgcgctggttaatcatggagaaggatcatagcagcgttccgtcatcaaaggaagagctggacaaagagctcccagtgctgaagccctacttcatcacaaatcccgaagaggcaggggtccgggaggccggcttgagagtgacctggttggggcacgcaacggtcatggtggaaatggacgaattgatcttccttactgaccccatcttttccagcagagccagcccgtctcagtatatgggtcctaagaggtttcggagatcgccttgtacaatatccgagctccctcccatcgacgcagtcctcatttcacataaccactatgatcacctggattataatagcgtcattgccctgaacgaacgatttggtaacgagctgcgctggtttgtgccccttggcctgttagactggatgcagaagtgcggctgtgagaacgtgatcgagctggattggtgggaggaaaactgcgtcccagggcacgataaagtgacgtttgtgtttacaccttcccagcactggtgcaagcggacgttgatggacgataataaagtcttgtggggcagttggagcgtgctgggaccttggaaccgctttttctttgcaggggataccggctactgtcccgctttcgaggagattgggaagagattcgggccatttgatttggccgccatccccatcggggcgtatgagcctagatggttcatgaagtatcagcatgtcgaccccgaggaggcagtgaggatccacaccgacgttcagactaaaaaatcgatggcgatacactggggaaccttcgccctagccaacgagcactacctagagccccccgtgaagctgaatgaagctttggaaaggtacggtctgaatgctgaagactttttcgtgctgaagcatggagagagcagatacttaaataatgacgatgagaacttttag

SEQ ID NO: 296600 - DNA, 375 bp, Artificial Sequence
  derived and/or modified sequence
atggacgagaacgagagcaaccagagcctgatgaccagcagccagtacccgaaagaagccgttaggaaacggcaaaactccgcacggaacagtggggcttctgactctagcagattcagtcgcaagtccttcaagctggattacagacttgaggaagacgtgacgaagtcaaaaaagggtaaggacgggcgcttcgtaaatccctggcccacctggaagaatccctcaatcccaaatgtgctacggtggctaattatggaaaaggatcatagctctgtccctagtagcaaggaggagctcgataaagaactgccagtgcttaagccttatttcatcactaacccggaggaagctggggttcgggaggccggctag

SEQ ID NO: 296601 - DNA, 1182 bp, Artificial Sequence
  derived and/or modified sequence
atggacgagaacgagagcaaccagagcctgatgaccagcagccagtacccgaaggaggccgtacgcaaacgacagaactccgcaaggaattccggcgccagcgactcttctaggttctctaggaagtcatttaaactggactatagactggaagaggatgtgacaaagtctaagaaaggcaaggacggtagattcgttaatccctggcccacttggaagaaccctagcattcctaacgtgctcagatggctcatcatggagaaagaccattcatctgtcccatcgagtaaagaggaattggataaggagctccccgtcttaaagccctactttattaccaatcctgaagaagccggggtgagggaagccggactgagagttacttggctcggccacgcaaccgtgatggtggaaatggatgaactgatctttctgactgatcccatcttcagcagtagagcctcaccgtctcaatacatggggccaaagcgattcaggagaagtccatgcacaattagtgagttaccacccatcgacgctgtgcttatctctcacaaccactacgaccatctagactacaattccgtcatcgccctgaatgaacggttcggcaatgagctccgctggttcgtgccgctgggtcttttggactggatgcagaagtgtggatgtgaaaacgtgatcgaacttgactggtgggaggagaattgtgttcctggacatgacaaggtgactttcgtatttactccttcacaacattggtgcaagcgaaccctgatggacgacaataaagtgctgtggggctcatggtctgtgttggggccctggaacaggttcttcttcgccggtgacacgggttactgccctgccttcgaagagataggcaaacgtttcggtccatttgacctggccgccatccctattggagcctatgaacccagatggttcatgaagtatcagcatgtggacccagaagaagccgttcgcatccacaccgatgtccagaccaaaaagtcaatggctatccattggggaaccttcgcattagccaacgagcactatctcgaaccacctgtgaaactgaatgaagctctggaaaggtacggcttgaacgccgaggatttctttgtcctcaagcatggcgagtctcggtatctaaataacgacgatgagaatttctag

SEQ ID NO: 296602 - DNA, 1182 bp, Artificial Sequence
  derived and/or modified sequence
atggacgagaacgagagcaaccagagcctgatgaccagcagccagtatcccaaggaggcagtgcgaaaaaggcagaacagcgcaagaaacagtggagccagtgatagtagccgtttctctcggaaatcttttaaattggactaccgcctggaagaagatgttacgaagagtaaaaagggtaaggatgggaggtttgtcaacccatggcccacctggaaaaaccccagcatacctaatgtgctgagatggctgataatggaaaaagaccatagcagtgtcccatcaagcaaggaggagctcgacaaggagctgcccgtgctgaagccatactttatcacgaatcccgaggaggcaggggtgagagaagcgggcttgcgggtgacctggctggggcatgcgacagtaatggttgaaatggatgaactgatcttcttgactgatcccattttctcatcccgcgcatctccaagccagtatatgggccccaagcgcttccgtagatccccttgcacgattagcgaactgccccctatcgacgcggtcctgattagccacaatcactacgaccatctggactacaattcggtgattgctttgaatgagaggttcggcaacgaactgcgttggtttgtgcctctcgggttgctggactggatgcaaaaatgtggatgcgagaatgtgatcgaactggactggtgggaggaaaactgtgtgccggggcatgataaagtgacatttgtgtttaccccctcccagcattggtgcaagcgcacactgatggatgacaacaaggttctttggggcagctggtcagtgctgggtccttggaatagattcttttttgccggagatactggctattgtcccgcgtttgaggaaattggaaagcgcttcggcccattcgatcttgccgcgattcccataggtgcctatgaaccccggtggtttatgaagtaccagcatgtggatcccgaagaggcggtccggattcatacagacgtgcagacaaagaagtctatggcgatccactggggtaccttcgcattggccaacgaacactacctggaaccacctgtaaaactcaacgaggccttggagaggtacggcctgaatgccgaggatttcttcgtgctgaagcacggcgagtccaggtatcttaacaatgacgacgagaacttttag

SEQ ID NO: 296603 - DNA, 1401 bp, Artificial Sequence
  derived and/or modified sequence
atggcccggcggcgggagctgaagcggtgcctgcagctgctggccagctcggcggagcctgctaggcgtgctagggtgcggaagaacccttccgcatgtcggggtcgcccgtctagatacgctgcggcactgtgtgcaggcacactgtggcctgaagccgcagagctgaggcgcagggctctccccgccactccttctgcttcatccagcccaaaggacatggatgagaatgagagtaaccagagcctaatgacatccagccagtacccaaaggaggccgtgaggaaacgtcaaaattccgctcgtaattctggcgcaagcgatagtagcagattttcgcggaagtccttcaagctggactatcggctggaggaagacgtgaccaagtcaaaaaaggggaaggatggccggtttgtgaacccctggccgacttggaaaaatcccagcattcccaacgtgctccgatggcttatcatggagaaggatcatagctcggtgccctctagtaaggaagagctggacaaggaacttccagtcctcaagccttacttcatcaccaacccagaggaggctggcgtgagggaagccgggctgcgggtgacctggctgggacacgccacagtaatggtcgaaatggatgaacttatctttctcacagatcccatcttctcgtcgagagccagtccctctcagtacatgggacccaaaaggttcagaagaagcccatgcactatctcagagcttcccccgatcgatgccgtactgatcagccataaccactacgaccacctcgattacaatagcgtgatcgcccttaacgaacgatttggaaatgagcttcggtggtttgtgcctcttggccttctcgattggatgcaaaaatgtggatgtgagaatgtgatcgagctggattggtgggaggagaactgtgtgcctggtcacgacaaggtaaccttcgtattcacaccttcacagcattggtgcaaaaggacactgatggatgataataaggtgttgtggggaagttggagcgtactgggcccatggaatcgtttcttctttgcgggggacacaggatactgtcccgccttcgaagagattggcaaacgctttgggcccttcgacctggccgccattcctatcggggcctacgagccaagatggtttatgaaataccagcatgtggatccagaggaggcagtgcgaattcacaccgacgtccagacgaagaaatctatggctatacattggggcacgttcgcactcgccaacgaacattacctcgaaccacccgtcaagttgaatgaagcgcttgagaggtacggactcaatgctgaggatttttttgtgcttaaacatggtgaaagccgctacttaaataatgatgatgaaaatttctag

SEQ ID NO: 296604 - DNA, 1182 bp, Artificial Sequence
  derived and/or modified sequence
atggacgagaacgagagcaaccagagcctgatgaccagcagccagtatccaaaggaagccgtgcgaaaacggcagaactctgcgcggaacagcggcgcctccgattcttctagattctctagaaagagcttcaagcttgattacaggctggaagaggacgtgacgaaatcaaaaaagggcaaggacggtcgtttcgtgaacccatggcccacctggaagaacccttcaatcccaaatgtgctgcgttggctaatcatggaaaaggaccattctagtgtaccctcgtcaaaagaagagctcgacaaggaactccctgtgttgaagccatacttcattactaatcccgaggaggccggtgttcgcgaggccggtctccgagtaacgtggctaggacatgccaccgtcatggtggaaatggatgaattaatctttcttaccgaccccatcttttcatccagggccagtccaagtcagtatatgggccccaagagatttcggagatccccctgcaccatatcagagttgccgcccatcgatgcagtgttaattagccacaaccattacgaccatctcgattataactccgtcattgcactaaacgagcgttttgggaatgagctcagatggttcgtgccactggggctgttggattggatgcagaaatgcggatgtgagaacgtgatagagctagattggtgggaggagaactgtgtgccgggccacgacaaggtaacgttcgttttcactccaagccagcattggtgcaagaggacactcatggacgataacaaagtgctgtggggtagttggtccgtgctgggaccatggaatagattcttctttgcgggagacactggatactgcccagccttcgaggaaattgggaagcggtttgggccgtttgatctggcagccatcccaataggagcatacgagccgcgttggttcatgaagtaccaacatgtggatccggaagaggctgtgcggatacacacagacgtgcagactaaaaagagcatggccatccactgggggactttcgcgttggccaatgagcactatttggagcccccagtgaaactcaatgaagccctggagcgctatggattgaacgccgaagatttctttgttttaaaacacggagaatcccgttatttaaacaatgacgacgagaacttctag

SEQ ID NO: 296605 - DNA, 1182 bp, Artificial Sequence
  derived and/or modified sequence
atggacgaaaacgaatccaaccaaagcctgatgactagcagccagtaccccaaagaagctgtgcgtaaacgccagaatagtgctcgaaactccggtgcatcggattcttcaagattcagtcggaaaagcttcaaattagactatagactggaagaagacgtcacaaaaagcaaaaaggggaaggatggcagattcgtgaatccctggccaacatggaaaaacccttcaattcctaacgttctgaggtggctgattatggaaaaggatcactccagtgttccttccagcaaggaagagctggacaaagagcttccagtgctcaagccctactttatcaccaacccagaggaggcgggtgttagagaggccggtctgcgcgtgacttggcttggacacgcgactgtgatggtggaaatggatgaactcatatttctgactgacccaatctttagctcccgcgcttcacctagtcagtacatgggcccaaagagattcaggaggagcccgtgcaccatctctgagttaccccctatcgacgcagtgcttatttcccataatcattatgatcacctggattataattctgttatcgccctgaatgaacggttcggtaatgagcttcggtggttcgtaccactgggcctcctcgactggatgcagaagtgtggatgcgaaaacgtcatcgaactcgactggtgggaagagaattgcgtgccagggcatgacaaagtaaccttcgtgttcacaccttcccaacattggtgtaagaggaccctcatggatgataacaaagtcttgtggggcagttggagcgtactgggtccatggaaccggtttttttttgccggtgacactggctattgtccagcatttgaagagattggaaaacggttcgggccattcgatctggctgccatccccatcggtgcctatgagccaagatggttcatgaaataccagcatgtggaccccgaggaggccgtgcggatacacactgacgttcagaccaaaaagtctatggccattcactgggggactttcgcactggctaatgagcactaccttgaaccgcctgtcaagcttaacgaggcattggagcgatatgggctgaatgccgaggatttctttgttctgaagcacggagaaagccgatacttgaacaacgacgatgaaaatttctag

SEQ ID NO: 296606 - DNA, 375 bp, Artificial Sequence
  derived and/or modified sequence
atggacgaaaacgagagcaatcagtctctcatgacgtcctcccaatatccaaaggaggcagtaaggaagaggcagaacagcgcccgtaacagtggagccagcgatagtagcagattctctcgcaagtcatttaagctagactacaggttggaggaagacgtcaccaagagcaagaaaggcaaagatggacgattcgtaaatccatggcctacatggaagaacccctccattcccaatgtgctacgctggctgattatggaaaaggaccattcgtctgtcccttccagcaaggaagaacttgacaaagagctccctgtcctcaagccatactttattactaatccagaggaggctggcgtgagagaagcaggatag

SEQ ID NO: 296607 - DNA, 1182 bp, Artificial Sequence
  derived and/or modified sequence
atggacgagaatgagtcaaatcagtctctcatgacgtcaagtcaataccccaaggaggccgtgcgcaagaggcaaaactctgcacggaactccggggcaagtgacagttctagattttcccgtaaatcttttaagctcgattaccgcttagaagaagatgtcacaaagagcaagaaaggcaaggacgggagattcgttaatccatggccaacatggaaaaatcccagcatcccaaacgtgttgcggtggctcatcatggagaaagaccacagctcagtcccatcaagtaaagaagagctggataaggaactgccagttctgaagccgtattttatcaccaaccccgaggaggccggagtaagagaggcgggtctgagagtcacctggcttggtcatgctaccgtgatggtcgagatggatgagttgatcttcctcacagatcctatcttttcgtcccgcgcttctccttcccagtacatgggacctaaacgtttccgtcggagtccatgtacaatatcagaacttcctcccattgatgccgtgctgattagtcataaccactatgatcatctggactataatagtgtcattgccctcaacgaaagattcggaaacgagttgaggtggttcgtccccctcggcctgcttgactggatgcagaagtgtggctgtgaaaatgtgatcgaactggactggtgggaagagaattgcgtgccgggtcatgacaaagtcacattcgtctttacgcctagtcagcactggtgtaagagaaccctcatggatgataacaaggtattgtggggatcctggtctgttctcgggccttggaatcggttttttttcgccggtgacaccgggtactgtcccgctttcgaggaaatcgggaaacgattcggtcccttcgatctggccgcaatccccataggcgcttacgaaccacggtggttcatgaaatatcagcatgtggaccccgaggaagccgtgcgtatccacacagatgtccagacaaagaaatctatggccatacattggggtacctttgcattggctaacgagcactatctagaacccccagtgaagcttaacgaagcccttgagagatacggcctgaatgctgaggactttttcgttctaaaacacggcgaatcaaggtacctaaataacgacgatgagaatttttag

SEQ ID NO: 296608 - DNA, 1182 bp, Artificial Sequence
  derived and/or modified sequence
atggacgagaatgagagcaaccaatcccttatgacgagtagccaatacccgaaggaggccgtccgcaagaggcaaaactccgccaggaactccggagcgtctgattcatcacgattctccaggaagtccttcaagctagattaccgactggaagaagatgtaactaagtcaaaaaagggcaaggatggtaggttcgtcaatccatggccaacctggaaaaacccaagtatcccaaacgttttgaggtggctgatcatggagaaagaccattcttccgtgccttctagcaaggaggagctagataaggagctcccggtgctcaaaccctacttcatcacaaacccagaggaggctggagtgcgggaggccggtctgagggtcacctggcttgggcatgccacggtaatggtagaaatggacgaactcattttcctgacagaccctattttttcatcccgagcctcaccctcacagtacatggggccaaaacggtttagaagatcaccctgcaccatctctgagctgcctcccatcgacgccgtactgatatcacacaatcattacgatcatctcgattacaatagcgtgatcgcacttaatgagagattcggcaatgagctccggtggtttgttcctctggggctgctcgattggatgcagaaatgtggctgcgaaaacgtgattgaactcgattggtgggaggagaactgcgtgcccggacacgataaagtgactttcgtgttcactccttctcagcactggtgcaaacgtacgcttatggatgataataaagtactttggggctcttggagtgtgcttggaccatggaatagattcttctttgccggagataccggttactgtcccgcatttgaggagatcggaaagagattcgggccttttgacctcgctgcaatcccaataggcgcatacgaacccaggtggttcatgaagtaccaacacgttgacccagaagaagcagtgcgaattcatacggatgttcagactaagaaaagcatggccatccattggggtacgttcgctctcgctaatgaacattatcttgagccccctgttaagctcaacgaggcactcgagcgctacggcctgaacgccgaggacttcttcgttctaaagcacggagagagccgttatcttaacaatgacgacgagaacttctag

SEQ ID NO: 296609 - DNA, 1401 bp, Artificial Sequence
  derived and/or modified sequence
atggcacgtcggagggagctgaagcggtgtttgcagctgctggccagttctgctgagccggctcgcagggccagagtgcgaaagaaccctagtgcgtgtagaggaaggccctcacggtatgcggctgcgctatgcgcaggcacgctgtggcccgaggccgctgagctgcgaaggcgagccctgccagcaacacctagcgcctcgtcctctccaaaagacatggacgagaacgaaagtaaccaatcgctcatgacaagctctcagtaccctaaagaagcagttcggaagcgacagaacagtgcccgaaatagcggggcaagcgatagctcgcgttttagtaggaagtccttcaagcttgattatagactcgaagaggatgtgacaaagagcaaaaaaggaaaggatggacgctttgtgaacccttggcctacttggaaaaaccctagtattcctaatgtcttgaggtggctgatcatggagaaggatcattcaagcgtgccatcgagcaaagaagagctggataaagaactgccagtccttaagccatacttcattaccaaccccgaggaagcaggcgttagggaggcaggtctacgcgtgacgtggctggggcacgccactgtgatggtcgagatggatgaactgatatttctgacagatcctatcttctcatcgcgggcaagtcccagtcagtacatgggacccaagcggtttaggcgcagcccctgcacaatttcagaactcccccctatagacgccgtgctgatttcacataaccactatgatcaccttgactataacagcgtgattgcactgaatgaaaggttcggaaatgaactccgttggttcgtccctctgggcctcctggactggatgcaaaagtgcggctgtgaaaacgtcatcgaactagactggtgggaggagaattgtgtcccaggacatgacaaggtcacatttgtgtttaccccctcacaacactggtgcaaaaggactctgatggacgataacaaggtcctgtggggcagctggtctgtcctaggtccatggaatcggtttttcttcgcaggtgacacgggttattgtcccgcttttgaagagattggcaagcgatttgggcctttcgacctggctgccattcccatcggtgcttatgaaccaagatggtttatgaaataccagcatgtggaccccgaagaggcagtccgtatccatacggacgttcagactaagaagtcaatggctatccattgggggacatttgccctggcaaacgaacattacctggaacctcctgtgaaattgaatgaggcactcgagaggtatgggctgaacgcagaggacttctttgtgctgaaacacggagaatctcgctatctgaataacgacgatgagaacttctag

SEQ ID NO: 296610 - DNA, 1182 bp, Artificial Sequence
  derived and/or modified sequence
atggacgagaacgagtccaatcaaagcctgatgacttcgagtcagtatcctaaggaagctgtgaggaagagacagaactccgcacgaaactcaggcgctagcgacagcagcaggttttcacgcaagtcctttaagttagactacaggctggaggaagacgtcacaaagtctaaaaaaggcaaggacggcaggttcgtaaacccctggcctacctggaagaatccctccataccaaatgtgctgcggtggctgatcatggagaaggaccacagctctgttccgtcttctaaggaggagctggacaaagagctgcccgtgctcaaaccctacttcattaccaatcccgaagaagctggcgtccgcgaagcaggattaagagtcacctggttggggcacgctaccgtgatggtggaaatggacgaattgatcttcctcacagatcctatcttctcaagtcgtgcatccccttcccagtacatgggcccaaaaagatttagacggtcaccgtgtacaatcagcgaacttccgcctatcgacgcggtgctgatcagccacaaccattacgaccatctggactataattccgttatcgcacttaatgagcgtttcggtaacgagctacgatggtttgtgccattaggcctgctggactggatgcagaagtgtggctgcgagaacgtgattgagctggactggtgggaagagaactgcgttcctggacatgataaagtgacgttcgtatttaccccctcccagcactggtgcaaacgcacacttatggacgataacaaagttttgtgggggtcttggtccgtgctgggcccatggaacagattcttcttcgctggtgacacaggatactgcccagccttcgaagagattggtaagaggttcggacccttcgatttggccgctataccgataggcgcatatgagccacgctggttcatgaaatatcagcacgttgacccagaggaggccgtgaggatacacaccgatgtgcagaccaaaaagagcatggcaatccactggggtacatttgccctggcaaatgagcactaccttgagccgcctgtaaaactgaacgaagccctcgagcgctacgggctcaatgctgaggattttttcgtcctgaagcacggagaaagtagatatcttaataacgacgacgaaaacttttag

SEQ ID NO: 296611 - DNA, 375 bp, Artificial Sequence
  derived and/or modified sequence
atggacgagaacgagagcaaccagagcctgatgaccagcagccagtaccccaaggaggccgtgagaaagagacagaacagcgccagaaacagcggcgccagcgacagcagcagattcagcagaaagagcttcaagctggactacagactggaggaggacgtgaccaagagcaagaagggcaaggacggcagattcgtgaacccctggcccacctggaagaaccccagcatccccaacgtgctgagatggctgatcatggagaaggaccacagcagcgtgcccagcagcaaggaggagctggacaaggagctgcccgtgctgaagccctacttcatcaccaaccccgaggaggccggcgtgagagaggccggctag

SEQ ID NO: 296612 - DNA, 1401 bp, Artificial Sequence
  derived and/or modified sequence
atggccagaagaagagagctgaagagatgcctgcagctgctggccagcagcgccgagcccgccagaagagccagagtgagaaagaaccccagcgcctgcagaggcagacccagcagatacgccgccgccctgtgcgccggcaccctgtggcccgaggccgccgagctgagaagaagagccctgcccgccacccccagcgccagcagcagccccaaggacatggacgagaacgagagcaaccagagcctgatgaccagcagccagtaccccaaggaggccgtgagaaagagacagaacagcgccagaaacagcggcgccagcgacagcagcagattcagcagaaagagcttcaagctggactacagactggaggaggacgtgaccaagagcaagaagggcaaggacggcagattcgtgaacccctggcccacctggaagaaccccagcatccccaacgtgctgagatggctgatcatggagaaggaccacagcagcgtgcccagcagcaaggaggagctggacaaggagctgcccgtgctgaagccctacttcatcaccaaccccgaggaggccggcgtgagagaggccggcctgagagtgacctggctgggccacgccaccgtgatggtggagatggacgagctgatcttcctgaccgaccccatcttcagcagcagagccagccccagccagtacatgggccccaagagattcagaagaagcccctgcaccatcagcgagctgccccccatcgacgccgtgctgatcagccacaaccactacgaccacctggactacaacagcgtgatcgccctgaacgagagattcggcaacgagctgagatggttcgtgcccctgggcctgctggactggatgcagaagtgcggctgcgagaacgtgatcgagctggactggtgggaggagaactgcgtgcccggccacgacaaggtgaccttcgtgttcacccccagccagcactggtgcaagagaaccctgatggacgacaacaaggtgctgtggggcagctggagcgtgctgggcccctggaacagattcttcttcgccggcgacaccggctactgccccgccttcgaggagatcggcaagagattcggccccttcgacctggccgccatccccatcggcgcctacgagcccagatggttcatgaagtaccagcacgtggaccccgaggaggccgtgagaatccacaccgacgtgcagaccaagaagagcatggccatccactggggcaccttcgccctggccaacgagcactacctggagccccccgtgaagctgaacgaggccctggagagatacggcctgaacgccgaggacttcttcgtgctgaagcacggcgagagcagatacctgaacaacgacgacgagaacttctag

SEQ ID NO: 296613 - protein, 21 aa, Artificial Sequence
  derived and/or modified sequence
MRSGKASCTLETVWEDKHKYE

SEQ ID NO: 296614 - DNA, 114 bp, Artificial Sequence
  derived and/or modified sequence
atgaggtctgggaaggctagttgtactttagaaacagtgtgggaggataaacacaagtacgaggaagctgaacgacgcttctacgagcacgaagctacccaagctgccgcttag

SEQ ID NO: 296615 - DNA, 66 bp, Artificial Sequence
  derived and/or modified sequence
atgcggagcgggaaagctagctgtacactcgagaccgtgtgggaagataagcataaatacgagtag

SEQ ID NO: 296616 - DNA, 96 bp, Artificial Sequence
  derived and/or modified sequence
atgagaagcgggaaggcatcatgtacgctcgagactgtatgggaggacaagcacaaatacgaggaggccgaaaggagattctacgaacacgaatag

SEQ ID NO: 296617 - DNA, 114 bp, Artificial Sequence
  derived and/or modified sequence
atgaggtctgggaaggccagctgcaccctggagaccgtgtgggaggacaagcacaagtatgaggaggccgagcggcgcttctatgagcacgaggccacccaggccgccgcctag

SEQ ID NO: 296618 - DNA, 66 bp, Artificial Sequence
  derived and/or modified sequence
atgaggtctgggaaggccagctgcaccctggagaccgtgtgggaggacaagcacaagtatgaatag

SEQ ID NO: 296619 - DNA, 96 bp, Artificial Sequence
  derived and/or modified sequence
atgaggtctgggaaggccagctgcaccctggagaccgtgtgggaggacaagcacaagtatgaggaggccgagcggcgcttctatgagcacgagtag

SEQ ID NO: 296620 - DNA, 114 bp, Artificial Sequence
  derived and/or modified sequence
atgcggagcggcaaggccagctgcaccctggagaccgtgtgggaggataaacataagtatgaggaggcagagaggcgtttttacgaacacgaagccactcaggccgcagcttag

SEQ ID NO: 296621 - DNA, 66 bp, Artificial Sequence
  derived and/or modified sequence
atgcggagcggcaaggccagctgcaccctggagaccgtgtgggaggacaagcacaaatatgagtag

SEQ ID NO: 296622 - DNA, 96 bp, Artificial Sequence
  derived and/or modified sequence
atgcggagcggcaaggccagctgcaccctggagaccgtgtgggaggacaagcacaaatacgaggaggctgagcgtaggttctacgagcacgagtag

SEQ ID NO: 296623 - DNA, 114 bp, Artificial Sequence
  derived and/or modified sequence
atgaggtcaggaaaagcatcctgcaccctcgagacggtttgggaagacaagcataagtacgaagaagccgagcgtcggttttacgagcatgaggctacacaggcagcagcctag

SEQ ID NO: 296624 - DNA, 66 bp, Artificial Sequence
  derived and/or modified sequence
atgaggtctggcaaagcatcctgtaccctcgaaaccgtctgggaagataaacataagtatgagtag

SEQ ID NO: 296625 - DNA, 96 bp, Artificial Sequence
  derived and/or modified sequence
atgcggtccggaaaggcctcatgtaccctggagacagtctgggaagataaacacaagtacgaagaggcagaaagaagattctatgaacatgagtag

SEQ ID NO: 296626 - DNA, 114 bp, Artificial Sequence
  derived and/or modified sequence
atgagaagcggcaaggccagctgcaccctggagaccgtgtgggaggacaagcacaagtacgaggaggccgagagaagattctacgagcacgaggccacccaggccgccgcctag

SEQ ID NO: 296627 - DNA, 66 bp, Artificial Sequence
  derived and/or modified sequence
atgagaagcggcaaggccagctgcaccctggagaccgtgtgggaggacaagcacaagtacgagtag

SEQ ID NO: 296628 - DNA, 96 bp, Artificial Sequence
  derived and/or modified sequence
atgagaagcggcaaggccagctgcaccctggagaccgtgtgggaggacaagcacaagtacgaggaggccgagagaagattctacgagcacgagtag

SEQ ID NO: 296629 - DNA, 2044 bp, Artificial Sequence
  derived and/or modified sequence
cttggtcgccgcgtccttggctggcgtgtgtccggaagatgaggagcgggaaggcctcctgcaccctggagaccgtgtgggaagacaagcacaagtatgaggaggccgagcggcgcttctacgaacacgaggccacacaggcggccgcctccgcccagcagctgccagccgaggggccagccatgaatgggcccggccaggacgaccctgaggacgctgatgaggcggaagcccctgacggcggcagcaggcgtgatcccaggaagagccaggacagcaggaagcccctgcagaaaaagaggaagcgctcccccaagagcgggctcggccccgcggacctggccctcctgggcctctcggccgaacgcgtgtggctggacaagtcacttttcgaccaggcagagagctcctaccgccagaagctggcagatgtggctgcccaggcagcctggcctcctgccttggccccttggggtctctgcacccatggaaaccaggtggcctgccaccacgtgacctgggggatctgggtcaacaagtcctccttcgaccaggctgagcgggccttcgtggagtggtctcaggccctgttgctggcccccgacggcagccgcaggcaggggactcccaacacaggccagcaggtggccgtccccgacctggcccaccagcccagcccaccggtcaatggccagcccccgctgggcagcctgcaggcactggttcgggaggtgtggctggagaagccccggtatgatgcagccgagaggggcttctacgaggccctgtttgacggccatcccccagggaaggtgcgcctgcaagagcgagccggcctggccgagggtgcccggcggggccgcagagaccggcggggccgcaacatcttagggaacaagcgggccgggctgcgacgggccgatggggaggccccctctgccttgccctactgttacttcctgcagaaggatgcagaggccccctggctcagcaagcctgcctacgacagcgccgagtgccgccaccacgctgccgaggccctgcgggtggcctggtgcctcgaagctgcctccctgtctcaccgacccggtcctcggtctggcctgtccgtgtccagcctgagacccaacagaaaaatggctacaaacttcctagcacatgagaagatctggttcgacaagttcaaatatgacgacgcagaaaggagattctacgagcagatgaacgggcctgtggcaggtgcctcccgccaggagaacggcgccagcgtgatcctccgtgacattgcgagagccagagagaacatccagaaatccctggctggaagctcaggccccggggcctccagcggcaccagcggagaccacggtgagctcgtcgtccggattgccagtctggaagtggagaaccagagtctgcgtggcgtggtacaggagctgcagcaggccatctccaagctggaggcccggctgaacgtgctggagaagagctcgcctggccaccgggccacggccccacagacccagcacgtatctcccatgcgccaagtggagcccccagccaagaagccagccacaccagcagaggatgacgaggatgatgacattgacctgtttggcagtgacaatgaggaggaggacaaggaggcggcacagctgcgggaggagcggctacggcagtacgcggagaagaaggccaagaagcctgcactggtggccaagtcctccatcctgctggatgtcaagccttgggatgatgagacggacatggcccagctggaggcctgtgtgcgctctatccagctggacgggctggtctggggggcttccaagctggtgcccgtgggctacggtatccggaagctacagattcagtgtgtgggaggacgacaaggtggggacagacttgctggaggaggagatcaccaagtttgaggagcacgtgcagagtgtcgatatcgcagctttcaacaagatctgaagcctgagtgtgtgtacgtgcgcgcgtgcgtgaggccctgccacgattaaagactgagaccggc

SEQ ID NO: 296630 - DNA, 2207 bp, Artificial Sequence
  derived and/or modified sequence
ctccctttcatcagtcttcccgcgtccgccgattcctcctccttggtcgccgcgtccttggctggcgttagagacagggtttcaacgtgttagccaggatggtctcagtctccagaccctgtgatccgcccgcctcggcctcccaaagtgttgggattacaggtgtgagccaccgtgcctggccgaggctccttcttttatgaggagcgggaaggcctcctgcaccctggagaccgtgtgggaagacaagcacaagtatgaggaggccgagcggcgcttctacgaacacgaggccacacaggcggccgcctccgcccagcagctgccagccgaggggccagccatgaatgggcccggccaggacgaccctgaggacgctgatgaggcggaagcccctgacggcggcagcaggcgtgatcccaggaagagccaggacagcaggaagcccctgcagaaaaagaggaagcgctcccccaagagcgggctcggccccgcggacctggccctcctgggcctctcggccgaacgcgtgtggctggacaagtcacttttcgaccaggcagagagctcctaccgccagaagctggcagatgtggctgcccaggcagcctggcctcctgccttggccccttggggtctctgcacccatggaaaccaggtggcctgccaccacgtgacctgggggatctgggtcaacaagtcctccttcgaccaggctgagcgggccttcgtggagtggtctcaggccctgttgctggcccccgacggcagccgcaggcaggggactcccaacacaggccagcaggtggccgtccccgacctggcccaccagcccagcccaccggtcaatggccagcccccgctgggcagcctgcaggcactggttcgggaggtgtggctggagaagccccggtatgatgcagccgagaggggcttctacgaggccctgtttgacggccatcccccagggaaggtgcgcctgcaagagcgagccggcctggccgagggtgcccggcggggccgcagagaccggcggggccgcaacatcttagggaacaagcgggccgggctgcgacgggccgatggggaggccccctctgccttgccctactgttacttcctgcagaaggatgcagaggccccctggctcagcaagcctgcctacgacagcgccgagtgccgccaccacgctgccgaggccctgcgggtggcctggtgcctcgaagctgcctccctgtctcaccgacccggtcctcggtctggcctgtccgtgtccagcctgagacccaacagaaaaatggctacaaacttcctagcacatgagaagatctggttcgacaagttcaaatatgacgacgcagaaaggagattctacgagcagatgaacgggcctgtggcaggtgcctcccgccaggagaacggcgccagcgtgatcctccgtgacattgcgagagccagagagaacatccagaaatccctggctggaagctcaggccccggggcctccagcggcaccagcggagaccacggtgagctcgtcgtccggattgccagtctggaagtggagaaccagagtctgcgtggcgtggtacaggagctgcagcaggccatctccaagctggaggcccggctgaacgtgctggagaagagctcgcctggccaccgggccacggccccacagacccagcacgtatctcccatgcgccaagtggagcccccagccaagaagccagccacaccagcagaggatgacgaggatgatgacattgacctgtttggcagtgacaatgaggaggaggacaaggaggcggcacagctgcgggaggagcggctacggcagtacgcggagaagaaggccaagaagcctgcactggtggccaagtcctccatcctgctggatgtcaagccttgggatgatgagacggacatggcccagctggaggcctgtgtgcgctctatccagctggacgggctggtctggggggcttccaagctggtgcccgtgggctacggtatccggaagctacagattcagtgtgtggtggaggacgacaaggtggggacagacttgctggaggaggagatcaccaagtttgaggagcacgtgcagagtgtcgatatcgcagctttcaacaagatctgaagcctgagtgtgtgtacgtgcgcgcgtgcgtgaggccctgccacgattaaagactgagaccggc

SEQ ID NO: 296631 - protein, 37 aa, Artificial Sequence
  derived and/or modified sequence
MRSGKASCTLETVWEDKHKYEEAERRFYEHEATQAAA

SEQ ID NO: 296632 - DNA, 610 bp, Artificial Sequence
  derived and/or modified sequence
ccagggaaggtgcgcctgcaagagcgagccggcctggccgagggtgcccggcggggccgcagagaccggcggggccgcaacatcttagggaacaagcgggccgggctgcgacgggccgatggggaggccccctctgccttgccctactgttacttcctgcagaaggatgcagaggccccctggctcagcaagcctgcctacgacagcgccgagtgccgccaccacgctgccgaggccctgcgggtggcctggtgcctcgaagctgcctccctgtctcaccgacccggtcctcggtctggcctgtccgtgtccagcctgagacccaagtaggagaaacgtgctgggtgggcacccagcctgggctgtgggcacagggacagccatcccaggctggggctcctccagcttcctcccctgcccacctggggtgggggctccccgagacccgtgggcccagcagagttgaatgcaggagcaggctgagtaaagaaaaatggctacaaacttcctagcacatgagaagatctggttcgacaagttcaaatatgacgacgcagaaaggagattctacgagcagatgaacgggcctgtggcaggtgcctcccgccag

SEQ ID NO: 296633 - DNA, 791 bp, Artificial Sequence
  derived and/or modified sequence
cagaggctttaagtggaaggaagaaggcaaagggggcggagtgggttggggacctgatgagacgtcaggattggtttccagaatgaaggaccgcctggcagcagaagaactgtgtagctaaacttggggttgtccctgcccgacagggcggggtgcttcttaagttgacactgcctgcggctcacctcccagggaggcaggccaggccatctcacctgagcagcctccttctacagctccgcccaccccgtcatctggaccccatgagccttaagcagctggctcgcaggcagttggttacttccggagcccgtgtgtgcccagccccgttctgggggtgggggatgcagctgaggggctgggcaggtgtggaaggagcccccgagcgtcctctgaggaagtagacgctcaccttcgccttctcaccacatgcctcaggcccagccaggctcctagacctgcctctgtagaggctttctgggcgcagtgccaatcctgtgagacagcagcatctcccctgggctgctgcagggttcacacgcagtcagtgctggcagagtgagcgcccagccgacagagcccccgctgcctcccgcctcctctggaggactaggccctctgggctttgctcccgggttgctgggtgaggctgcaaggtttagcacagcagaaaaatggctacaaacttcctagcacatgagaagatctggttcgacaagttcaaatatgacgacgcagaaaggagattctacgagcagatgaacgggcctgtggcaggtgcctcccgccag

SEQ ID NO: 296634 - protein, 575 aa, Artificial Sequence
  derived and/or modified sequence
MNGPGQDDPEDADEAEAPDGGSRRDPRKSQDSRKPLQKKRKRSPKSGLGPADLALLGLSAERVWLDKSLFDQAESSYRQKLADVAAQAAWPPALAPWGLCTHGNQVACHHVTWGIWVNKSSFDQAERAFVEWSQALLLAPDGSRRQGTPNTGQQVAVPDLAHQPSPPVNGQPPLGSLQALVREVWLEKPRYDAAERGFYEALFDGHPPGKVRLQERAGLAEGARRGRRDRRGRNILGNKRAGLRRADGEAPSALPYCYFLQKDAEAPWLSKPAYDSAECRHHAAEALRVAWCLEAASLSHRPGPRSGLSVSSLRPNRKMATNFLAHEKIWFDKFKYDDAERRFYEQMNGPVAGASRQSSGPGASSGTSGDHGELVVRIASLEVENQSLRGVVQELQQAISKLEARLNVLEKSSPGHRATAPQTQHVSPMRQVEPPAKKPATPAEDDEDDDIDLFGSDNEEEDKEAAQLREERLRQYAEKKAKKPALVAKSSILLDVKPWDDETDMAQLEACVRSIQLDGLVWGASKLVPVGYGIRKLQIQCVVEDDKVGTDLLEEEITKFEEHVQSVDIAAFNKI

SEQ ID NO: 296635 - protein, 35 aa, Artificial Sequence
  derived and/or modified sequence
MATNFLAHEKIWFDKFKYDDAERRFYEQMNGPVAG

SEQ ID NO: 296636 - protein, 31 aa, Artificial Sequence
  derived and/or modified sequence
MRSGKASCTLETVWEDKHKYEEAERRFYEHE

SEQ ID NO: 296637 - DNA, 1728 bp, Artificial Sequence
  derived and/or modified sequence
atgaacggacctggacaagacgaccccgaggatgcggatgaagctgaggcacccgatgggggctccagacgcgatccccgaaagtctcaggactctcgaaaacccctccagaagaaaagaaagcggagtccgaaaagtggactcggtcctgcagatttggcgctactgggtctgtccgctgagagggtgtggcttgataaatcgcttttcgaccaggcagaatcatcctaccgccagaagcttgcagacgttgccgcacaagcagcctggcctcccgcacttgctccgtgggggctctgcactcacggcaatcaggtggcctgtcaccatgttacatggggtatctgggtaaataaatcctcattcgaccaagcagaacgggccttcgtggaatggtcacaggccctgcttctggctccagatggctccaggagacagggaacgcccaacacaggccagcaggtggccgtccccgatctagctcatcagccctctccacctgtgaatggtcagcctcccctgggcagcctgcaggccctggtgagagaagtgtggctggaaaagcctcgctatgatgcggccgagaggggattctatgaagctttatttgatgggcatcccccggggaaagtgaggcttcaggagcgcgcaggcctggcagagggcgcgcggcgcggccgccgcgatagacgaggccggaatattctcggcaataaaagagccggcttgagaagggccgatggtgaggcaccaagtgcactgccatattgttatttcttgcaaaaagacgccgaagctccatggttatccaagccagcctatgatagcgccgaatgtcgtcaccacgctgctgaagcccttagggtggcttggtgcttggaagctgctagtcttagtcataggccgggaccaagatccgggctgtccgtaagctccctgcgtcctaaccgaaagatggccaccaacttcctggctcacgaaaagatttggtttgacaaattcaaatacgacgacgcagagcgacgattctatgagcaaatgaatggacctgtagccggagcttcacgccagagcagtggcccaggagctagctctggcacaagtggcgatcacggtgaactcgtggtgagaatagcatcactggaggtggaaaatcagtctctcagaggagttgttcaggagcttcaacaggccatttctaaattagaggctaggctaaatgtcctggaaaagtcaagccctggccaccgagctacagccccccagacccagcacgtgtctcctatgagacaggtggaaccccccgcaaaaaaaccagccacacccgccgaagatgatgaagacgacgacattgacttattcggctccgataacgaggaggaggacaaggaagcagcccaacttcgggaggagcggctccggcagtatgccgaaaagaaagcaaaaaagcccgctctggtggccaagagctctatcttgcttgacgtcaagccctgggacgacgagaccgacatggctcagctggaagcctgcgtaaggagtatccagctggatgggctcgtgtggggtgctagtaaattagtgcctgtcggttacggtatcagaaaactccagattcaatgcgtcgtcgaggatgacaaggtgggcactgatctgcttgaggaggaaatcaccaagttcgaggagcacgtgcagtccgtcgacatagcagcctttaataaaatttag

SEQ ID NO: 296638 - DNA, 1728 bp, Artificial Sequence
  derived and/or modified sequence
atgaatggacctggccaggatgatcctgaagatgctgatgaagctgaggccccagatggcggcagcagaagagaccccaggaagagccaggacagcaggaagcccctgcagaagaagaggaagaggagccccaagagcggcctgggccctgctgacctggccctgctgggcctgtctgctgagcgggtgtggctggacaagagcctgtttgaccaggccgagagcagctaccggcagaagctggctgatgtggccgcccaggccgcctggcccccagccctggccccctggggcctgtgcacccacggcaaccaggtggcctgccaccacgtgacctggggcatctgggtgaacaagagcagctttgaccaggccgagcgggcctttgtggagtggagccaggccctgctgctggccccagatggcagccggcggcagggcacccccaacacaggccagcaggtggccgtgcctgacctggcccaccagcccagcccccctgtgaatggccagccccccctgggcagcctgcaggccctggtgcgggaggtgtggctggagaagcccaggtatgatgctgctgagcggggcttctatgaggccctgtttgatggccaccccccaggcaaggtgcggctgcaggagagagctggcctggccgagggcgcccggcggggcagaagagaccggcggggcaggaacatcctgggcaacaagagagctggcctgcggcgggcagatggagaggcccccagcgccctgccctactgctacttcctgcagaaggatgctgaggccccctggctgagcaagccagcctatgacagcgctgagtgccgccaccacgccgctgaggccctgcgggtggcctggtgcctggaggccgccagcctgagccaccggcccggccccaggagcggcctgtctgtgagcagcctgcggcccaacaggaagatggccaccaacttcctggcccacgagaagatctggtttgacaagttcaagtatgatgatgctgagcggcgcttctatgagcagatgaatggacctgtggccggggccagccggcagagcagcggccctggggccagcagcggcaccagcggggaccatggagagctggtggtgcgcatcgccagcctggaggtggagaaccagagcctgcggggcgtggtgcaggagctgcagcaggccatcagcaagctggaggcccggctgaatgtgctggagaagagcagccctggccaccgggccacagccccccagacccagcacgtgagccccatgaggcaggtggagcccccagccaagaagccagccaccccagcagaagatgatgaagatgatgacatcgacctgtttggaagtgacaatgaggaggaggacaaggaggccgcccagctgcgggaggagcggctgcggcagtatgcagagaagaaggccaagaagccagccctggtggccaagagcagcatcctgctggatgtgaagccctgggatgatgaaacagacatggcccagctggaggcctgtgtgcgcagcatccagctggatggcctggtgtggggcgccagcaagctggtgcctgtgggctacggcatcaggaagctgcagatccagtgtgtggtggaggatgacaaggtgggcacagacctgctggaggaggagatcaccaagtttgaggagcacgtgcagagcgtggacattgctgccttcaacaagatctag

SEQ ID NO: 296639 - DNA, 1728 bp, Artificial Sequence
  derived and/or modified sequence
atgaacggccccggccaggacgaccccgaggacgccgacgaggccgaagcccccgacgggggttcccgcagagatccacgtaaaagccaggacagtcggaaacccctgcagaagaagcgaaaacggtctccaaagagtggcctcggtcctgctgatctggctctcttgggcctctctgcggaacgggtgtggctagacaagtctctcttcgatcaggctgaatcaagctaccggcagaagttggccgatgtggcagctcaggctgcgtggccccctgccttagcaccctggggcctgtgcacccacggaaaccaagtggcttgccaccacgtcacctggggcatctgggtcaataaatcttctttcgaccaagctgagcgcgccttcgttgagtggagtcaggctttgttgctcgcgccagacggatccaggaggcagggaacgcccaataccggtcagcaggtggccgtccctgacttagctcatcagccctcaccgccagtgaacggtcagccccctctcggatctttgcaggctctggtaagggaggtgtggctagagaagccccgctacgatgcagcggagaggggcttttacgaagctctcttcgacggtcacccgccaggaaaggtccgtctgcaggagagagccgggttggcggagggcgctcgccgtgggagacgagatcgccggggaagaaatatactcgggaacaagcgagccggtctgcgtagagccgatggcgaagccccttccgctctgccctattgctattttctgcagaaggacgccgaggcaccctggctgtctaagcctgcctatgattcggccgagtgccgacaccatgcagccgaagcattacgcgtggcttggtgcttggaggctgcctccctgtcacataggccaggcccacggtctggcctttcggtctcctcactccgacccaacagaaaaatggcaaccaatttcctggctcatgagaaaatctggttcgacaaatttaaatatgacgacgcggagagacggttttacgaacaaatgaatggtccagtggcaggtgcgtcacgacaatcaagtgggccgggggcttcttccggcacctctggagatcacggtgaactagttgtcagaattgcttctcttgaagtggagaatcagtccctgaggggggtggtgcaggagcttcaacaggcaatctccaagttagaagcgcgtctgaacgtgctggaaaaatctagcccagggcacagagccactgccccccaaacccagcatgtctcccctatgaggcaggtggagccacctgcgaagaaacccgctactcctgctgaggatgatgaggatgatgacatcgacctatttggctcagataatgaggaagaagataaagaggccgcccagttaagggaggagcggctgcggcaatatgccgaaaagaaagcaaaaaaacctgctttggtcgctaagtcctccatcctcttggatgtaaaaccatgggacgatgaaaccgatatggctcagctggaggcatgcgttaggtctatacagctggatggactggtgtggggcgccagcaagcttgtccctgtaggctacggcattcgcaagcttcagattcagtgtgttgtggaggacgacaaagttggcactgatctgctggaggaggagattacaaagttcgaggaacatgtacagtctgttgatatcgcggccttcaacaaaatctag

SEQ ID NO: 296640 - DNA, 1728 bp, Artificial Sequence
  derived and/or modified sequence
atgaatggcccagggcaggatgatcctgaagacgcggacgaagcagaagcccctgacggcggaagccgcagagacccgcgaaagtcccaggatagccgcaaaccgctgcagaaaaagaggaagaggagtcctaagtccggcctgggccctgccgacctcgctctgctggggttgagcgccgagagagtatggctcgataaatctttgtttgatcaagcagagtcttcctatcgacagaaactggcagacgtggcagcacaggctgcttggccgcctgctctcgcgccatggggcctgtgcacccacggaaatcaggtggcttgtcaccatgttacttggggtatatgggtgaacaagtcaagtttcgaccaagctgaacgcgcttttgtagaatggtcacaagccctcctcctggccccagatggctctaggcggcaaggtacccccaatactgggcagcaggtcgccgtgccggatttagcccatcagccctctcccccagtaaacggccagcctcctctcggcagcctccaggccctggtcagagaagtatggctcgagaagcccagatacgatgctgccgagcgaggcttctatgaggccctttttgatggccaccctccagggaaggtaagactgcaggaacgtgccggactggccgaaggcgctcggaggggcaggagggatcgacgcggaaggaacattctcggaaacaagcgggcagggctgcgtagggcagacggtgaggcacctagtgctctcccatactgttactttttgcagaaggacgctgaagctccctggttatccaaacctgcctacgacagcgcagaatgccggcatcacgctgctgaagcactgagagttgcttggtgtctggaggccgcttctcttagtcatcgccctggtcctcgcagcggcctcagtgtgtcctctctgagacccaacaggaagatggctaccaattttctggcccatgagaaaatatggttcgataaattcaaatatgacgatgcagagcggagattttacgaacaaatgaacggcccagtcgctggcgcttctagacagtctagtggccctggtgcctcctcgggcacctctggcgaccatggagaactggtggtgcggattgcctccctcgaggtggaaaaccagtcactgcgtggagtcgtgcaagaattacagcaggccatctctaaactggaggcgaggctgaacgtgctcgaaaagtcttctccaggccaccgggcaacagcaccacaaacccaacacgtgagcccgatgcggcaagttgagccacccgcaaagaagccagccacccccgctgaggatgacgaagatgacgatattgacctgtttggctcagacaacgaagaagaggataaggaagccgcacaacttagagaagagcggttgaggcagtatgccgagaagaaagctaagaagcctgcattagtggccaaaagctccatattacttgatgtcaagccctgggatgatgaaacagatatggcacaattggaggcgtgcgtgcgtagcatccaattggacggtttggtgtggggggcttccaaacttgttccggttggttacggcattcggaaacttcagatccagtgtgtggtggaggatgacaaggtggggacggatttactcgaggaagagattaccaaatttgaggagcacgttcagagcgttgatatcgccgctttcaacaaaatctag

SEQ ID NO: 296641 - DNA, 1728 bp, Artificial Sequence
  derived and/or modified sequence
atgaacggccccggccaggacgaccccgaggacgccgacgaggccgaggcccccgacggcggcagcagaagagaccccagaaagagccaggacagcagaaagcccctgcagaagaagagaaagagaagccccaagagcggcctgggccccgccgacctggccctgctgggcctgagcgccgagagagtgtggctggacaagagcctgttcgaccaggccgagagcagctacagacagaagctggccgacgtggccgcccaggccgcctggccccccgccctggccccctggggcctgtgcacccacggcaaccaggtggcctgccaccacgtgacctggggcatctgggtgaacaagagcagcttcgaccaggccgagagagccttcgtggagtggagccaggccctgctgctggcccccgacggcagcagaagacagggcacccccaacaccggccagcaggtggccgtgcccgacctggcccaccagcccagcccccccgtgaacggccagccccccctgggcagcctgcaggccctggtgagagaggtgtggctggagaagcccagatacgacgccgccgagagaggcttctacgaggccctgttcgacggccacccccccggcaaggtgagactgcaggagagagccggcctggccgagggcgccagaagaggcagaagagacagaagaggcagaaacatcctgggcaacaagagagccggcctgagaagagccgacggcgaggcccccagcgccctgccctactgctacttcctgcagaaggacgccgaggccccctggctgagcaagcccgcctacgacagcgccgagtgcagacaccacgccgccgaggccctgagagtggcctggtgcctggaggccgccagcctgagccacagacccggccccagaagcggcctgagcgtgagcagcctgagacccaacagaaagatggccaccaacttcctggcccacgagaagatctggttcgacaagttcaagtacgacgacgccgagagaagattctacgagcagatgaacggccccgtggccggcgccagcagacagagcagcggccccggcgccagcagcggcaccagcggcgaccacggcgagctggtggtgagaatcgccagcctggaggtggagaaccagagcctgagaggcgtggtgcaggagctgcagcaggccatcagcaagctggaggccagactgaacgtgctggagaagagcagccccggccacagagccaccgccccccagacccagcacgtgagccccatgagacaggtggagccccccgccaagaagcccgccacccccgccgaggacgacgaggacgacgacatcgacctgttcggcagcgacaacgaggaggaggacaaggaggccgcccagctgagagaggagagactgagacagtacgccgagaagaaggccaagaagcccgccctggtggccaagagcagcatcctgctggacgtgaagccctgggacgacgagaccgacatggcccagctggaggcctgcgtgagaagcatccagctggacggcctggtgtggggcgccagcaagctggtgcccgtgggctacggcatcagaaagctgcagatccagtgcgtggtggaggacgacaaggtgggcaccgacctgctggaggaggagatcaccaagttcgaggagcacgtgcagagcgtggacatcgccgccttcaacaagatctag

SEQ ID NO: 296642 - DNA, 2133 bp, Artificial Sequence
  derived and/or modified sequence
ccctttcatcagtcttcccgcgtccgccgattcctcctccttggtcgccgcgtccttggctggcgttagagacagggtttcaacgtgttagccaggatggtctcagtctccagaccctgtgatccgcccgcctcggcctcccaaagtgttgggattacaggtgtgagccaccgtgcctggccgaggctccttcttttatgaggagcgggaaggcctcctgcaccctggagaccgtgtgggaagacaagcacaagtatgaggaggccgagcggcgcttctacgaacacgaggccacacaggcggccgcctccgcccagcagctgccagccgaggggccagccatgaatgggcccggccaggacgaccctgaggacgctgatgaggcggaagcccctgacggcggcagcaggcgtgatcccaggaagagccaggacagcaggaagcccctgcagaaaaagaggaagcgctcccccaagagcgggctcggccccgcggacctggccctcctgggcctctcggccgaacgcgtgtggctggacaagtcacttttcgaccaggcagagagctcctaccgccagaagctggcagatgtggctgcccaggcagcctggcctcctgccttggccccttggggtctctgcacccatggaaaccaggtggcctgccaccacgtgacctgggggatctgggtcaacaagtcctccttcgaccaggctgagcgggccttcgtggagtggtctcaggccctgttgctggcccccgacggcagccgcaggcaggggactcccaacacaggccagcaggtggccgtccccgacctggcccaccagcccagcccaccggtcaatggccagcccccgctgggcagcctgcaggcactggttcgggaggtgtggctggagaagccccggtatgatgcagccgagaggggcttctacgaggccctgtttgacggccatcccccagggaaggtgcgcctgcaagagcgagccggcctggccgagggtgcccggcggggccgcagagaccggcggggccgcaacatcttagggaacaagcgggccgggctgcgacgggccgatggggaggccccctctgccttgccctactgttacttcctgcagaaggatgcagaggccccctggctcagcaagcctgcctacgacagcgccgagtgccgccaccacgctgccgaggccctgcgggtggcctggtgcctcgaagctgcctccctgtctcaccgacccggtcctcggtctggcctgtccgtgtccagcctgagacccaacagaaaaatggctacaaacttcctagcacatgagaagatctggttcgacaagttcaaatatgacgacgcagaaaggagattctacgagcagatgaacgggcctgtggcaggtgcctcccgccagagctcaggccccggggcctccagcggcaccagcggagaccacggtgagctcgtcgtccggattgccagtctggaagtggagaaccagagtctgcgtggcgtggtacaggagctgcagcaggccatctccaagctggaggcccggctgaacgtgctggagaagagctcgcctggccaccgggccacggccccacagacccagcacgtatctcccatgcgccaagtggagcccccagccaagaagccagccacaccagcagaggatgacgaggatgatgacattgacctgtttggcagtgacaatgaggaggaggacaaggaggcggcacagctgcgggaggagcggctacggcagtacgcggagaagaaggccaagaagcctgcactggtggccaagtcctccatcctgctggatgtcaagccttgggatgatgagacggacatggcccagctggaggcctgtgtgcgctctatccagctggacgggctggtctggggggcttccaagctggtgcccgtgggctacggtatccggaagctacagattcagtgtgtggtggaggacgacaaggtggggacagacttgctggaggaggagatcaccaagtttgaggagcacgtgcagagtgtcgatatcgcagctttcaacaagatctgaagcctgagtgtgtgtacgtgcgcgcgtgcgtgaggccctgccacgattaaagactgagaccggc

SEQ ID NO: 296643 - DNA, 828 bp, Artificial Sequence
  derived and/or modified sequence
gctctgttgtccaggctggagtgcagtggcgccatctcggttcactgcaagctccgcctcccggcttcacgccattctcctgcctcagcctccctaggagctgggactacaggcgcctgccaccacgcccggctaatttttatttttatttttagtagagacagggtttcaacgtgttagccaggatggtctcagtctccagaccctgtgatccgcccgcctcggcctcccaaagtgttgggattacaggtgtgagccaccgtgcctggccgaggctccttcttttatgaggagcgggaaggcctcctgcaccctggagaccgtgtgggaagacaagcacaagtatgaggaggccgagcggcgcttctacgaacacgaggccacacaggcggccgcctccgcccagcagctgccagccgaggggccagccatgaatgggcccggccaggacgaccctgaggacgctgatgaggcggaagcccctgacggcggcagcaggcgtgatcccaggaagagccaggacagcaggaagcccctgcagaaaaagaggaagcgctcccccaagagcgggctcggccccgcggacctggccctcctgggcctctcggccgaacgcgtgtggctggacaagtcacttttcgaccaggcagagagctcctaccgccagaagctggcagatgtggctgcccaggcagcctggcctcctgccttggccccttggggtctctgcacccatggaaaccaggtggcctgccaccacgtgacctgggggatctgggtcaacaagtcctccttcgaccaggctgagcgggccttcgtggagtggtc

SEQ ID NO: 296644 - DNA, 535 bp, Artificial Sequence
  derived and/or modified sequence
gggatgacggagtgacgtcacctgtgtggactcagctgccacctgggattgtggtggcggcgggtctgtctggcgctcagcttccatctccaccagtgtcacctccacaccacctcgccaagcagcttctggaaaggcccccggccgccccgggctgacctgctgctgtgtctgacccggttagtctttctggctgcctctaaccttgctgcttttccttcatgctgtcctaggaggccaaagcaaaagacagggtttcaacgtgttagccaggatggtctcagtctccagaccctgtgatccgcccgcctcggcctcccaaagtgttgggattacaggtgtgagccaccgtgcctggccgaggctccttcttttatgaggagcgggaaggcctcctgcaccctggagaccgtgtgggaagacaagcacaagtatgaggaggccgagcggcgcttctacgaacacgaggccacacaggcggccgcctccgcccagcagctgccagccgaggggccagccatgaatgggcccggcc

SEQ ID NO: 296645 - DNA, 553 bp, Artificial Sequence
  derived and/or modified sequence
acaatgccctgtctcctgggctcttgctcccaccccacccccaacccacaacccctgcctctgcccatcagcctggccttgatgaggagcgggaaggcctcctgcaccctggagaccgtgtgggaagacaagcacaagtatgaggaggccgagcggcgcttctacgaacacgaggccacacaggcggccgcctccgcccagcagctgccagccgaggggccagccatgaatgggcccggccaggacgaccctgaggacgctgatgaggcggaagcccctgacggcggcagcaggcgtgatcccaggaagagccaggacagcaggaagcccctgcagaaaaagaggaagcgctcccccaagagcgggctcggccccgcggacctggccctcctgggcctctcggccgaacgcgtgtggctggacaagtcacttttcgaccaggcagagagctcctaccgccagaagctggcagatgtggctgcccaggcagcctggcctcctgccttggccccttggggtctctgcacccatggaaaccaggtggcctgccacc

SEQ ID NO: 296646 - DNA, 583 bp, Artificial Sequence
  derived and/or modified sequence
ctccctttcatcagtcttcccgcgtccgccgattcctcctccttggtcgccgcgtccttggctggcgtagacagggtttcaacgtgttagccaggatggtctcagtctccagaccctgtgatccgcccgcctcggcctcccaaagtgttgggattacaggtgtgagccaccgtgcctggccgaggctccttcttttatgaggagcgggaaggcctcctgcaccctggagaccgtgtgggaagacaagcacaagtatgaggaggccgagcggcgcttctacgaacacgaggccacacaggcggccgcctccgcccagcagctgccagccgaggggccagccatgaatgggcccggccaggacgaccctgaggacgctgatgaggcggaagcccctgacggcggcagcaggcgtgatcccaggaagagccaggacagcaggaagcccctgcagaaaaagaggaagcgctcccccaagagcgggctcggccccgcggacctggccctcctgggcctctcggccgaacgcgtgtggctggacaagtcacttttcgaccaggcagagagctcctaccgccagaagctg

SEQ ID NO: 296647 - DNA, 813 bp, Artificial Sequence
  derived and/or modified sequence
ttgctcccgggttgctgggtgaggctgcaaggtttagcacagatgaggagcgggaaggcctcctgcaccctggagaccgtgtgggaagacaagcacaagtatgaggaggccgagcggcgcttctacgaacacgaggccacacaggcggccgcctccgcccagcagctgccagccgaggggccagccatgaatgggcccggccaggacgaccctgaggacgctgatgaggcggaagcccctgacggcggcagcaggcgtgatcccaggaagagccaggacagcaggaagcccctgcagaaaaagaggaagcgctcccccaagagcgggctcggccccgcggacctggccctcctgggcctctcggccgaacgcgtgtggctggacaagtcacttttcgaccaggcagagagctcctaccgccagaagctggcagatgtggctgcccaggcagcctggcctcctgccttggccccttggggtctctgcacccatggaaaccaggtggcctgccaccacgtgacctgggggatctgggtcaacaagtcctccttcgaccaggctgagcgggccttcgtggagtggtctcaggccctgttgctggcccccgacggcagccgcaggcaggggactcccaacacaggccagcaggtggccgtccccgacctggcccaccagcccagcccaccggtcaatggccagcccccgctgggcagcctgcaggcactggttcgggaggtgtggctggagaagccccggtatgatgcagccgagaggggcttctacgaggccctgtttgacggccatcccccaggg

SEQ ID NO: 296648 - DNA, 926 bp, Artificial Sequence
  derived and/or modified sequence
caccttcgccttctcaccacatgcctcaggcccagccaggctcctagacctgcctctgtagaggctttctgggcgcagtgccaatcctgtgagacagcagcatctcccctgggctgctgcagggttcacacgcagtcagtgctggcagagtgagcgcccagccgacagagcccccgctgcctcccgcctcctctggaggactaggccctctgggctttgctcccgggttgctgggtgaggctgcaaggtttagcacagtagagacagggtttcaacgtgttagccaggatggtctcagtctccagaccctgtgatccgcccgcctcggcctcccaaagtgttgggattacaggtgtgagccaccgtgcctggccgaggctccttcttttatgaggagcgggaaggcctcctgcaccctggagaccgtgtgggaagacaagcacaagtatgaggaggccgagcggcgcttctacgaacacgaggccacacaggcggccgcctccgcccagcagctgccagccgaggggccagccatgaatgggcccggccaggacgaccctgaggacgctgatgaggcggaagcccctgacggcggcagcaggcgtgatcccaggaagagccaggacagcaggaagcccctgcagaaaaagaggaagcgctcccccaagagcgggctcggccccgcggacctggccctcctgggcctctcggccgaacgcgtgtggctggacaagtcacttttcgaccaggcagagagctcctaccgccagaagctggcagatgtggctgcccaggcagcctggcctcctgccttggccccttggggtctctgcacccatggaaaccaggtggcctgccaccacgtgacctgggggatctgggtcaacaagtcctccttcgaccaggctgagcgggccttcgtggag

SEQ ID NO: 296649 - DNA, 506 bp, Artificial Sequence
  derived and/or modified sequence
actgtctcacggcgcatcccggtcgtggaagcccctcggccaggctgctggggcctaaggcctgtgtttgctgccgtctccgtgggagaccagacatctgccccagctgtttctctggcctgcagaccttcgtacaccacgtctttgtcaagcaccagttactgcacgcatcagctgagcacggaggggataggcacggacgcaacacttttggaacttagacgctatagagacagggtttcaacgtgttagccaggatggtctcagtctccagaccctgtgatccgcccgcctcggcctcccaaagtgttgggattacaggtgtgagccaccgtgcctggccgaggctccttcttttatgaggagcgggaaggcctcctgcaccctggagaccgtgtgggaagacaagcacaagtatgaggaggccgagcggcgcttctacgaacacgaggccacacaggcggccgcctccgcccagcagctgccagccgaggggccagccatga

SEQ ID NO: 296650 - DNA, 761 bp, Artificial Sequence
  derived and/or modified sequence
ctccctttcatcagtcttcccgcgtccgccgattcctcctccttggtcgccgcgtccttggctggcgtggtttcaacgtgttagccaggatggtctcagtctccagaccctgtgatccgcccgcctcggcctcccaaagtgttgggattacaggtgtgagccaccgtgcctggccgaggctccttcttttatgaggagcgggaaggcctcctgcaccctggagaccgtgtgggaagacaagcacaagtatgaggaggccgagcggcgcttctacgaacacgaggccacacaggcggccgcctccgcccagcagctgccagccgaggggccagccatgaatgggcccggccaggacgaccctgaggacgctgatgaggcggaagcccctgacggcggcagcaggcgtgatcccaggaagagccaggacagcaggaagcccctgcagaaaaagaggaagcgctcccccaagagcgggctcggccccgcggacctggccctcctgggcctctcggccgaacgcgtgtggctggacaagtcacttttcgaccaggcagagagctcctaccgccagaagctggcagatgtggctgcccaggcagcctggcctcctgccttggccccttggggtctctgcacccatggaaaccaggtggcctgccaccacgtgacctgggggatctgggtcaacaagtcctccttcgaccaggctgagcgggccttcgtggagtggtctcaggccctgttgctggcccccgacggca

SEQ ID NO: 296651 - DNA, 538 bp, Artificial Sequence
  derived and/or modified sequence
ccctttcatcagtcttcccgcgtccgccgattcctcctccttggtcgccgcgtccttggctggcgtgggatgacggagtgacgtcacctgtgtggactcagctgccacctgggattgtggtggcggcgggtctgtctggcgctcagcttccatctccaccagtgtcacctccacaccacctcgccaagcagcttctggaaaggcccccggccgccccgggctgacctgctgctgtgtctgacccggttagtctttctggctgcctctaaccttgctgcttttccttcatgctgtcctaggaggccaaagcaaatagagacagggtttcaacgtgttagccaggatggtctcagtctccagaccctgtgatccgcccgcctcggcctcccaaagtgttgggattacaggtgtgagccaccgtgcctggccgaggctccttcttttatgaggagcgggaaggcctcctgcaccctggagaccgtgtgggaagacaagcacaagtatgaggaggccgagcggcgcttctacgaacacgagg

SEQ ID NO: 296652 - DNA, 555 bp, Artificial Sequence
  derived and/or modified sequence
ctccctttcatcagtcttcccgcgtccgccgattcctcctccttggtcgccgcgtccttggctggcgttgtcacctccacaccacctcgccaagcagcttctggaaaggcccccggccgccccgggctgacctgctgctgtgtctgacccggttagtctttctggctgcctctaaccttgctgcttttccttcatgctgtcctaggaggccaaagcaaatagagacagggtttcaacgtgttagccaggatggtctcagtctccagaccctgtgatccgcccgcctcggcctcccaaagtgttgggattacaggtgtgagccaccgtgcctggccgaggctccttcttttatgaggagcgggaaggcctcctgcaccctggagaccgtgtgggaagacaagcacaagtatgaggaggccgagcggcgcttctacgaacacgaggccacacaggcggccgcctccgcccagcagctgccagccgaggggccagccatgaatgggcccggccaggacgaccctgaggacgctgatgaggcggaagcccctgacggcg

SEQ ID NO: 296653 - protein, 631 aa, Artificial Sequence
  derived and/or modified sequence
MRSGKASCTLETVWEDKHKYEEAERRFYEHEATQAAASAQQLPAEGPAMNGPGQDDPEDADEAEAPDGGSRRDPRKSQDSRKPLQKKRKRSPKSGLGPADLALLGLSAERVWLDKSLFDQAESSYRQKLADVAAQAAWPPALAPWGLCTHGNQVACHHVTWGIWVNKSSFDQAERAFVEWSQALLLAPDGSRRQGTPNTGQQVAVPDLAHQPSPPVNGQPPLGSLQALVREVWLEKPRYDAAERGFYEALFDGHPPGKVRLQERAGLAEGARRGRRDRRGRNILGNKRAGLRRADGEAPSALPYCYFLQKDAEAPWLSKPAYDSAECRHHAAEALRVAWCLEAASLSHRPGPRSGLSVSSLRPNRKMATNFLAHEKIWFDKFKYDDAERRFYEQMNGPVAGASRQENGASVILRDIARARENIQKSLAGSSGPGASSGTSGDHGELVVRIASLEVENQSLRGVVQELQQAISKLEARLNVLEKSSPGHRATAPQTQHVSPMRQVEPPAKKPATPAEDDEDDDIDLFGSDNEEEDKEAAQLREERLRQYAEKKAKKPALVAKSSILLDVKPWDDETDMAQLEACVRSIQLDGLVWGASKLVPVGYGIRKLQIQCVGGRQGGDRLAGGGDHQV

SEQ ID NO: 296654 - protein, 647 aa, Artificial Sequence
  derived and/or modified sequence
MRSGKASCTLETVWEDKHKYEEAERRFYEHEATQAAASAQQLPAEGPAMNGPGQDDPEDADEAEAPDGGSRRDPRKSQDSRKPLQKKRKRSPKSGLGPADLALLGLSAERVWLDKSLFDQAESSYRQKLADVAAQAAWPPALAPWGLCTHGNQVACHHVTWGIWVNKSSFDQAERAFVEWSQALLLAPDGSRRQGTPNTGQQVAVPDLAHQPSPPVNGQPPLGSLQALVREVWLEKPRYDAAERGFYEALFDGHPPGKVRLQERAGLAEGARRGRRDRRGRNILGNKRAGLRRADGEAPSALPYCYFLQKDAEAPWLSKPAYDSAECRHHAAEALRVAWCLEAASLSHRPGPRSGLSVSSLRPNRKMATNFLAHEKIWFDKFKYDDAERRFYEQMNGPVAGASRQENGASVILRDIARARENIQKSLAGSSGPGASSGTSGDHGELVVRIASLEVENQSLRGVVQELQQAISKLEARLNVLEKSSPGHRATAPQTQHVSPMRQVEPPAKKPATPAEDDEDDDIDLFGSDNEEEDKEAAQLREERLRQYAEKKAKKPALVAKSSILLDVKPWDDETDMAQLEACVRSIQLDGLVWGASKLVPVGYGIRKLQIQCVVEDDKVGTDLLEEEITKFEEHVQSVDIAAFNKI

SEQ ID NO: 296655 - protein, 300 aa, Artificial Sequence
  derived and/or modified sequence
MRSGKASCTLETVWEDKHKYEEAERRFYEHEATQAAASAQQLPAEGPAMNGPGQDDPEDADEAEAPDGGSRRDPRKSQDSRKPLQKKRKRSPKSGLGPADLALLGLSAERVWLDKSLFDQAESSYRQKLADVAAQAAWPPALAPWGLCTHGNQVACHHVTWGIWVNKSSFDQAERAFVEWSQALLLAPDGSRRQGTPNTGQQVAVPDLAHQPSPPVNGQPPLGSLQALVREVWLEKPRYDAAERGFYEALFDGHPPGKVRLQERAGLAEGARRGRRDRRGRNILGNKRAGLRRADGEAPS

SEQ ID NO: 296656 - protein, 257 aa, Artificial Sequence
  derived and/or modified sequence
MRSGKASCTLETVWEDKHKYEEAERRFYEHEATQAAASAQQLPAEGPAMNGPGQDDPEDADEAEAPDGGSRRDPRKSQDSRKPLQKKRKRSPKSGLGPADLALLGLSAERVWLDKSLFDQAESSYRQKLADVAAQAAWPPALAPWGLCTHGNQVACHHVTWGIWVNKSSFDQAERAFVEWSQALLLAPDGSRRQGTPNTGQQVAVPDLAHQPSPPVNGQPPLGSLQALVREVWLEKPRYDAAERGFYEALFDGHPPG

SEQ ID NO: 296657 - protein, 190 aa, Artificial Sequence
  derived and/or modified sequence
MRSGKASCTLETVWEDKHKYEEAERRFYEHEATQAAASAQQLPAEGPAMNGPGQDDPEDADEAEAPDGGSRRDPRKSQDSRKPLQKKRKRSPKSGLGPADLALLGLSAERVWLDKSLFDQAESSYRQKLADVAAQAAWPPALAPWGLCTHGNQVACHHVTWGIWVNKSSFDQAERAFVEWSQALLLAPDG

SEQ ID NO: 296658 - protein, 697 aa, Artificial Sequence
  derived and/or modified sequence
MEAPLGSILSPCPGRAATGRAGTGRVGTGLRPPAVLQLCPLLAFYRCVRKMRSGKASCTLETVWEDKHKYEEAERRFYEHEATQAAASAQQLPAEGPAMNGPGQDDPEDADEAEAPDGGSRRDPRKSQDSRKPLQKKRKRSPKSGLGPADLALLGLSAERVWLDKSLFDQAESSYRQKLADVAAQAAWPPALAPWGLCTHGNQVACHHVTWGIWVNKSSFDQAERAFVEWSQALLLAPDGSRRQGTPNTGQQVAVPDLAHQPSPPVNGQPPLGSLQALVREVWLEKPRYDAAERGFYEALFDGHPPGKVRLQERAGLAEGARRGRRDRRGRNILGNKRAGLRRADGEAPSALPYCYFLQKDAEAPWLSKPAYDSAECRHHAAEALRVAWCLEAASLSHRPGPRSGLSVSSLRPNRKMATNFLAHEKIWFDKFKYDDAERRFYEQMNGPVAGASRQENGASVILRDIARARENIQKSLAGSSGPGASSGTSGDHGELVVRIASLEVENQSLRGVVQELQQAISKLEARLNVLEKSSPGHRATAPQTQHVSPMRQVEPPAKKPATPAEDDEDDDIDLFGSDNEEEDKEAAQLREERLRQYAEKKAKKPALVAKSSILLDVKPWDDETDMAQLEACVRSIQLDGLVWGASKLVPVGYGIRKLQIQCVVEDDKVGTDLLEEEITKFEEHVQSVDIAAFNKI

SEQ ID NO: 296659 - DNA, 1896 bp, Artificial Sequence
  derived and/or modified sequence
atgaggagcggtaaagcctcatgcaccctggagaccgtgtgggaggataagcataaatacgaggaggccgaacggagattctatgagcacgaagccacccaggcagctgcaagtgcgcagcagttacctgcggaaggacctgctatgaacggccctggacaggatgatcccgaggacgccgacgaagctgaggcccccgacggtggaagcagaagggatccacgcaaatcccaagattctcggaagccgctccagaaaaagcgtaagcggagtccaaaatccggacttgggccagcagatttggccttgctcggcctctccgcggagagggtatggttggacaagtcgttatttgaccaggccgagagtagctacaggcaaaaactggccgacgtcgccgcccaggccgcttggccccctgctctagcaccatgggggctgtgtacccacggcaaccaagtggcctgccatcatgtaacctgggggatttgggttaataagtcttcattcgatcaggcagagcgagctttcgtggagtggagccaggcactgctcctcgcgcctgacggcagtcgccggcagggaacgccaaatacaggccagcaggttgctgttcccgatctagcccaccagccttctccccccgtgaatggacaaccccctctcggctccttgcaggccctcgtcagagaggtatggctggagaagccccgatacgatgcggctgagagaggattctacgaagccctctttgatggacacccacctggcaaggtgcgactgcaagagcgggccgggctggctgaaggcgcgagaagaggccgccgtgatagacgaggtcggaacatcctgggcaataagagggccggactcaggcgcgctgatggcgaagctccgtcagcgctgccatattgttactttctgcagaaggacgccgaggccccatggctgagcaaacctgcctacgattcggcggagtgccggcaccacgctgccgaggccctgcgcgtggcgtggtgtctggaagccgctagcttgagccacaggcccggaccacggtcaggtctgtctgtgtccagtctacggcccaacagaaagatggccacaaactttctagcccacgagaagatctggtttgacaagtttaagtacgatgatgctgagcgccgcttctatgaacaaatgaacggccctgttgctggggcctcccggcaagaaaacggggccagcgtgatccttcgagacatcgcgcgagcaagagaaaacatacagaagagtctagccggttcaagcggcccgggcgcttcttctggaacctcaggggatcacggcgagctggtcgtgaggatcgccagtttagaggtcgaaaaccaatctctaaggggggtcgtacaggagttacaacaggcaattagcaaactggaggcccgtttgaacgtcctggagaaatcgtctccagggcaccgggctaccgcaccacagacacagcacgtttctcctatgcgacaagtcgagccaccagccaaaaagccggccacccccgccgaagatgatgaggacgacgatattgatttatttggcagtgacaatgaggaagaagacaaggaggcagcacagctaagggaggaaagactccgccagtacgcggagaaaaaggcaaagaaacctgctctggtcgcaaagtcctcgatcctgctcgatgtgaagccatgggacgacgagactgatatggcacagctggaggcatgcgtacgttccatacagttggatggactggtttggggagccagtaaactggttcctgttggttacggaatccgaaagctgcagattcaatgcgtaggcggaagacagggaggcgacaggctggctggaggcggcgatcatcaagtttag

SEQ ID NO: 296660 - DNA, 1944 bp, Artificial Sequence
  derived and/or modified sequence
atgcgctccggcaaggcatcttgcacactcgagactgtttgggaagataaacacaagtacgaggaggccgaaagacgcttctacgaacacgaagccactcaggctgccgccagcgcacaacagctgccggccgagggtcctgccatgaacggacctggacaggacgaccctgaagacgctgatgaggctgaggcaccagacgggggctctcggcgggaccctagaaagtcgcaagactctaggaaacctctccagaagaaacgcaagcgaagccccaaaagtggtctcgggcccgccgatttggcccttcttgggctttccgccgagagggtgtggctcgacaaaagcctatttgaccaagcagaatcaagctacagacaaaaactggcagacgtggccgctcaggcagcgtggcccccagctctggctccctggggactgtgtacccatggcaaccaggtcgcctgccaccacgttacttggggcatatgggttaataaaagttcattcgaccaggcagagcgagcttttgtggagtggtcccaggccctgctcctggcccccgatgggagccgccgtcaaggaactcccaacactggccagcaggtggcagtgccagatctggcccaccagccatccccacccgttaacggccagccacctctcggttccctgcaggccctggtccgtgaagtctggctcgaaaaacccaggtatgacgccgccgaaagggggttctatgaggctctgttcgacggtcatccccccggtaaagtgagactgcaggaacgcgcaggtctggccgagggcgctcgacgtggtaggagagacagacggggtaggaacattctgggaaataagagagccgggcttcgacgcgcggacggagaagctccttcagccctgccttattgttattttctgcaaaaggatgctgaggccccctggctgtcgaagcccgcctatgactccgctgagtgtagacaccacgcagccgaagccctgagggtcgcctggtgtcttgaggccgcctccttgtcacatcggcctggcccccggtcaggcctgtccgtttcctcattaaggccgaacagaaaaatggctacaaatttcctggcacacgagaagatctggtttgacaagtttaaatacgacgacgccgagaggcggttttacgaacagatgaatggccccgtcgctggcgcaagccgacaggagaacggcgccagcgtcattctacgtgatatcgctagggcgcgtgaaaatatacagaagtcgttggccgggtctagcgggcctggcgcttcttcggggactagtggagatcacggggaactggtggtgagaatcgcaagcctggaagtcgaaaatcagagtttgagaggcgtggtccaagagctccagcaggctatctccaaactggaggcccgtttgaatgttctggaaaaaagcagccctggccatcgtgctactgccccccagacgcagcacgtgtctccgatgcgccaggtggaacccccagccaagaagccagcaacacccgctgaggacgacgaagacgacgacatcgatttgttcgggagcgataatgaggaggaagataaagaggccgcccagttgagggaggaaagactgcggcagtacgctgagaaaaaagccaagaagccagcgcttgtagctaaaagcagtatactcctggatgtgaagccttgggatgacgagactgacatggcccaattagaggcctgcgtgcggagcatacaactggacgggctggtctggggagcctctaagctcgtgcccgttgggtatggcatacgaaaactgcaaattcagtgcgtcgtggaagatgataaagtgggtacagacctcctggaagaagaaatcacgaaatttgaagagcatgttcagtccgtggatattgccgcctttaataagatctag

SEQ ID NO: 296661 - DNA, 1944 bp, Artificial Sequence
  derived and/or modified sequence
atgcggtctggcaaagcctcctgcactttggaaactgtttgggaggataagcataagtatgaagaggctgaaaggagattctacgaacatgaagccacccaggctgccgcatctgctcagcagctgccagctgagggacccgctatgaatggccccgggcaggatgaccccgaggacgcagacgaggccgaggcacctgacggcggtagcaggagggacccgcgcaaatctcaggatagtcgaaagcctttacaaaaaaaaaggaagcgatctcccaaatcgggactaggtcctgccgatctagccctcctgggcctgagtgcagagagggtgtggttggacaaaagcctattcgaccaggctgagtctagctacagacagaaattggcagacgtcgctgcccaggccgcctggccaccagcattggctccttggggactctgcacacatggcaaccaagtggcttgtcaccatgttacctggggaatctgggtcaataagagctcattcgaccaggcggaacgtgcattcgtggagtggagccaggcactgctgctggctcctgatggcagccggcgccagggaactcccaacactgggcagcaggttgctgtgcccgatcttgctcatcaaccatcgcccccagtgaacggccagccgcccctcgggagcctgcaggccctagtgagagaggtttggcttgagaagccgaggtacgacgctgcagagcggggattctacgaagctctctttgatgggcatccccccgggaaagtgaggcttcaagaaagggctggactcgccgagggggctcgtcgaggccgccgcgatcgtcgtgggaggaatattctcgggaacaagcgcgcgggcctgcgaagagccgacggtgaagccccctccgcattgccatactgttatttcttgcagaaagacgcagaggcaccttggctgtcgaaaccggcctatgatagcgccgagtgtcgacaccacgctgccgaggcactaagagtagcgtggtgtctagaggccgccagtctgtcccatcgtcctggccctcgctccggtctctctgtgagctccctgcgaccaaatcgtaaaatggcaactaactttttggcccatgaaaaaatctggttcgacaagtttaagtatgacgacgcagagcggcgattctatgaacaaatgaacggacccgttgctggggcgtcccgacaggaaaacggggcttcagtgattttaagggacattgctagggcccgcgagaatattcagaagagcctggctggatcatccggccccggagctagtagcggtacctccggggatcatggggagctggtggtccggattgcctcgctagaagtcgagaaccaaagcctgagaggtgtcgttcaggaattacagcaggcaatttctaaattggaggcccgcctgaacgtactggagaagtcaagcccaggacaccgcgccaccgctccgcaaactcagcacgtgtcacctatgcgccaggtggagccaccagctaagaagcctgctacccctgctgaggatgacgaggacgatgacattgatttgtttggatccgacaatgaagaggaagataaggaggctgcccagctgcgcgaggagcgcttgagacagtacgccgaaaagaaggcaaagaagcccgctttagttgccaagtctagtatcttgctggacgtgaagccctgggatgacgagactgatatggcccagttagaagcctgtgtacgttctattcaactagatgggctggtgtggggagctagtaaactggtgcctgtgggatacgggatccggaaactccagattcaatgcgtagtcgaagatgacaaagtcggaacggacctgctggaggaagaaatcacaaagttcgaagaacacgttcaatccgtggatatagcagcctttaataaaatctag

SEQ ID NO: 296662 - DNA, 903 bp, Artificial Sequence
  derived and/or modified sequence
atgcgtagcgggaaggcatcttgtactctggagacagtttgggaagataaacataagtacgaagaggctgagcggcgtttttacgaacatgaggctacacaggctgctgcgtctgcacaacagctgcctgcagaaggcccagctatgaatggacccggacaggacgatccagaggacgccgatgaggcggaggccccagatggagggtcccggagagatcctcggaaaagccaggactcccggaagccccttcaaaagaagagaaaacgcagccctaagtctggactggggcccgccgacctggctttgttgggactgtccgctgaacgggtctggttggacaagtccttgtttgatcaggccgaatcttcctacagacagaaacttgcagatgtagccgcccaagccgcgtggcctccggcattagcgccatggggattgtgcacgcacggaaatcaggtggcctgccaccatgtgacttggggcatatgggtgaataagtccagctttgatcaggcggaaagggctttcgtggagtggagccaggccttactcttagcccccgatggcagtcgtcgacagggtactcctaataccggacaacaagtcgccgtccctgatcttgcgcatcagcccagtcctcctgtcaatgggcagccccccttgggttccctgcaggccttagtgagagaagtgtggctagagaagccacgatacgatgcagccgagcgcggcttctatgaagcactgttcgacggccaccctcctggcaaagtgaggctgcaggaacgggcaggtctggcggagggggctagaaggggacggagggataggaggggcaggaacatcctcggcaacaaacgagcaggcctgcgccgcgctgacggggaagccccaagctag

SEQ ID NO: 296663 - DNA, 774 bp, Artificial Sequence
  derived and/or modified sequence
atgaggagcggcaaggcctcttgtaccctcgaaactgtctgggaagacaaacacaaatacgaggaagcagaacgtcgcttctacgaacacgaagccacccaggccgcagcatcagcacagcagttaccggcggagggacccgccatgaacggcccgggtcaggacgaccctgaggatgcggacgaggcagaagcgcccgacggcggcagtagacgcgaccccaggaaaagccaagacagccgaaagccgctgcagaagaagcgcaagcgcagcccgaagtctggattgggcccagctgacctggccttacttggcctttcagctgagagggtctggctggacaaatctttatttgaccaagccgagagtagctataggcaaaaactcgctgacgttgccgctcaggctgcttggcctcccgctttggccccatggggtctgtgtactcacggcaaccaggtggcttgtcatcatgtcacatggggtatctgggtcaacaaaagcagttttgaccaagccgagcgggcctttgttgagtggagccaggcattgctgctagcgcctgatggctcaaggcggcagggtacgcctaacacagggcagcaggtcgccgtaccagatctcgcccatcagccctctccccctgtgaacgggcagccacctctcgggagcctgcaggctttggtccgcgaggtatggctggaaaagcctaggtatgacgctgcggagcgaggattttacgaagctctcttcgacggacacccacctggttag

SEQ ID NO: 296664 - DNA, 573 bp, Artificial Sequence
  derived and/or modified sequence
atgcggtcggggaaagcaagctgcacactcgaaactgtatgggaagataagcataaatacgaagaggcagagcgacgtttctacgaacacgaagctactcaggcagctgcttccgcgcagcaattgcctgccgaggggcctgccatgaatggtcccggccaagacgaccctgaggacgcagatgaagccgaagcccccgatggcgggtctagaagagacccacgcaagagtcaggactcccgcaaaccactccagaagaagagaaaacgatcccctaaaagcgggttgggtccagccgacttagccctgcttggtttgagcgcagagagggtgtggctagacaaatccctgttcgaccaggcagagtcttcctatcggcaaaaactcgccgacgtggctgcccaggcagcatggccaccagccctggcaccctggggcctctgcacacacggcaatcaggtggcgtgccaccacgtgacctggggtatctgggtgaacaaatcatcctttgaccaggccgaacgcgcatttgttgagtggtcccaggctctgctcctcgcaccggatggctag

SEQ ID NO: 296665 - DNA, 2094 bp, Artificial Sequence
  derived and/or modified sequence
atggaagcaccgctgggaagtatcctgagtccttgcccaggccgggctgcgactggacgggccggcaccggcagggtgggaactggtttgcgcccacccgctgtactgcaactttgccctttactagccttttacaggtgtgtgcgcaaaatgcgttctggcaaagccagctgtaccctcgagacggtatgggaggacaaacataaatatgaggaagcagaaaggcgtttctacgagcacgaggccacccaagccgccgcttccgcccaacagctcccggccgagggaccagccatgaacggtccaggacaagacgaccccgaggatgctgatgaggcagaggccccggatggcgggagccgtcgagatcctcgaaaatctcaagatagccgtaagcctctccaaaagaaacggaagaggagccccaagtcggggctcgggcctgccgatctggccctcctgggcttgtccgccgaacgcgtgtggctggataagagcctctttgaccaggctgaatcatcataccgccaaaagctcgctgatgtagctgctcaggcagcttggccgcctgcgctcgccccttggggattgtgtacccacggaaatcaagtagcttgtcaccatgtgacctgggggatctgggtgaataagtcgtcctttgatcaggccgaaagagccttcgtagaatggtctcaggcactcctactcgcccccgacggcagccgcagacagggcacaccaaacacagggcagcaggtggccgtgcctgacctggcccatcaaccaagtccccccgtgaacggacaaccgcccttgggtagcctgcaggcgcttgtcagggaggtgtggcttgagaaaccccggtacgacgccgccgaaagaggcttctatgaagcgctgtttgatggacaccccccaggtaaagtgcggctgcaagagcgagctggtctggcagaaggcgctaggagaggacgaagagacaggcgagggcgcaatatactgggcaacaagagggccgggctgcgccgggctgacggcgaagctccaagcgccttgccatactgctacttcttgcagaaggacgccgaggcaccatggctttctaaacctgcctacgacagcgcagaatgtcgccatcacgctgctgaggccttgagggtggcctggtgcctcgaagctgcctctctgagtcatagacctggcccccggagcgggttgtcggttagtagcctccgacctaaccgtaagatggccacgaacttcctcgctcacgagaaaatttggtttgacaagtttaaatacgatgacgccgaaagacggttctatgaacagatgaatggcccagttgccggagcaagtaggcaggagaatggtgcgtccgtgatactacgggacatagcccgtgccagggagaacatccagaagagtctggcaggctcctccggcccaggcgcaagctccggcaccagcggggaccatggagagctggttgtcagaatcgcctctttggaggttgagaaccaatctctgcgaggcgtggtacaggagctgcagcaggccattagcaagctggaggctcggctcaatgtcttggagaagagttctcctggacaccgagcaaccgctccccagacacagcatgtgagccctatgcggcaggtggaaccgcctgcaaaaaaaccggctacacctgcagaagacgacgaggatgacgatatagacctgttcggctcggataacgaggaagaggacaaggaggctgcccagttacgtgaagagagactgaggcagtacgcggagaaaaaagcgaagaaaccagccctggttgccaagtcaagcatcctacttgatgtgaaaccctgggacgatgaaacggacatggcgcagctggaagcctgcgttcggagcatccagttggatggcctcgtgtggggcgcctctaagttagtgccggttggatacggaatccgcaagcttcagatccagtgtgtggttgaagatgataaagtgggcaccgacctactggaggaggaaataaccaaatttgaagagcatgtccaaagcgtggacattgcagcattcaataaaatctag

SEQ ID NO: 296666 - DNA, 1896 bp, Artificial Sequence
  derived and/or modified sequence
atgaggtctgggaaggccagctgcaccctggagaccgtgtgggaggacaagcacaagtatgaggaggccgagcggcgcttctatgagcacgaggccacccaggccgccgccagcgcccagcagctgcctgctgagggccctgccatgaatggacctggccaggatgatcctgaagatgctgatgaagctgaggccccagatggcggcagcagaagagaccccaggaagagccaggacagcaggaagcccctgcagaagaagaggaagaggagccccaagagcggcctgggccctgctgacctggccctgctgggcctgtctgctgagcgggtgtggctggacaagagcctgtttgaccaggccgagagcagctaccggcagaagctggctgatgtggccgcccaggccgcctggcccccagccctggccccctggggcctgtgcacccacggcaaccaggtggcctgccaccacgtgacctggggcatctgggtgaacaagagcagctttgaccaggccgagcgggcctttgtggagtggagccaggccctgctgctggccccagatggcagccggcggcagggcacccccaacacaggccagcaggtggccgtgcctgacctggcccaccagcccagcccccctgtgaatggccagccccccctgggcagcctgcaggccctggtgcgggaggtgtggctggagaagcccaggtatgatgctgctgagcggggcttctatgaggccctgtttgatggccaccccccaggcaaggtgcggctgcaggagagagctggcctggccgagggcgcccggcggggcagaagagaccggcggggcaggaacatcctgggcaacaagagagctggcctgcggcgggcagatggagaggcccccagcgccctgccctactgctacttcctgcagaaggatgctgaggccccctggctgagcaagccagcctatgacagcgctgagtgccgccaccacgccgctgaggccctgcgggtggcctggtgcctggaggccgccagcctgagccaccggcccggccccaggagcggcctgtctgtgagcagcctgcggcccaacaggaagatggccaccaacttcctggcccacgagaagatctggtttgacaagttcaagtatgatgatgctgagcggcgcttctatgagcagatgaatggacctgtggccggggccagccggcaggagaatggagccagcgtcatcctgcgggacatcgcccgggcccgggagaacatccagaagagcctggccggcagcagcggccctggggccagcagcggcaccagcggggaccatggagagctggtggtgcgcatcgccagcctggaggtggagaaccagagcctgcggggcgtggtgcaggagctgcagcaggccatcagcaagctggaggcccggctgaatgtgctggagaagagcagccctggccaccgggccacagccccccagacccagcacgtgagccccatgaggcaggtggagcccccagccaagaagccagccaccccagcagaagatgatgaagatgatgacatcgacctgtttggaagtgacaatgaggaggaggacaaggaggccgcccagctgcgggaggagcggctgcggcagtatgcagagaagaaggccaagaagccagccctggtggccaagagcagcatcctgctggatgtgaagccctgggatgatgaaacagacatggcccagctggaggcctgtgtgcgcagcatccagctggatggcctggtgtggggcgccagcaagctggtgcctgtgggctacggcatcaggaagctgcagatccagtgtgtgggcggccggcagggcggggaccggctggccggcggcggggaccaccaggtgtag

SEQ ID NO: 296667 - DNA, 1944 bp, Artificial Sequence
  derived and/or modified sequence
atgaggtctgggaaggccagctgcaccctggagaccgtgtgggaggacaagcacaagtatgaggaggccgagcggcgcttctatgagcacgaggccacccaggccgccgccagcgcccagcagctgcctgctgagggccctgccatgaatggacctggccaggatgatcctgaagatgctgatgaagctgaggccccagatggcggcagcagaagagaccccaggaagagccaggacagcaggaagcccctgcagaagaagaggaagaggagccccaagagcggcctgggccctgctgacctggccctgctgggcctgtctgctgagcgggtgtggctggacaagagcctgtttgaccaggccgagagcagctaccggcagaagctggctgatgtggccgcccaggccgcctggcccccagccctggccccctggggcctgtgcacccacggcaaccaggtggcctgccaccacgtgacctggggcatctgggtgaacaagagcagctttgaccaggccgagcgggcctttgtggagtggagccaggccctgctgctggccccagatggcagccggcggcagggcacccccaacacaggccagcaggtggccgtgcctgacctggcccaccagcccagcccccctgtgaatggccagccccccctgggcagcctgcaggccctggtgcgggaggtgtggctggagaagcccaggtatgatgctgctgagcggggcttctatgaggccctgtttgatggccaccccccaggcaaggtgcggctgcaggagagagctggcctggccgagggcgcccggcggggcagaagagaccggcggggcaggaacatcctgggcaacaagagagctggcctgcggcgggcagatggagaggcccccagcgccctgccctactgctacttcctgcagaaggatgctgaggccccctggctgagcaagccagcctatgacagcgctgagtgccgccaccacgccgctgaggccctgcgggtggcctggtgcctggaggccgccagcctgagccaccggcccggccccaggagcggcctgtctgtgagcagcctgcggcccaacaggaagatggccaccaacttcctggcccacgagaagatctggtttgacaagttcaagtatgatgatgctgagcggcgcttctatgagcagatgaatggacctgtggccggggccagccggcaggagaatggagccagcgtcatcctgcgggacatcgcccgggcccgggagaacatccagaagagcctggccggcagcagcggccctggggccagcagcggcaccagcggggaccatggagagctggtggtgcgcatcgccagcctggaggtggagaaccagagcctgcggggcgtggtgcaggagctgcagcaggccatcagcaagctggaggcccggctgaatgtgctggagaagagcagccctggccaccgggccacagccccccagacccagcacgtgagccccatgaggcaggtggagcccccagccaagaagccagccaccccagcagaagatgatgaagatgatgacatcgacctgtttggaagtgacaatgaggaggaggacaaggaggccgcccagctgcgggaggagcggctgcggcagtatgcagagaagaaggccaagaagccagccctggtggccaagagcagcatcctgctggatgtgaagccctgggatgatgaaacagacatggcccagctggaggcctgtgtgcgcagcatccagctggatggcctggtgtggggcgccagcaagctggtgcctgtgggctacggcatcaggaagctgcagatccagtgtgtggtggaggatgacaaggtgggcacagacctgctggaggaggagatcaccaagtttgaggagcacgtgcagagcgtggacattgctgccttcaacaagatctag

SEQ ID NO: 296668 - DNA, 903 bp, Artificial Sequence
  derived and/or modified sequence
atgaggtctgggaaggccagctgcaccctggagaccgtgtgggaggacaagcacaagtatgaggaggccgagcggcgcttctatgagcacgaggccacccaggccgccgccagcgcccagcagctgcctgctgagggccctgccatgaatggacctggccaggatgatcctgaagatgctgatgaagctgaggccccagatggcggcagcagaagagaccccaggaagagccaggacagcaggaagcccctgcagaagaagaggaagaggagccccaagagcggcctgggccctgctgacctggccctgctgggcctgtctgctgagcgggtgtggctggacaagagcctgtttgaccaggccgagagcagctaccggcagaagctggctgatgtggccgcccaggccgcctggcccccagccctggccccctggggcctgtgcacccacggcaaccaggtggcctgccaccacgtgacctggggcatctgggtgaacaagagcagctttgaccaggccgagcgggcctttgtggagtggagccaggccctgctgctggccccagatggcagccggcggcagggcacccccaacacaggccagcaggtggccgtgcctgacctggcccaccagcccagcccccctgtgaatggccagccccccctgggcagcctgcaggccctggtgcgggaggtgtggctggagaagcccaggtatgatgctgctgagcggggcttctatgaggccctgtttgatggccaccccccaggcaaggtgcggctgcaggagagagctggcctggccgagggcgcccggcggggcagaagagaccggcggggcaggaacatcctgggcaacaagagagctggcctgcggcgggcagatggagaggcccccagctag

SEQ ID NO: 296669 - DNA, 774 bp, Artificial Sequence
  derived and/or modified sequence
atgaggtctgggaaggccagctgcaccctggagaccgtgtgggaggacaagcacaagtatgaggaggccgagcggcgcttctatgagcacgaggccacccaggccgccgccagcgcccagcagctgcctgctgagggccctgccatgaatggacctggccaggatgatcctgaagatgctgatgaagctgaggccccagatggcggcagcagaagagaccccaggaagagccaggacagcaggaagcccctgcagaagaagaggaagaggagccccaagagcggcctgggccctgctgacctggccctgctgggcctgtctgctgagcgggtgtggctggacaagagcctgtttgaccaggccgagagcagctaccggcagaagctggctgatgtggccgcccaggccgcctggcccccagccctggccccctggggcctgtgcacccacggcaaccaggtggcctgccaccacgtgacctggggcatctgggtgaacaagagcagctttgaccaggccgagcgggcctttgtggagtggagccaggccctgctgctggccccagatggcagccggcggcagggcacccccaacacaggccagcaggtggccgtgcctgacctggcccaccagcccagcccccctgtgaatggccagccccccctgggcagcctgcaggccctggtgcgggaggtgtggctggagaagcccaggtatgatgctgctgagcggggcttctatgaggccctgtttgatggccaccccccaggatag

SEQ ID NO: 296670 - DNA, 573 bp, Artificial Sequence
  derived and/or modified sequence
atgaggtctgggaaggccagctgcaccctggagaccgtgtgggaggacaagcacaagtatgaggaggccgagcggcgcttctatgagcacgaggccacccaggccgccgccagcgcccagcagctgcctgctgagggccctgccatgaatggacctggccaggatgatcctgaagatgctgatgaagctgaggccccagatggcggcagcagaagagaccccaggaagagccaggacagcaggaagcccctgcagaagaagaggaagaggagccccaagagcggcctgggccctgctgacctggccctgctgggcctgtctgctgagcgggtgtggctggacaagagcctgtttgaccaggccgagagcagctaccggcagaagctggctgatgtggccgcccaggccgcctggcccccagccctggccccctggggcctgtgcacccacggcaaccaggtggcctgccaccacgtgacctggggcatctgggtgaacaagagcagctttgaccaggccgagcgggcctttgtggagtggagccaggccctgctgctggccccagatggatag

SEQ ID NO: 296671 - DNA, 2094 bp, Artificial Sequence
  derived and/or modified sequence
atggaggcccccctgggcagcatcctgagcccctgccccggccgggccgccaccggccgggccggcaccggccgggtgggcaccggcctgcggcccccagctgtgctgcagctgtgccccctgctggccttctaccgctgtgtgaggaagatgaggtctgggaaggccagctgcaccctggagaccgtgtgggaggacaagcacaagtatgaggaggccgagcggcgcttctatgagcacgaggccacccaggccgccgccagcgcccagcagctgcctgctgagggccctgccatgaatggacctggccaggatgatcctgaagatgctgatgaagctgaggccccagatggcggcagcagaagagaccccaggaagagccaggacagcaggaagcccctgcagaagaagaggaagaggagccccaagagcggcctgggccctgctgacctggccctgctgggcctgtctgctgagcgggtgtggctggacaagagcctgtttgaccaggccgagagcagctaccggcagaagctggctgatgtggccgcccaggccgcctggcccccagccctggccccctggggcctgtgcacccacggcaaccaggtggcctgccaccacgtgacctggggcatctgggtgaacaagagcagctttgaccaggccgagcgggcctttgtggagtggagccaggccctgctgctggccccagatggcagccggcggcagggcacccccaacacaggccagcaggtggccgtgcctgacctggcccaccagcccagcccccctgtgaatggccagccccccctgggcagcctgcaggccctggtgcgggaggtgtggctggagaagcccaggtatgatgctgctgagcggggcttctatgaggccctgtttgatggccaccccccaggcaaggtgcggctgcaggagagagctggcctggccgagggcgcccggcggggcagaagagaccggcggggcaggaacatcctgggcaacaagagagctggcctgcggcgggcagatggagaggcccccagcgccctgccctactgctacttcctgcagaaggatgctgaggccccctggctgagcaagccagcctatgacagcgctgagtgccgccaccacgccgctgaggccctgcgggtggcctggtgcctggaggccgccagcctgagccaccggcccggccccaggagcggcctgtctgtgagcagcctgcggcccaacaggaagatggccaccaacttcctggcccacgagaagatctggtttgacaagttcaagtatgatgatgctgagcggcgcttctatgagcagatgaatggacctgtggccggggccagccggcaggagaatggagccagcgtcatcctgcgggacatcgcccgggcccgggagaacatccagaagagcctggccggcagcagcggccctggggccagcagcggcaccagcggggaccatggagagctggtggtgcgcatcgccagcctggaggtggagaaccagagcctgcggggcgtggtgcaggagctgcagcaggccatcagcaagctggaggcccggctgaatgtgctggagaagagcagccctggccaccgggccacagccccccagacccagcacgtgagccccatgaggcaggtggagcccccagccaagaagccagccaccccagcagaagatgatgaagatgatgacatcgacctgtttggaagtgacaatgaggaggaggacaaggaggccgcccagctgcgggaggagcggctgcggcagtatgcagagaagaaggccaagaagccagccctggtggccaagagcagcatcctgctggatgtgaagccctgggatgatgaaacagacatggcccagctggaggcctgtgtgcgcagcatccagctggatggcctggtgtggggcgccagcaagctggtgcctgtgggctacggcatcaggaagctgcagatccagtgtgtggtggaggatgacaaggtgggcacagacctgctggaggaggagatcaccaagtttgaggagcacgtgcagagcgtggacattgctgccttcaacaagatctag

SEQ ID NO: 296672 - DNA, 1896 bp, Artificial Sequence
  derived and/or modified sequence
atgcggagcggcaaggccagctgcaccctggagaccgtgtgggaggacaagcacaagtacgaagaagccgaacggcgcttttacgaacacgaggcaactcaagccgccgcttctgctcagcaattgcctgccgaaggacccgccatgaacgggcccggacaggatgaccctgaggacgcagatgaggctgaggctcccgacgggggaagcaggagggatcctcgaaaatcccaggactccagaaaaccgttgcagaagaaacgtaagcggagcccgaaatcgggtctgggtccagcagaccttgctcttctaggcctgtctgctgagagagtctggctcgacaagtctttgttcgatcaagcagagtcttcttacagacagaaactggctgacgtcgcagcacaggcggcatggcctccagccctggctccttgggggctgtgtactcacggaaatcaggtcgcctgccaccatgtgacgtggggtatctgggtcaataagagcagttttgatcaggccgagagagcgttcgtagagtggtcacaagctttgctgctcgctcctgatggctctcggcggcagggtacacccaacactgggcagcaggttgccgtacccgacctcgcccaccagccttcaccaccagtgaacggacagcctcctcttggctctcttcaggctctcgtcagggaagtgtggctcgaaaagcccagatacgacgctgcagaaagaggcttctacgaggccttattcgatggccatcctccagggaaggtaaggctccaggaacgcgctgggctggccgaaggcgctagacgcggaaggcgcgataggaggggtagaaacattctaggaaataaacgtgccgggcttaggagggcagatggcgaggccccctctgcacttccttattgttactttcttcagaaagacgccgaggccccgtggctgagtaagccggcctacgattctgcagaatgtcggcaccacgctgctgaagccttgcgggtagcttggtgtctggaagctgcctctctcagtcaccgcccgggtcccaggtccggcttgtcagtctcctcgctgagacccaaccgcaagatggccactaatttccttgcccacgaaaaaatctggtttgataaattcaagtacgatgatgccgagcgtagattctatgagcaaatgaacgggccagtggcgggcgccagtcggcaggagaatggagcctccgtcattctgcgggacatcgcccgcgctcgcgagaacattcaaaaatcgctggcaggatcctcaggccccggagcctcgtctggaacctccggtgatcacggggaattggtggtgaggatcgcttcgcttgaggtcgaaaaccagagtctgcggggcgtggttcaggaactgcaacaggccatatcaaagcttgaagcaagacttaatgtattagagaaatcttcaccaggtcatcgtgccacagccccccagacccaacacgtatcaccgatgcgccaagtggagccaccagctaaaaaacccgctacacccgccgaggacgacgaggacgatgatattgacttgttcggaagtgacaacgaggaagaggacaaggaagcagcacagcttcgcgaggaacggttgcggcagtatgcagagaagaaggcaaagaaacctgcactcgtggcgaagtcctccattctccttgatgtgaagccctgggatgacgaaactgatatggcccaacttgaggcttgcgtaaggtctattcagctggacgggctggtttggggcgcctctaagctggtgcccgtgggctacgggatccgcaagctccagatccaatgcgtgggtggacgccagggaggggatcgccttgccgggggaggagaccatcaggtgtag

SEQ ID NO: 296673 - DNA, 1944 bp, Artificial Sequence
  derived and/or modified sequence
atgcggagcggcaaggccagctgcaccctggagaccgtgtgggaggacaagcacaagtatgaggaggccgagcggcgcttctacgagcacgaagccacccaggctgctgcttccgctcagcagctccctgctgagggacctgcaatgaatgggcctgggcaggacgaccccgaagacgccgacgaggcagaggctcccgatggggggtctcgccgcgatccaagaaagtcacaggactccagaaaaccactgcagaagaaaaggaaacgatcccccaaatccggattaggacctgcggacctcgctctgctcggtctttctgcggagagagtttggttagacaaatctcttttcgaccaagccgaatcttcgtatcggcagaagctggctgacgtggccgctcaagcggcgtggcccccggcactcgcaccgtgggggctgtgcacccacggtaatcaggtggcctgtcaccacgtaacttgggggatttgggtgaacaaaagttccttcgatcaggccgaacgtgcatttgtagaatggagccaggcccttttgctggcccctgacggttccaggagacaaggaacacctaacacgggccaacaagtagccgtcccggatcttgcccaccagccatctccacctgtaaacggtcaaccccccctaggcagcctccaggccctggttcgtgaggtatggttagagaagccacgatacgacgcagccgaaagagggttttatgaggcactgttcgacggccacccccctggcaaggtgcgcctgcaagagcgggctggactggccgaaggtgcgcgccggggcagaagagaccgtaggggccgcaacattctgggaaataaacgggcgggcttgaggcgagccgacggcgaagcccctagcgctttaccttactgctacttcctgcaaaaagacgccgaggctccatggttgtctaaacccgcctacgacagcgctgagtgccgccaccatgcggccgaggccttaagggtagcctggtgcttagaggccgcatcactctctcaccgacccggacctcggagcggcctttccgtgtcttcgttacgacccaatcgaaagatggccactaactttcttgctcacgagaagatctggtttgataagttcaagtatgacgacgctgagagacgattttacgaacagatgaatgggccggtcgcaggagcttctcggcaggaaaatggcgctagtgtaattctgagagatatcgccagagcccgagaaaatatccaaaagagcctagccgggagctcaggcccgggagcctccagcggaacaagtggcgatcacggggagctggtggtaaggatcgcatccctcgaggtggagaatcaatcattgcggggcgtggtacaagagctccagcaggcaatctcgaagcttgaggccagactcaatgtactggagaagtcatctcccggtcaccgagccaccgccccgcagacacagcatgtgtcacccatgaggcaagtcgagccccccgcaaagaaacccgcaacacccgccgaggatgatgaagatgacgacatcgatttatttgggtcggataacgaagaggaggataaagaagccgcccaattgagagaagaacggctgagacagtatgccgagaagaaagcaaagaagcctgcgctagtagccaagagctctatcctgctagatgttaagccttgggacgacgagaccgacatggcacagctggaagcatgcgtgcggagtatccagctggatggattagtttggggagctagcaaactggtgccagtaggatatggtattaggaagctgcagatccagtgcgtcgtggaagatgataaggtggggactgacctgctggaggaagaaataacaaaatttgaagagcacgtgcagtctgttgatatagcagccttcaacaaaatctag

SEQ ID NO: 296674 - DNA, 1944 bp, Artificial Sequence
  derived and/or modified sequence
atgcggagcggcaaggccagctgcaccctggagaccgtgtgggaggacaagcataagtacgaagaagccgagagacgtttctacgagcacgaggcaacacaggccgccgcaagcgcccagcagttgcctgctgaaggaccagctatgaacggaccaggtcaggacgatcccgaggatgcagacgaagcagaggcaccggacggaggaagcagacgtgaccctagaaagtcccaagatagtaggaagcctctccaaaagaagcggaagagatccccgaagtcaggattgggccccgcagatttggcgctgcttggtctaagtgccgaaagggtatggctggacaagagcctctttgatcaagctgagtcaagctacagacaaaagctcgccgatgtggctgcacaggccgcctggcccccagcccttgcgccttggggtctgtgcactcacggcaaccaagtggcctgtcatcatgttacatggggcatctgggttaacaagagctccttcgaccaggccgagcgcgcatttgttgagtggtcacaagcccttctactggcacctgatggtagccggcggcaaggcacgcctaatactggtcaacaagtggcagttcccgatctcgcccatcagccttctccccctgtgaacgggcagcccccactcggatcgctgcaggccctcgtgagggaggtgtggctggagaaaccccgctacgatgcagccgaaagagggttctatgaggctttatttgatggacaccctcctgggaaggtgagactccaagaaagggctggactggccgagggagcacggaggggacgcagggatagacggggtaggaatatcctggggaataagcgggcaggcctccgaagagcagatggcgaggccccctcagccttgccttattgttactttctccagaaggacgctgaggccccctggctgtctaagccagcatacgactcagctgagtgcagacaccatgctgctgaggctctccgggttgcctggtgcctggaggccgcatcactgtcccacaggcccggccccagatcaggcctttcagtcagttctttaagacccaacaggaagatggcgacaaactttcttgcacacgaaaagatctggttcgacaagttcaaatatgatgatgccgagagacgattttacgagcagatgaatggccctgttgctggcgctagccgccaggagaacggagcctccgtgatactgagagacattgcccgggcccgcgaaaatatccagaaaagtctggccggctcctcaggacccggggccagctctggcaccagtggagatcatggagaactagtcgtcaggatcgcctctttggaagttgagaatcagtctctcagaggagttgtccaggagcttcagcaggccatatcgaaattagaagcccggctgaatgtattggagaagtctagtccaggccaccgtgctacggccccacagactcagcatgtgagccctatgcgccaggtggaaccccccgcaaaaaagcctgccactcctgccgaggacgacgaagacgacgacatcgaccttttcgggtcagataatgaagaagaggataaagaggccgcccagctgcgggaggagaggctcaggcagtacgcggaaaagaaggccaaaaagccagccctggtagcaaagtctagcatcctgctcgacgtcaaaccatgggatgacgagacggacatggcccagcttgaggcttgcgtacgcagtattcaattagatggcctggtttggggtgcatcaaaattagtacctgtgggatacggcatacggaaattgcagattcagtgcgtggtggaagatgataaggttggcactgacttactggaggaagagatcaccaagtttgaggagcatgtgcagtccgttgatatcgcagcttttaataaaatctag

SEQ ID NO: 296675 - DNA, 903 bp, Artificial Sequence
  derived and/or modified sequence
atgcggagcggcaaggccagctgcaccctggagaccgtgtgggaggataaacacaagtatgaggaggccgaaagacgtttctacgaacacgaggcaacacaggcagctgcctctgcccagcagctccccgctgaaggtcctgccatgaatggcccaggtcaggatgatcccgaggacgccgacgaagccgaggccccagatggcggaagtcggcgtgacccccgcaaaagtcaagacagcagaaaaccgcttcagaagaaaagaaaacgctcccccaaaagcggtctgggcccggctgacctagcactcctgggactgagcgccgagcgggtttggctggataagagcctcttcgaccaagccgaatccagctaccgtcagaaacttgcagacgtcgcagctcaggcggcatggcccccagctcttgctccatggggactgtgtacccacggcaatcaggtcgcttgccatcatgtaacatgggggatctgggtcaacaagagtagttttgaccaagcggagcgggcattcgtggagtggtctcaagccctgcttttagccccagatggctccaggaggcaaggtactcctaatacgggacagcaagtggccgtccccgatctggcccatcagccttctccacctgtgaatgggcaaccgcccttgggctccctacaggccttagtccgagaagtgtggctggagaagccccggtatgatgccgctgaacgcggcttctatgaagcgctcttcgacgggcacccccctgggaaagtcaggctgcaagaacgtgctggcctcgcagaaggcgcccggcgcggcaggcgtgaccgccgggggagaaacatcctgggaaacaaacgggctgggcttagacgcgctgatggcgaggctcccagctag

SEQ ID NO: 296676 - DNA, 774 bp, Artificial Sequence
  derived and/or modified sequence
atgcggagcggcaaggccagctgcaccctggagaccgtgtgggaggacaagcacaaatatgaagaagctgagaggaggttctacgagcatgaagcaactcaggctgccgcttcggcccagcagctgcccgctgaggggcccgcaatgaatggtcccggccaggacgaccccgaggacgctgacgaagccgaggctccggacggaggatcccgaagggacccacggaagagccaggacagtcggaagcccctccaaaaaaaaagaaaaaggtctccaaagagcgggttggggcccgccgatttggccctgctggggctctccgctgagcgagtttggctcgataaatccctctttgaccaagccgagagttcctacagacagaagctcgccgatgtggcggcccaggcagcatggcccccagcacttgccccctggggcttgtgtacgcatggcaaccaggttgcctgccaccatgtgacctggggcatctgggtaaataagagtagtttcgatcaggccgagagggcgtttgtggagtggtctcaagccctgctgctggcacctgatgggtctagaaggcaaggcacaccaaatacaggccagcaagtggcagtcccagatctggctcaccaaccttccccccccgtcaacgggcagcctcctctgggatccctgcaggctcttgttcgagaagtttggctggaaaagcccaggtacgatgctgccgagagaggtttctacgaggcgctctttgacggacatcccccaggatag

SEQ ID NO: 296677 - DNA, 573 bp, Artificial Sequence
  derived and/or modified sequence
atgcggagcggcaaggccagctgcaccctggagaccgtgtgggaggataaacacaagtatgaggaggcggagcgtaggttctatgaacacgaagctacccaggctgccgcctccgctcagcaactgcccgccgagggccccgctatgaatggacctggccaggatgatccagaggacgccgacgaggccgaggccccagatggcggtagtcgtagggatccgcgcaagtctcaagatagcagaaagcctttgcagaaaaaacggaaaagatccccaaaaagcggcctgggtccagccgatctcgccctgctgggcttgtcagccgagagggtttggctggataaaagtttgttcgaccaggctgagagctcgtaccgccagaagctcgccgacgtggctgcccaagcagcctggcctccagcccttgctccgtggggactgtgcacccacggcaatcaggtggcttgccaccatgtgacctggggcatctgggtgaacaaaagttcctttgaccaggccgagagggcttttgttgagtggagccaagcgcttctgttggctcccgatggatag

SEQ ID NO: 296678 - DNA, 2094 bp, Artificial Sequence
  derived and/or modified sequence
atggaggcccccctgggcagcatcctgagcccctgccccggccgggccgccaccggccgcgcgggcaccggacgggtagggacaggactgagacctccagccgtgttacagctctgccctcttctggctttctaccggtgtgtgaggaagatgagatccggcaaagcctcttgtaccctcgaaaccgtctgggaagacaagcacaaatatgaggaagcggagcggagattttatgagcatgaggctacccaggcagcggccagcgcccagcagctgcccgctgaggggccagcgatgaacggaccgggtcaagacgatcccgaggacgccgatgaggcagaggcccctgatggaggatcccgacgggacccacgtaaatcacaggattcccggaaacctttgcaaaagaagagaaagaggagccccaagagcgggcttgggccagcggatctggccctgcttggtctctcagcagaacgtgtgtggctggataaatctctgtttgatcaggccgaaagtagttacagacagaagctcgccgatgtggcagcccaggcagcgtggccaccagccctggccccctggggactctgtacacacggtaaccaggtagcttgccatcacgtcacatgggggatttgggttaacaaatccagcttcgatcaggcggaaagagccttcgtggagtggtcacaggctctgctgctggccccagatggatcccgtagacaaggaacacccaataccgggcagcaagtggccgtacccgacctggctcatcagccttcaccccccgttaacggtcagccaccactcggctctttgcaggcactggtcagagaggtatggctagagaaaccccggtatgatgccgctgaaagggggttctacgaggccctcttcgatggtcacccaccaggtaaggtccgcctgcaggaaagggccggtctggctgaaggcgcgcggagaggacgacgggaccgccggggccgcaatatactggggaacaagcgcgccggactccggagagccgatggagaggcgccttctgcgctgccgtactgttacttcttacaaaaggacgcggaggccccatggctgagcaaacctgcctacgactccgctgaatgcaggcaccacgccgctgaggctctgagagtagcatggtgtctggaggccgctagccttagtcacaggcctggcccaagatcgggtttgagcgtctccagcctccggcccaatcgcaagatggcgacaaactttcttgctcacgaaaaaatctggttcgataagttcaaatacgatgatgccgaaagacgattctacgagcagatgaacgggcccgttgccggcgcttctcggcaggaaaacggagctagtgtgatcctcagagatattgcacgggcaagggagaatatccagaagtccctcgcaggctcttcgggacccggagcatcttctgggaccagcggagaccacggcgagctagttgtaaggatagcctccctcgaggtggaaaaccaatccctccgcggagttgtccaggaattgcagcaagcgatctctaaattggaagctagacttaatgtgctggaaaaatctagccccgggcaccgagcaacagctcctcagacgcagcatgttagccccatgagacaggtagagcctccagcgaagaagcctgccaccccagcggaggacgacgaggacgacgatatagatttgttcggatccgataatgaggaggaggataaagaagctgctcagctccgggaggagcggctcagacaatatgccgaaaaaaaggcgaaaaaaccagcccttgtcgccaagagtagtatcctgctcgacgtcaagccctgggacgatgaaaccgatatggcacagctagaagcttgtgtcaggtccattcagctggatggcctggtgtggggtgcctctaagctggttcctgttggctacggaattcgcaagctacagatccagtgcgtggtggaagatgataaggtgggcaccgatctgctggaagaggagattacaaagttcgaagagcatgtgcagagtgttgatattgctgcttttaataaaatttag

SEQ ID NO: 296679 - DNA, 1896 bp, Artificial Sequence
  derived and/or modified sequence
atgcgcagtggaaaggcctcctgtacactagagactgtatgggaggacaagcacaaatatgaagaggctgagcgcagattttatgaacacgaagccacacaagcagccgcatctgcccagcaattaccggcagagggaccggctatgaacgggccagggcaggatgaccccgaggacgccgatgaggccgaggcgccagacggcggaagccgaagagatcctagaaaatcacaagacagtcgcaaaccactgcagaaaaaacggaagcgttccccaaagtcaggcctgggacctgccgatctggcactccttggcctgagcgcggagcgggtgtggctcgataagagtctcttcgatcaggctgagagctcctatcgccaaaaactggctgatgtggctgctcaagccgcatggccaccagctctcgccccatggggtctgtgcactcacggaaatcaggtggcctgccaccatgtcacttggggcatttgggttaataagtccagtttcgatcaggccgagcgagcttttgtcgagtggagccaagcattgctcctcgcccctgatggcagccgcagacaggggactccgaacacagggcagcaagtggcggttcctgatttagcgcaccagccttcacctccagtgaatgggcagccaccgttgggctccctccaggcgttggtcagagaagtgtggcttgaaaaaccaagatacgatgccgctgagcgcggtttctatgaggccctgtttgacggtcaccctcctggtaaagtacgacttcaggagagagccggattggcagagggggcacgcaggggacgcagggaccgacggggacgcaacattctcgggaataagagggcaggattgcgccgagctgacggagaagcgcctagcgctctcccttactgttatttcctccaaaaggatgcagaagctccctggctgtcaaagcctgcgtacgacagcgcagagtgccgccaccacgctgccgaagcactgagggtggcgtggtgcctggaggcggcttcactaagccacaggcccggacctaggtcaggactgagtgtgagcagtcttagaccaaatcggaagatggccacaaatttcctggcccatgagaaaatatggttcgacaagttcaagtacgatgatgctgaaaggcgattttacgaacagatgaacgggccagtggctggagcatctagacaagaaaacggcgcttccgtgattctcagagacattgctagagcccgtgagaacatccagaaatccctcgctggttcttccgggcctggggcatcctcgggcacgagcggcgatcatggcgagttggttgttagaatcgccagcctcgaggtcgaaaaccaatctctgcggggtgtcgtccaggagctccaacaagctatctcaaaacttgaggccagactcaatgtcctagaaaagtctagcccgggtcaccgagccactgcccctcaaacccagcacgtgtctcccatgagacaggttgaacccccagctaagaagcctgccacgcctgcagaggacgatgaggatgacgatattgatctgttcggtagtgataatgaggaggaagacaaggaggctgctcagcttagagaggagagacttcgacagtatgcagaaaagaaggctaagaaacctgccctggttgcaaagtcgtccatacttctcgacgtcaagccatgggacgatgaaactgacatggctcagctggaagcatgtgtgcggtcaatccaactggatgggttagtctggggcgcttccaaactggttccggtaggttacggcattagaaagctgcagattcaatgcgtaggcggaaggcagggaggcgaccgtctggccggaggcggtgatcatcaggtctag

SEQ ID NO: 296680 - DNA, 1944 bp, Artificial Sequence
  derived and/or modified sequence
atgcgcagcggaaaggcctcatgcacactggaaactgtgtgggaagataaacacaaatacgaggaggcagagcgcaggttttacgagcacgaggctactcaagccgcagcaagtgctcagcagttgccagctgagggccctgcaatgaatggtcccggacaggatgacccagaagacgccgacgaggctgaagctccagatggaggtagtcgccgagatccacgaaagtcccaggattcccgtaaacccctgcaaaagaaacggaagaggtcgcctaaaagcggattgggccctgccgatttggctctgctgggactgagtgctgaacgtgtctggctggacaaatccctgtttgaccaagcagaaagctcataccggcaaaaacttgccgatgtcgctgcccaggcggcttggccccctgccctcgccccttggggattgtgtactcacggcaaccaggtggcgtgccatcacgtaacatgggggatatgggttaacaagagtagctttgaccaggcggagcgtgcctttgtagaatggagtcaggctctactgctggctccagacggatcccgacgacagggcacgcccaatacgggtcaacaagtggcagtccctgatcttgcccaccagccttcaccccctgtgaatggccagcccccactggggtcactgcaagccctcgtcagggaagtatggctggagaagcctagatatgacgctgcagagagaggtttttacgaagcactctttgacgggcaccctcccggaaaggtgcggttgcaggagagagctggtctggccgagggggcacgtcgaggtcgacgcgatcgaagaggcaggaacatcctgggtaataagcgggcaggcctgaggagagccgatggggaggcaccctcggctcttccatattgctactttctgcagaaggatgcagaggccccatggctgtcaaaacccgcttacgacagtgcagagtgcagacaccacgctgccgaggctctccgagtcgcctggtgcctagaagccgcttccttaagccaccgaccagggccaagatctgggctgagcgtgagcagcctgcggccaaataggaaaatggctacaaacttcctggcccacgagaaaatttggtttgataagtttaaatacgacgatgctgagcggaggttttacgaacagatgaacggccctgtggcgggagcgagccgccaggagaatggggcatcggtgatattgagggacatcgcacgggcacgcgagaacattcagaaaagtttggctggatcttccggcccaggtgcgtccagtgggactagtggggaccacggcgagctggtcgttcgtatagcctccctggaggttgaaaaccagagcttacggggtgttgtgcaagaactccagcaggctattagcaagctggaggcacgtttgaacgtgttagaaaaatcaagtcctggccacagggcaaccgctccccaaactcagcatgtgtcacctatgcgacaagttgaaccccctgctaagaaacctgctacacccgcagaggatgatgaggacgacgacattgatcttttcggctctgataatgaagaagaagacaaagaggcagcacagctgagggaagaaaggctccgccagtacgccgagaaaaaggcaaagaagcccgctttggtggccaagtcttccatcctcctagacgtaaaaccgtgggacgatgaaacagacatggcccagctagaagcatgtgtgcggagcatacagctggacgggcttgtgtggggagcctccaagctggtgcccgtgggatatggaattagaaagctacagattcagtgcgtggtggaggacgacaaggttggaactgaccttctggaggaggagattacaaaatttgaagaacatgtacaatctgtggatattgccgcttttaacaaaatatag

SEQ ID NO: 296681 - DNA, 1944 bp, Artificial Sequence
  derived and/or modified sequence
atgcgctccggtaaggcctcctgtactctcgagaccgtgtgggaagacaagcataagtacgaggaggccgaacggagattctacgaacacgaggcaactcaagcggctgctagcgctcagcagctgcctgctgaaggacccgcaatgaatggcccaggacaggacgatccagaggatgccgacgaagctgaagctcccgacgggggaagcaggcgagacccccgtaaatcccaggacagtagaaagccgctgcaaaagaagaggaaaagaagccccaagtccggcctgggacccgctgacctcgctttactggggctttctgctgagagagtatggttggataaaagtttgttcgaccaggcagaaagctcataccgacagaaacttgcagacgtcgcagctcaggcggcatggcctcctgccctcgctccttgggggctgtgcacgcatgggaaccaagtcgcatgccatcacgtcacttggggcatctgggtgaacaagtcaagtttcgaccaggcagagcgtgcctttgttgaatggtctcaggcgctgctgcttgcccctgacggatcaagacggcaaggtacacccaacaccggtcagcaggttgccgtcccagatctggctcaccaaccctctccccctgtcaatggacagccacccttaggcagtctgcaggcgctagtgagagaggtgtggctcgagaagccaaggtacgatgccgcagagcggggtttttatgaagcactttttgatggtcacccacccggaaaggttaggctacaagagcgcgcaggacttgcggagggcgcacgcaggggaagacgggacaggcggggtagaaatattctgggaaacaaacgagccggactgcggagagctgacggcgaagccccttccgctcttccatactgctacttcttgcagaaagatgcagaggcaccctggctatcaaagcccgcatacgacagcgccgagtgtcgtcatcatgccgctgaggccctgcgcgttgcctggtgcctggaagccgcttctctgagccacagaccaggccctcgcagcggcctctcagtgtcaagtttgcgtccgaacaggaaaatggcaactaattttctagctcacgaaaagatatggttcgacaaatttaagtatgatgacgcagagcgccgattttatgaacagatgaatgggcctgttgcaggagcctcccggcaagagaacggggcttccgtgatcctccgggacatagcacgcgcacgggagaatatccaaaagtcgctggccggatcatccggccctggggcttcgtcaggcactagcggtgaccacggggagctggtggtccggatagccagcctcgaggtggagaaccagtccctcaggggcgtcgtgcaagaactgcagcaggccatcagtaagttggaggcccgactgaacgtgctagaaaaatcttcacctgggcatcgtgctacagcccctcagacgcaacacgtgagccccatgcgtcaggtcgaacctcccgctaagaaaccagctacccccgcagaggatgatgaagacgacgatattgatctgtttgggagcgataacgaggaagaggacaaagaggccgcacagctgcgagaggagcggttacggcagtatgcagagaagaaggccaagaagcccgcactagtcgccaagagttctattctgttggacgtcaaaccctgggacgacgagactgacatggctcagcttgaagcctgcgtccgctccattcagctcgacggcctcgtatggggggcatcaaaacttgtccctgtggggtacggcattcgcaagctgcagattcagtgcgtcgttgaagatgataaagtgggaaccgatcttctggaggaggagatcaccaagttcgaagagcacgtgcagtcagtggatatcgcagccttcaataagatctag

SEQ ID NO: 296682 - DNA, 903 bp, Artificial Sequence
  derived and/or modified sequence
atgagatctggcaaggcgtcctgcaccctggaaaccgtgtgggaagacaaacacaagtacgaagaagcagagcgacgcttctatgaacatgaagcaacccaggctgccgcatcagctcagcagctgcccgctgaggggccagccatgaatgggcctggccaggacgatccagaggatgctgatgaggctgaggccccagacgggggttcacgcagggacccacggaagagtcaggatagccggaaaccgctgcagaagaagagaaaaaggagtcctaagtctggcctcggacccgcagatctcgctctgcttggtctttccgcggagcgggtgtggttagataaatctctctttgatcaggctgaatccagctataggcagaaactggcagacgtggcagctcaggccgcatggcccccagctcttgctccttggggcctctgcacacacggtaaccaagtcgcgtgtcaccatgtgacgtggggcatctgggtgaataagagttcatttgatcaggccgagagggcttttgtggaatggagccaggcgctcctcttggctccggacggctcgcgacggcagggcactcccaataccggccaacaggtcgctgtgcctgatctggcccatcagccctccccaccagtgaatggccagccaccgctcggctcactacaggcattggtgagagaggtgtggctggaaaaaccgcgatacgacgccgcagaaaggggcttttacgaagccctgttcgatgggcacccccctggcaaggttaggctccaagaaagggccggactcgccgaaggggctagaaggggcagacgtgacaggcggggaaggaacatcctcggcaataaacgtgccggactgaggcgggcagatggcgaagctccatcttag

SEQ ID NO: 296683 - DNA, 774 bp, Artificial Sequence
  derived and/or modified sequence
atgcgctctggtaaggccagctgcacactggagacagtgtgggaagacaagcataagtatgaggaagcagagcgcagattctatgaacacgaggccacccaagccgctgcatccgctcaacagctgccggctgaaggacctgctatgaatgggcctggacaggatgaccccgaggatgccgatgaagcagaggctcccgatggcggttctagacgagaccccaggaagtcccaggactcccgcaagccgttgcagaagaaaagaaagaggagccctaagagcggcctaggcccagccgatctggcgctgctaggcctgagcgcggagagagtatggctggacaaaagcctttttgaccaggcagagtcctcatacagacaaaagctggccgacgttgccgcacaggcggcttggcctcctgctctggcgccatggggcctgtgtacccatggtaaccaggttgcatgtcatcatgtgacttgggggatttgggttaacaagtcttcttttgatcaggccgaaagggccttcgtcgagtggtcccaggccctcctgttggcacctgacggcagccggaggcaaggcactccaaataccggccagcaagtcgctgtgcccgatctcgcacaccagccatcccctcccgtcaatgggcagccacccctaggctctcttcaagcactggttagagaggtctggttagaaaagccaaggtacgacgccgcagaaagaggtttttatgaagctttgtttgatggccatcccccagggtag

SEQ ID NO: 296684 - DNA, 573 bp, Artificial Sequence
  derived and/or modified sequence
atgcggtctggcaaggcgagctgtacgctggagaccgtgtgggaagacaagcataagtacgaagaagcagaacgtcgattttatgaacacgaggcaacccaagccgctgccagcgcccagcagttgcccgcagaaggtcctgcgatgaatggtcctggacaggacgacccagaggacgctgatgaggcggaagcgccagatggagggagtcgtagggatcccaggaagagccaggattcacgcaagccgcttcaaaagaaaaggaaaaggagcccaaagagtggacttggcccagcagacctggctcttcttggcctcagtgcagaacgagtctggctcgataaaagtctcttcgatcaggcggaatcgtcttatcggcagaagttggcagatgtcgcagcacaggctgcctggccacccgctctggccccttggggcctgtgcacacacgggaaccaggtggcgtgccatcatgtgacatggggaatttgggtgaacaaatcaagctttgaccaggccgaacgcgcattcgtggaatggagccaagcactcctccttgcgccagacgggtag

SEQ ID NO: 296685 - DNA, 2094 bp, Artificial Sequence
  derived and/or modified sequence
atggaggcacctcttgggagcattctgagcccttgtccaggtcgcgcagcaaccggccgtgccggtaccggaagagtcggaaccggcctgagaccaccagcagtgctgcagctgtgccctctcctcgccttctatagatgtgtccgcaaaatgcgctcgggaaaggcatcttgcacattagagaccgtctgggaggacaaacataagtatgaggaagctgagaggcgcttttacgaacacgaggcaactcaggctgctgcctctgctcaacagctgccagccgaggggccagcgatgaatggccctggtcaagacgatcccgaagatgcagacgaggcagaggctcccgatggaggctcaaggcgagatcctcgcaagtctcaggattctcgtaaaccactgcagaaaaagagaaaacggtcccctaaaagcgggctcgggcctgccgatctggcattgctcggcctcagcgcagagagagtttggcttgataagagcctgttcgatcaagctgaaagctcctaccgacagaaactcgctgacgtggccgcacaggccgcatggccgccagcactagccccatgggggctctgcactcacgggaaccaagtcgcatgtcatcatgtgacctggggcatctgggtcaataagagtagctttgatcaggctgaaagggccttcgtggagtggagccaggccctgctcctggcgcctgatggctcccgacgtcaaggcacacccaacaccggccaacaggtcgctgtccccgatcttgcacaccaaccatcaccgccagtgaatggccagccccctctggggagcctccaggccctggtgagggaggtttggctcgaaaaacctcggtatgatgccgctgagcgagggttctacgaagccctctttgacggccacccccctggtaaagtgagacttcaagagcgggctgggttggctgaaggagccagacgcggacggagggacagacgaggaagaaatatcttaggaaataagagagccggtctgagacgagcagacggggaagcaccgtccgcattgccttattgctacttcctgcaaaaagacgctgaggcaccgtggctcagcaagcctgcctacgattccgccgaatgcagacatcacgcagcagaagctctgcgcgtagcgtggtgtctcgaggccgctagtttaagtcatagaccgggaccacggtccggtctcagtgtgagcagcctcaggccaaatcgcaaaatggcaaccaacttcctagctcatgaaaaaatatggtttgacaagttcaagtatgacgacgctgaacgaagattctacgaacaaatgaacggcccagtagccggagcgtctcgccaggagaatggagcctccgtgattctccgtgatatcgctcgcgcacgggagaacatacagaagtcactggccggatccagcggaccgggagcaagttccggcacaagcggtgatcacggagagctggtagtgagaattgccagcttagaggtcgaaaaccagtccttgcgcggagttgtacaagaactacaacaggcaatctcaaaactggaagcacggctgaacgtgctcgagaagtcctcgcccggtcaccgcgctactgccccacagacccagcacgtgagcccgatgcgccaggtcgagcctccagctaaaaagcccgctacacccgcagaggacgatgaagacgacgacattgacctgttcggaagcgacaacgaagaggaagacaaagaggcagctcagctgagagaggaacggctccggcagtacgccgaaaaaaaggccaaaaaacccgctctggtggctaagtcttctattctgctggacgtaaagccttgggacgacgaaaccgatatggcccagctggaggcctgtgtgaggtctatacaattggacgggcttgtctggggggcatctaaactggttcccgtggggtatgggatcaggaaattgcagatccagtgcgtagtggaagatgataaagttgggaccgatctattagaggaggaaatcacaaagtttgaagagcatgtgcagtccgtggacatagctgcctttaataaaatctag

SEQ ID NO: 296686 - DNA, 1896 bp, Artificial Sequence
  derived and/or modified sequence
atgagaagcggcaaggccagctgcaccctggagaccgtgtgggaggacaagcacaagtacgaggaggccgagagaagattctacgagcacgaggccacccaggccgccgccagcgcccagcagctgcccgccgagggccccgccatgaacggccccggccaggacgaccccgaggacgccgacgaggccgaggcccccgacggcggcagcagaagagaccccagaaagagccaggacagcagaaagcccctgcagaagaagagaaagagaagccccaagagcggcctgggccccgccgacctggccctgctgggcctgagcgccgagagagtgtggctggacaagagcctgttcgaccaggccgagagcagctacagacagaagctggccgacgtggccgcccaggccgcctggccccccgccctggccccctggggcctgtgcacccacggcaaccaggtggcctgccaccacgtgacctggggcatctgggtgaacaagagcagcttcgaccaggccgagagagccttcgtggagtggagccaggccctgctgctggcccccgacggcagcagaagacagggcacccccaacaccggccagcaggtggccgtgcccgacctggcccaccagcccagcccccccgtgaacggccagccccccctgggcagcctgcaggccctggtgagagaggtgtggctggagaagcccagatacgacgccgccgagagaggcttctacgaggccctgttcgacggccacccccccggcaaggtgagactgcaggagagagccggcctggccgagggcgccagaagaggcagaagagacagaagaggcagaaacatcctgggcaacaagagagccggcctgagaagagccgacggcgaggcccccagcgccctgccctactgctacttcctgcagaaggacgccgaggccccctggctgagcaagcccgcctacgacagcgccgagtgcagacaccacgccgccgaggccctgagagtggcctggtgcctggaggccgccagcctgagccacagacccggccccagaagcggcctgagcgtgagcagcctgagacccaacagaaagatggccaccaacttcctggcccacgagaagatctggttcgacaagttcaagtacgacgacgccgagagaagattctacgagcagatgaacggccccgtggccggcgccagcagacaggagaacggcgccagcgtgatcctgagagacatcgccagagccagagagaacatccagaagagcctggccggcagcagcggccccggcgccagcagcggcaccagcggcgaccacggcgagctggtggtgagaatcgccagcctggaggtggagaaccagagcctgagaggcgtggtgcaggagctgcagcaggccatcagcaagctggaggccagactgaacgtgctggagaagagcagccccggccacagagccaccgccccccagacccagcacgtgagccccatgagacaggtggagccccccgccaagaagcccgccacccccgccgaggacgacgaggacgacgacatcgacctgttcggcagcgacaacgaggaggaggacaaggaggccgcccagctgagagaggagagactgagacagtacgccgagaagaaggccaagaagcccgccctggtggccaagagcagcatcctgctggacgtgaagccctgggacgacgagaccgacatggcccagctggaggcctgcgtgagaagcatccagctggacggcctggtgtggggcgccagcaagctggtgcccgtgggctacggcatcagaaagctgcagatccagtgcgtgggcggcagacagggcggcgacagactggccggcggcggcgaccaccaggtgtag

SEQ ID NO: 296687 - DNA, 1944 bp, Artificial Sequence
  derived and/or modified sequence
atgagaagcggcaaggccagctgcaccctggagaccgtgtgggaggacaagcacaagtacgaggaggccgagagaagattctacgagcacgaggccacccaggccgccgccagcgcccagcagctgcccgccgagggccccgccatgaacggccccggccaggacgaccccgaggacgccgacgaggccgaggcccccgacggcggcagcagaagagaccccagaaagagccaggacagcagaaagcccctgcagaagaagagaaagagaagccccaagagcggcctgggccccgccgacctggccctgctgggcctgagcgccgagagagtgtggctggacaagagcctgttcgaccaggccgagagcagctacagacagaagctggccgacgtggccgcccaggccgcctggccccccgccctggccccctggggcctgtgcacccacggcaaccaggtggcctgccaccacgtgacctggggcatctgggtgaacaagagcagcttcgaccaggccgagagagccttcgtggagtggagccaggccctgctgctggcccccgacggcagcagaagacagggcacccccaacaccggccagcaggtggccgtgcccgacctggcccaccagcccagcccccccgtgaacggccagccccccctgggcagcctgcaggccctggtgagagaggtgtggctggagaagcccagatacgacgccgccgagagaggcttctacgaggccctgttcgacggccacccccccggcaaggtgagactgcaggagagagccggcctggccgagggcgccagaagaggcagaagagacagaagaggcagaaacatcctgggcaacaagagagccggcctgagaagagccgacggcgaggcccccagcgccctgccctactgctacttcctgcagaaggacgccgaggccccctggctgagcaagcccgcctacgacagcgccgagtgcagacaccacgccgccgaggccctgagagtggcctggtgcctggaggccgccagcctgagccacagacccggccccagaagcggcctgagcgtgagcagcctgagacccaacagaaagatggccaccaacttcctggcccacgagaagatctggttcgacaagttcaagtacgacgacgccgagagaagattctacgagcagatgaacggccccgtggccggcgccagcagacaggagaacggcgccagcgtgatcctgagagacatcgccagagccagagagaacatccagaagagcctggccggcagcagcggccccggcgccagcagcggcaccagcggcgaccacggcgagctggtggtgagaatcgccagcctggaggtggagaaccagagcctgagaggcgtggtgcaggagctgcagcaggccatcagcaagctggaggccagactgaacgtgctggagaagagcagccccggccacagagccaccgccccccagacccagcacgtgagccccatgagacaggtggagccccccgccaagaagcccgccacccccgccgaggacgacgaggacgacgacatcgacctgttcggcagcgacaacgaggaggaggacaaggaggccgcccagctgagagaggagagactgagacagtacgccgagaagaaggccaagaagcccgccctggtggccaagagcagcatcctgctggacgtgaagccctgggacgacgagaccgacatggcccagctggaggcctgcgtgagaagcatccagctggacggcctggtgtggggcgccagcaagctggtgcccgtgggctacggcatcagaaagctgcagatccagtgcgtggtggaggacgacaaggtgggcaccgacctgctggaggaggagatcaccaagttcgaggagcacgtgcagagcgtggacatcgccgccttcaacaagatctag

SEQ ID NO: 296688 - DNA, 903 bp, Artificial Sequence
  derived and/or modified sequence
atgagaagcggcaaggccagctgcaccctggagaccgtgtgggaggacaagcacaagtacgaggaggccgagagaagattctacgagcacgaggccacccaggccgccgccagcgcccagcagctgcccgccgagggccccgccatgaacggccccggccaggacgaccccgaggacgccgacgaggccgaggcccccgacggcggcagcagaagagaccccagaaagagccaggacagcagaaagcccctgcagaagaagagaaagagaagccccaagagcggcctgggccccgccgacctggccctgctgggcctgagcgccgagagagtgtggctggacaagagcctgttcgaccaggccgagagcagctacagacagaagctggccgacgtggccgcccaggccgcctggccccccgccctggccccctggggcctgtgcacccacggcaaccaggtggcctgccaccacgtgacctggggcatctgggtgaacaagagcagcttcgaccaggccgagagagccttcgtggagtggagccaggccctgctgctggcccccgacggcagcagaagacagggcacccccaacaccggccagcaggtggccgtgcccgacctggcccaccagcccagcccccccgtgaacggccagccccccctgggcagcctgcaggccctggtgagagaggtgtggctggagaagcccagatacgacgccgccgagagaggcttctacgaggccctgttcgacggccacccccccggcaaggtgagactgcaggagagagccggcctggccgagggcgccagaagaggcagaagagacagaagaggcagaaacatcctgggcaacaagagagccggcctgagaagagccgacggcgaggcccccagctag

SEQ ID NO: 296689 - DNA, 774 bp, Artificial Sequence
  derived and/or modified sequence
atgagaagcggcaaggccagctgcaccctggagaccgtgtgggaggacaagcacaagtacgaggaggccgagagaagattctacgagcacgaggccacccaggccgccgccagcgcccagcagctgcccgccgagggccccgccatgaacggccccggccaggacgaccccgaggacgccgacgaggccgaggcccccgacggcggcagcagaagagaccccagaaagagccaggacagcagaaagcccctgcagaagaagagaaagagaagccccaagagcggcctgggccccgccgacctggccctgctgggcctgagcgccgagagagtgtggctggacaagagcctgttcgaccaggccgagagcagctacagacagaagctggccgacgtggccgcccaggccgcctggccccccgccctggccccctggggcctgtgcacccacggcaaccaggtggcctgccaccacgtgacctggggcatctgggtgaacaagagcagcttcgaccaggccgagagagccttcgtggagtggagccaggccctgctgctggcccccgacggcagcagaagacagggcacccccaacaccggccagcaggtggccgtgcccgacctggcccaccagcccagcccccccgtgaacggccagccccccctgggcagcctgcaggccctggtgagagaggtgtggctggagaagcccagatacgacgccgccgagagaggcttctacgaggccctgttcgacggccacccccccggctag

SEQ ID NO: 296690 - DNA, 573 bp, Artificial Sequence
  derived and/or modified sequence
atgagaagcggcaaggccagctgcaccctggagaccgtgtgggaggacaagcacaagtacgaggaggccgagagaagattctacgagcacgaggccacccaggccgccgccagcgcccagcagctgcccgccgagggccccgccatgaacggccccggccaggacgaccccgaggacgccgacgaggccgaggcccccgacggcggcagcagaagagaccccagaaagagccaggacagcagaaagcccctgcagaagaagagaaagagaagccccaagagcggcctgggccccgccgacctggccctgctgggcctgagcgccgagagagtgtggctggacaagagcctgttcgaccaggccgagagcagctacagacagaagctggccgacgtggccgcccaggccgcctggccccccgccctggccccctggggcctgtgcacccacggcaaccaggtggcctgccaccacgtgacctggggcatctgggtgaacaagagcagcttcgaccaggccgagagagccttcgtggagtggagccaggccctgctgctggcccccgacggctag

SEQ ID NO: 296691 - DNA, 2094 bp, Artificial Sequence
  derived and/or modified sequence
atggaggcccccctgggcagcatcctgagcccctgccccggcagagccgccaccggcagagccggcaccggcagagtgggcaccggcctgagaccccccgccgtgctgcagctgtgccccctgctggccttctacagatgcgtgagaaagatgagaagcggcaaggccagctgcaccctggagaccgtgtgggaggacaagcacaagtacgaggaggccgagagaagattctacgagcacgaggccacccaggccgccgccagcgcccagcagctgcccgccgagggccccgccatgaacggccccggccaggacgaccccgaggacgccgacgaggccgaggcccccgacggcggcagcagaagagaccccagaaagagccaggacagcagaaagcccctgcagaagaagagaaagagaagccccaagagcggcctgggccccgccgacctggccctgctgggcctgagcgccgagagagtgtggctggacaagagcctgttcgaccaggccgagagcagctacagacagaagctggccgacgtggccgcccaggccgcctggccccccgccctggccccctggggcctgtgcacccacggcaaccaggtggcctgccaccacgtgacctggggcatctgggtgaacaagagcagcttcgaccaggccgagagagccttcgtggagtggagccaggccctgctgctggcccccgacggcagcagaagacagggcacccccaacaccggccagcaggtggccgtgcccgacctggcccaccagcccagcccccccgtgaacggccagccccccctgggcagcctgcaggccctggtgagagaggtgtggctggagaagcccagatacgacgccgccgagagaggcttctacgaggccctgttcgacggccacccccccggcaaggtgagactgcaggagagagccggcctggccgagggcgccagaagaggcagaagagacagaagaggcagaaacatcctgggcaacaagagagccggcctgagaagagccgacggcgaggcccccagcgccctgccctactgctacttcctgcagaaggacgccgaggccccctggctgagcaagcccgcctacgacagcgccgagtgcagacaccacgccgccgaggccctgagagtggcctggtgcctggaggccgccagcctgagccacagacccggccccagaagcggcctgagcgtgagcagcctgagacccaacagaaagatggccaccaacttcctggcccacgagaagatctggttcgacaagttcaagtacgacgacgccgagagaagattctacgagcagatgaacggccccgtggccggcgccagcagacaggagaacggcgccagcgtgatcctgagagacatcgccagagccagagagaacatccagaagagcctggccggcagcagcggccccggcgccagcagcggcaccagcggcgaccacggcgagctggtggtgagaatcgccagcctggaggtggagaaccagagcctgagaggcgtggtgcaggagctgcagcaggccatcagcaagctggaggccagactgaacgtgctggagaagagcagccccggccacagagccaccgccccccagacccagcacgtgagccccatgagacaggtggagccccccgccaagaagcccgccacccccgccgaggacgacgaggacgacgacatcgacctgttcggcagcgacaacgaggaggaggacaaggaggccgcccagctgagagaggagagactgagacagtacgccgagaagaaggccaagaagcccgccctggtggccaagagcagcatcctgctggacgtgaagccctgggacgacgagaccgacatggcccagctggaggcctgcgtgagaagcatccagctggacggcctggtgtggggcgccagcaagctggtgcccgtgggctacggcatcagaaagctgcagatccagtgcgtggtggaggacgacaaggtgggcaccgacctgctggaggaggagatcaccaagttcgaggagcacgtgcagagcgtggacatcgccgccttcaacaagatctag

SEQ ID NO: 296692 - DNA, 2350 bp, Artificial Sequence
  derived and/or modified sequence
gacaccactggccgcgaagcgcagggggggcgcgcgcgctgccgcccgttcccagcacttgtgcagactcctccggggaagagcggcctccgcggtcatctccaacggaattctgcctttgaagtgtcggggcacggcgcgtcgagggtcctggcggccaggcggggcgtgtgcaagggtcgcgtcccccccccgggcccccggcccgtggctcttggtagagcccagtgcttcatttcccgtgcgcggcccgggcggccctccctttcatcagtcttcccgcgtccgccgattcctcctccttggtcgccgcgtccttggctggcgtgaggccaaagcaaaatgaggagcgggaaggcctcctgcaccctggagaccgtgtgggaagacaagcacaagtatgaggaggccgagcggcgcttctacgaacacgaggccacacaggcggccgcctccgcccagcagctgccagccgaggggccagccatgaatgggcccggccaggacgaccctgaggacgctgatgaggcggaagcccctgacggcggcagcaggcgtgatcccaggaagagccaggacagcaggaagcccctgcagaaaaagaggaagcgctcccccaagagcgggctcggccccgcggacctggccctcctgggcctctcggccgaacgcgtgtggctggacaagtcacttttcgaccaggcagagagctcctaccgccagaagctggcagatgtggctgcccaggcagcctggcctcctgccttggccccttggggtctctgcacccatggaaaccaggtggcctgccaccacgtgacctgggggatctgggtcaacaagtcctccttcgaccaggctgagcgggccttcgtggagtggtctcaggccctgttgctggcccccgacggcagccgcaggcaggggactcccaacacaggccagcaggtggccgtccccgacctggcccaccagcccagcccaccggtcaatggccagcccccgctgggcagcctgcaggcactggttcgggaggtgtggctggagaagccccggtatgatgcagccgagaggggcttctacgaggccctgtttgacggccatcccccagggaaggtgcgcctgcaagagcgagccggcctggccgagggtgcccggcggggccgcagagaccggcggggccgcaacatcttagggaacaagcgggccgggctgcgacgggccgatggggaggccccctctgccttgccctactgttacttcctgcagaaggatgcagaggccccctggctcagcaagcctgcctacgacagcgccgagtgccgccaccacgctgccgaggccctgcgggtggcctggtgcctcgaagctgcctccctgtctcaccgacccggtcctcggtctggcctgtccgtgtccagcctgagacccaacagaaaaatggctacaaacttcctagcacatgagaagatctggttcgacaagttcaaatatgacgacgcagaaaggagattctacgagcagatgaacgggcctgtggcaggtgcctcccgccaggagaacggcgccagcgtgatcctccgtgacattgcgagagccagagagaacatccagaaatccctggctggaagctcaggccccggggcctccagcggcaccagcggagaccacggtgagctcgtcgtccggattgccagtctggaagtggagaaccagagtctgcgtggcgtggtacaggagctgcagcaggccatctccaagctggaggcccggctgaacgtgctggagaagagctcgcctggccaccgggccacggccccacagacccagcacgtatctcccatgcgccaagtggagcccccagccaagaagccagccacaccagcagaggatgacgaggatgatgacattgacctgtttggcagtgacaatgaggaggaggacaaggaggcggcacagctgcgggaggagcggctacggcagtacgcggagaagaaggccaagaagcctgcactggtggccaagtcctccatcctgctggatgtcaagccttgggatgatgagacggacatggcccagctggaggcctgtgtgcgctctatccagctggacgggctggtctggggggcttccaagctggtgcccgtgggctacggtatccggaagctacagattcagtgtgtggtggaggacgacaaggtggggacagacttgctggaggaggagatcaccaagtttgaggagcacgtgcagagtgtcgatatcgcagctttcaacaagatctgaagcctgagtgtgtgtacgtgcgcgcgtgcgtgaggccctgccacgattaaagactgagaccggc

SEQ ID NO: 296693 - DNA, 996 bp, Artificial Sequence
  derived and/or modified sequence
catttcccgtgcgcggcccgggcggccctccctttcatcagtcttcccgcgtccgccgattcctcctccttggtcgccgcgtccttggctggcgtatgaggagcgggaaggcctcctgcaccctggagaccgtgtgggaagacaagcacaagtatgaggaggccgagcggcgcttctacgaacacgaggccacacaggcggccgcctccgcccagcagctgccagccgaggggccagccatgaatgggcccggccaggacgaccctgaggacgctgatgaggcggaagcccctgacggcggcagcaggcgtgatcccaggaagagccaggacagcaggaagcccctgcagaaaaagaggaagcgctcccccaagagcgggctcggccccgcggacctggccctcctgggcctctcggccgaacgcgtgtggctggacaagtcacttttcgaccaggcagagagctcctaccgccagaagctggcagatgtggctgcccaggcagcctggcctcctgccttggccccttggggtctctgcacccatggaaaccaggtggcctgccaccacgtgacctgggggatctgggtcaacaagtcctccttcgaccaggctgagcgggccttcgtggagtggtctcaggccctgttgctggcccccgacggcagccgcaggcaggggactcccaacacaggccagcaggtggccgtccccgacctggcccaccagcccagcccaccggtcaatggccagcccccgctgggcagcctgcaggcactggttcgggaggtgtggctggagaagccccggtatgatgcagccgagaggggcttctacgaggccctgtttgacggccatcccccagggaaggtgcgcctgcaagagcgagccggcctggccgagggtgcccggcggggccgcagagaccggcggggccgcaacatcttagggaacaagcgggccgggctgcgacgggccgatggggaggccccctctg

SEQ ID NO: 296694 - DNA, 2387 bp, Artificial Sequence
  derived and/or modified sequence
taaagcttatttcagataaatgacgaaaaatttttagtgtaagtatgtctcagatacttcatgggccatacattcactaacaaaattatatattgttcatgtattgggaggcacttggcctcccagagtactgagattacaggcatgagccactgcgcccggcctgttttctcttcacaacaaaacgtccccacatgggcttgacttcgaagtcctcgaatgtcatctcatggaagccccactggggagcatcctcagcccctgcccagggagggcagccacggggagggcgggcacggggagggtgggcacggggctgcggccacccgctgtgttgcaactctgccctctgcttgctttttatcgctgtgtccggaagatgaggagcgggaaggcctcctgcaccctggagaccgtgtgggaagacaagcacaagtatgaggaggccgagcggcgcttctacgaacacgaggccacacaggcggccgcctccgcccagcagctgccagccgaggggccagccatgaatgggcccggccaggacgaccctgaggacgctgatgaggcggaagcccctgacggcggcagcaggcgtgatcccaggaagagccaggacagcaggaagcccctgcagaaaaagaggaagcgctcccccaagagcgggctcggccccgcggacctggccctcctgggcctctcggccgaacgcgtgtggctggacaagtcacttttcgaccaggcagagagctcctaccgccagaagctggcagatgtggctgcccaggcagcctggcctcctgccttggccccttggggtctctgcacccatggaaaccaggtggcctgccaccacgtgacctgggggatctgggtcaacaagtcctccttcgaccaggctgagcgggccttcgtggagtggtctcaggccctgttgctggcccccgacggcagccgcaggcaggggactcccaacacaggccagcaggtggccgtccccgacctggcccaccagcccagcccaccggtcaatggccagcccccgctgggcagcctgcaggcactggttcgggaggtgtggctggagaagccccggtatgatgcagccgagaggggcttctacgaggccctgtttgacggccatcccccagggaaggtgcgcctgcaagagcgagccggcctggccgagggtgcccggcggggccgcagagaccggcggggccgcaacatcttagggaacaagcgggccgggctgcgacgggccgatggggaggccccctctgccttgccctactgttacttcctgcagaaggatgcagaggccccctggctcagcaagcctgcctacgacagcgccgagtgccgccaccacgctgccgaggccctgcgggtggcctggtgcctcgaagctgcctccctgtctcaccgacccggtcctcggtctggcctgtccgtgtccagcctgagacccaacagaaaaatggctacaaacttcctagcacatgagaagatctggttcgacaagttcaaatatgacgacgcagaaaggagattctacgagcagatgaacgggcctgtggcaggtgcctcccgccaggagaacggcgccagcgtgatcctccgtgacattgcgagagccagagagaacatccagaaatccctggctggaagctcaggccccggggcctccagcggcaccagcggagaccacggtgagctcgtcgtccggattgccagtctggaagtggagaaccagagtctgcgtggcgtggtacaggagctgcagcaggccatctccaagctggaggcccggctgaacgtgctggagaagagctcgcctggccaccgggccacggccccacagacccagcacgtatctcccatgcgccaagtggagcccccagccaagaagccagccacaccagcagaggatgacgaggatgatgacattgacctgtttggcagtgacaatgaggaggaggacaaggaggcggcacagctgcgggaggagcggctacggcagtacgcggagaagaaggccaagaagcctgcactggtggccaagtcctccatcctgctggatgtcaagccttgggatgatgagacggacatggcccagctggaggcctgtgtgcgctctatccagctggacgggctggtctggggggcttccaagctggtgcccgtgggctacggtatccggaagctacagattcagtgtgtggtggaggacgacaaggtggggacagacttgctggaggaggagatcaccaagtttgaggagcacgtgcagagtgtcgatatcgcagctttcaacaagatctgaagcctgagtgtgtgtacgtgcgcgcgtgcgtgaggccctgccacgattaaagactgagaccggc

SEQ ID NO: 296695 - DNA, 5654 bp, Artificial Sequence
  derived and/or modified sequence
ggccgggcgggccgcggcagggagtggctgccggaccgaccggaccgcgaggccgctgggcggcggtcggctcctgctgcccctgtgccgagaccccgcgcacctggccaggcccctggccccaacatggcccgtcgctctcagagctcctcgcagggggacaacccactggcacccgggtacctgccgcctcactacaaagagtactaccgcctggcggtggatgcactggccgagggtggctcggaggcctacagccgcttcctcgctaccgagggggcaccagacttcctgtgccctgaagagctggaacatgtgagccgacaccttcggcctccgcagtatgttacccgagagccacctgaaggcagccttctcgacgtggacatggatggctcctcgggtacatactggccagtgaactcagaccaggccgtgcctgagcttgatttgggctggcctctgaccttcggcttccagggcaccgaggtgaccaccttggtgcagccaccgccccccgacagccccagtatcaaggatgaggcccgcaggatgatccgttccgcccagcaggtggtggccgtggtgatggacatgttcactgatgtggacctgctcagcgaagtgctggaggccgcggcccgtcgggtcccagtctacatcctgctggatgagatgaacgcgcagcacttcctggacatggccgacaagtgccgtgtcaacctgcagcacgtggatttcctgcgcgtacggactgtggcgggccccacctactactgccgcactgggaagtccttcaagggccacgtcaaggagaagttcctgctggtggactgtgccgtggtgatgagtgggagctacagcttcatgtggtcctttgagaagatccaccgcagcctggcgcacgtgttccaaggagagctggtctccagcttcgacgaggagttccgcatcctcttcgcgcagtccgagccgcttgtgccctcggccgcggccctggcccgcatggacgcctatgccctggctccgtatgccggggccgggcctctcgtgggcgtccctggggtcggggcgccaacccccttctccttccctaaacgagcgcacctcctgttcccgccaccccgggaagagggcctgggcttcccctccttcctcgacccggaccgccacttcctgtcggccttccgccgggaggagccgccgcggatgccggggggcgcgctggaaccgcacgcggggctgcggccgctctcgcggcgcctggaggccgaggccgggccggctggggagctcgcgggcgcgcggggcttcttccaggcgcggcacctggagatggacgccttcaagcggcacagcttcgcgaccgagggcgcgggcgccgtggagaacttcgcggccgcgcggcaggtgtcgcggcagacgttcctcagccacggcgacgacttccgcttccagaccagccacttccaccgtgaccagctctaccagcagcagtaccagtgggacccgcagctcacgccggcgcgcccgcaaggcctgttcgagaagcttcgcgggggccgcgcgggtttcgcggacccggatgacttcaccctgggcgccgggccccgcttcccggagctcggacccgacgggcaccagcggctggactacgtgccgtccagcgcgtcccgcgaggtgcgccacggctcggaccccgccttcgcgcccggaccccgcggcctggagcccagcggagccccgcgccccaacctgacccagcgcttcccatgccaggccgcggcgaggccgggcccagaccccgctcccgaggcggagccggagcgcaggggcgggcccgaggggcgggcagggctgcggcgctggcgtttggcctcctacttgagcggctgccacggcgaggatgggggcgacgacggcctaccggcgcccatggaagcggaggcttacgaagacgacgtgctggctcccgggggccgggcacctgccggcgacctgctcccctcggccttccgcgtcccagcagccttccccaccaaggtcccggtgccaggcccgggcagcggcggcaacggcccagagcgcgagggcccggaggagcctggcctggccaagcaggactcattccgctcgcgcctgaaccccctggtccagcgcagctccaggctgcgctcctcgctcatcttcagcacgtcacaggccgagggcgcggccggggctgcggcggccactgagaaggtgcagctgctgcacaaggagcagacggtcagcgagacgctggggcccggcggagaggccgtgcgctccgcggcttccaccaaggtggcggagctgctggagaagtacaagggcccagcccgtgatcccggcggcggcgcgggcgccatcaccgttgccagccacagcaaggccgtcgtgtcccaggcgtggcgggaagaggtggcggccccaggtgccgtggggggcgagcgccgcagcctcgagagctgcctgctggacctgcgcgactcctttgcacagcagctgcaccaggaggcggagcggcagccgggagccgcgtcgctcaccgcggcgcagctgctcgacacactgggccggagcggctccgaccgcctgccttcccgcttcctctctgcccagagccactcaacgtccccgcaagggctggacagccctctgccgctggaagggtccggagcgcaccaggtgctccataatgagtcaaaagggagccccacctcggcttaccctgagcggaaggggagccccacgcctgggttttccactcgaagaggaagtccaactacaggatttatcgagcagaaggggagccccacctcagcctaccccgagcgcaggggtagtccggtgccccccgtgccggagcgcaggagcagtccggtgccccccgtgccggagcgcaggggcagcctcacccttaccatctccggggagtccccgaaggccgggcccgcggaggaggggccgagcggccccatggaagtcctgcgcaaaggctccttgcgtcttaggcagctgctgagccccaagggcgagcggcgcatggaggatgagggtggcttcccagtgccgcaggagaacggccaacccgagagcccgcggcgtctgtcactgggccagggtgacagcacggaggctgccacagaagagcggggtccgcgggcgcgcctgtcctcagccacggccaacgccttgtacagcagcaaccttcgggatgacacgaaggccattctggagcagatcagtgcccacggccagaagcaccgtgcggtccctgccccgagccccggcccgacccacaacagccccgagctaggccgtccaccggctgctggcgtcctggccccagatatgtccgacaaggacaagtgttcagccatcttccgctcggacagcttggggacccagggccggctgagccgcacgctgccagccagcgcggaggagcgcgatcggctgctgcgccgcatggagagcatgcgcaaggagaagcgcgtgtacagccgcttcgaggtcttctgcaagaaagaggaggccagcagccctggggcaggggaaggccccgcggaggagggcaccagggacagcaaggtgggcaagttcgtgcccaagatcctgggcacgttcaaaagcaagaagtgagtcttctggcctggcaacccaggccagggtgcccgcatcgctgccccggtcatccagaagccccgcggaacagagagccctgctcatctgcttgagcagcggctgtcaggccacggccgcttggggcttggctgagtgcgccagacctcggctccactggaggctcacctggcagctgccgtctctgccccctggcctccccaacgctggggctgcacccctcgccaccagtgcctttctcccctcagcaccttcatctctgcaccgtcagccttgcgtggcgcagcgtctggctccgccatctctttgtgcctcagtcccccccgccccctttatttttttgagacctagggctggagtgcagttgagcggtctgggctcactgcaacctctgcctcccgggttccagcgattctcctgcctcagcctcctgagtagctgggattacagatgtatgctaccacgcccaggtagtttttgtatttttagtagagacagggtttcactatgttggccaggctggtctccaactcctggcctcaaatgatcagcccgcttcagcctcccaaagtggggggattacaggcgtgagccttgcaccccgctaagtcccctatcctcttgcaagggtctcgcctctgtgcctcaattcctcattctctgggcccttctcctcctcagggcctcctgttctcagggcctcccccctccccgctccctccctctctcaaggtctcctccttccctcccccccccccccccccgtctcccccctcccccgcctgggcttcacttcctttcctacttggattctcctgctcgctgcctcccagcatcttttttggaggcccgtctcttgctgtggggaagactgggctggctgcgggcagtttgcaaggggtgggtggggcaggggggggggagctggaccagaagatgccccttggagtggcaaggaagctggacagggcaggcctctggggacgggacacagggaagcccgaaggggcgccttggccaggtctgccatctcctccagcgaggctctggccagcactgggtgagagtggggagggggcattggcctttgcagcacagtaaaacatggtccagacaacctgtggccccggcctcatgagcaccccctgcacaggcccggcccaagccaggcgctagaagggctggttgtggagtgcttatccttgacaggtatggggccaggtgagggcaggggacaaggtgcagctgaggccgagcccaactaggtcctgggcacccctgcaggtgggagtggtccttgtcctcctggtatccagcagacacccccctctccccaccagccccattctcaggtcctttcctctttgtcaccaacaccaagaatctgtccagggttcttggcttatcttttatctcttttcactcctagagaggaattgcaattgactcagaatgacacattttggcaccacgtgtgtagaaagcccccactgttagatgatagcctcgtgaaattcatgtttctgtattctcctatttcttttcaaaaactaattttttttttagtgtaataaatcctaagagggaactgatttaagaaacaaggccgccaaacaaaggcagcagttccgactccagcagctgggaaaggaaggaaagtgaccccactttcactcctgcacagcccactggttaccaaaaccaccgtgcaagtcgggatgacagcagggacttctggccaggtgggaaaggtgcctggaagcgggatgcgcctgtgcgtctcttggccatgatgttcttgtgggcatgttattcttggtgctgcctggggtgttgctgagcggacaggctctccagctggagtccatggagaggccagaggctggcggccctgcctgggccttcggagcctcctgcctgcaccctccacctcttctaaaccatgatgtggcacattttggtgttaataaaacacaacacacaaagta

SEQ ID NO: 296696 - protein, 1179 aa, Artificial Sequence
  derived and/or modified sequence
MARRSQSSSQGDNPLAPGYLPPHYKEYYRLAVDALAEGGSEAYSRFLATEGAPDFLCPEELEHVSRHLRPPQYVTREPPEGSLLDVDMDGSSGTYWPVNSDQAVPELDLGWPLTFGFQGTEVTTLVQPPPPDSPSIKDEARRMIRSAQQVVAVVMDMFTDVDLLSEVLEAAARRVPVYILLDEMNAQHFLDMADKCRVNLQHVDFLRVRTVAGPTYYCRTGKSFKGHVKEKFLLVDCAVVMSGSYSFMWSFEKIHRSLAHVFQGELVSSFDEEFRILFAQSEPLVPSAAALARMDAYALAPYAGAGPLVGVPGVGAPTPFSFPKRAHLLFPPPREEGLGFPSFLDPDRHFLSAFRREEPPRMPGGALEPHAGLRPLSRRLEAEAGPAGELAGARGFFQARHLEMDAFKRHSFATEGAGAVENFAAARQVSRQTFLSHGDDFRFQTSHFHRDQLYQQQYQWDPQLTPARPQGLFEKLRGGRAGFADPDDFTLGAGPRFPELGPDGHQRLDYVPSSASREVRHGSDPAFAPGPRGLEPSGAPRPNLTQRFPCQAAARPGPDPAPEAEPERRGGPEGRAGLRRWRLASYLSGCHGEDGGDDGLPAPMEAEAYEDDVLAPGGRAPAGDLLPSAFRVPAAFPTKVPVPGPGSGGNGPEREGPEEPGLAKQDSFRSRLNPLVQRSSRLRSSLIFSTSQAEGAAGAAAATEKVQLLHKEQTVSETLGPGGEAVRSAASTKVAELLEKYKGPARDPGGGAGAITVASHSKAVVSQAWREEVAAPGAVGGERRSLESCLLDLRDSFAQQLHQEAERQPGAASLTAAQLLDTLGRSGSDRLPSRFLSAQSHSTSPQGLDSPLPLEGSGAHQVLHNESKGSPTSAYPERKGSPTPGFSTRRGSPTTGFIEQKGSPTSAYPERRGSPVPPVPERRSSPVPPVPERRGSLTLTISGESPKAGPAEEGPSGPMEVLRKGSLRLRQLLSPKGERRMEDEGGFPVPQENGQPESPRRLSLGQGDSTEAATEERGPRARLSSATANALYSSNLRDDTKAILEQISAHGQKHRAVPAPSPGPTHNSPELGRPPAAGVLAPDMSDKDKCSAIFRSDSLGTQGRLSRTLPASAEERDRLLRRMESMRKEKRVYSRFEVFCKKEEASSPGAGEGPAEEGTRDSKVGKFVPKILGTFKSKK

SEQ ID NO: 296697 - DNA, 3540 bp, Artificial Sequence
  derived and/or modified sequence
atggcaagacgttcccagagctcatctcaaggagacaatccactggcgcctggttatctgccacctcactataaggaatattatcggttagccgtcgatgcactggccgagggcggttcagaggcatactccaggttcctggctaccgagggcgcccccgattttctctgccctgaagagcttgagcacgtgtccaggcatttaagacccccacagtatgtcacaagggagccgcctgagggcagccttctggacgtcgacatggatggttcctctggtacatattggcccgtcaactccgaccaggctgtgccagaattggacctcggatggccactgactttcgggttccagggaactgaggtcaccacccttgtgcagcctccacctccggacagcccatccatcaaagatgaagctaggaggatgatccgcagtgcacagcaggtggtggccgtcgtaatggatatgtttaccgatgtagacctgctctctgaggtcctggaagccgccgcccgacgtgtgcccgtctatattctattggacgagatgaatgcacaacattttctggatatggccgataagtgccgtgtaaatctgcagcacgtagattttctacgtgtgagaaccgtcgccggacccacctattattgccggaccggaaagtcattcaagggccacgtgaaggagaagttcctcttagtggactgtgccgtagtcatgagtgggagttattccttcatgtggtctttcgagaagattcatcggagcctcgctcacgtgtttcagggcgaactcgtcagcagttttgacgaagagttcaggatcctgttcgcacagagcgagcctctggtccccagtgccgctgcactcgcgcgaatggacgcttacgcacttgccccttacgcaggggctggtcctctagtgggcgtaccaggcgtgggagccccgaccccattttcattccctaagcgggcacacctcttattcccccccccgcgggaagaggggctgggctttcctagctttctagatccagacaggcatttcctctctgccttcagaagagaggaacctccccgtatgccaggtggcgccttggagccccacgccggtctgagaccgttgtcccggaggctcgaagccgaggcaggccccgccggtgagctggccggggcacggggatttttccaggctcggcacctggagatggacgccttcaaacggcatagctttgccaccgagggtgccggagcagtggagaactttgccgcggctagacaggtgagcaggcagacattcctgtcacatggggatgactttagatttcagacctcacacttccatagggaccagctgtaccaacagcagtatcagtgggatcctcaactgacacccgctcgccctcaggggttgttcgagaaactccgggggggccgcgccggattcgccgacccggacgacttcaccttgggagctgggccaagattccctgaactgggccctgacgggcaccagcgcctggattatgtcccttctagtgccagtcgagaggtgcgacacgggagcgacccagcatttgcccccggacctaggggcttggagcctagcggcgccccaaggcctaacctaacccagcgctttccatgccaggcagctgcacgtcccggcccagaccccgcccccgaggctgagccagagcggaggggtggcccggaaggaagagctggactcaggcgctggcgtctggccagctacctgtcaggatgccacggagaagatgggggcgacgatggccttcctgccccaatggaagccgaagcctatgaggacgacgtccttgcacctggcggaagagcaccagcgggagatctacttccctcggcgtttagagtgcctgctgccttcccaaccaaggttcctgtccctggccctggaagcggcggaaatggtccggaaagggaaggaccagaggaacccggtctggcaaagcaagactccttccgatcccggctgaatccgttggtgcagaggagtagtcgcctgcgttcctctctcattttctccacatcccaggccgagggcgccgccggggctgccgctgctactgagaaagtccagcttttacacaaggaacagaccgtctctgagactctggggcccgggggtgaggccgtccggtccgcggctagcactaaagttgcagagttacttgagaaatataaaggtccggccagggacccagggggaggcgccggggccatcacggtcgcaagtcattctaaggctgttgtgtcgcaggcctggcgagaggaggtggctgcccccggggctgtgggaggggagcgaagatctctggagtcttgcctcctagacctgagggattcattcgcccaacagctgcaccaagaggcagagaggcagcccggcgccgcctccctgacggccgcccagcttctggacaccctcggaagaagcggctccgataggctccctagccggttcctcagtgcacagtcccattcgaccagtccacagggtcttgacagccccctgcctctggagggctctggggcccatcaggtgctccataacgagtccaaggggagccccacatctgcttatccagagagaaagggctcgcctaccccaggttttagtactagaaggggttctcccaccaccggctttatagagcaaaagggcagtcccacatccgcatatcccgaacggcgaggttcgcctgtccctcccgtacctgagcgaagatcttctccggtgcctcccgtacctgaacggcggggatctctgacgctgacgatatctggcgagtcccctaaggcggggccagcagaggaaggcccaagcggtccgatggaagtcctgaggaaggggtccttgcggctgcgtcagttgctcagtcctaaaggcgagcgaaggatggaggatgagggtggattcccagtccctcaagagaacgggcagcctgagagtccacgtagactttctctgggtcagggcgattcaaccgaggccgccaccgaggaacggggaccaagagccaggctatccagcgccaccgcaaatgctttgtattcatccaacctgcgcgatgatacaaaggcaatcctggaacagatcagcgcacacgggcagaagcacagagctgtgcccgcacctagccccgggcctacacacaactcacctgaactcggacgtccacctgcagcgggcgtgttggcccccgatatgagtgacaaggataagtgctcagccatctttagatctgactccctgggaactcagggcagactctccaggaccttgcctgcttccgctgaggaaagagacaggctccttcggcggatggaaagtatgcgaaaagagaaaagggtgtacagccgctttgaggtgttttgtaaaaaggaagaagcgtctagcccaggggccggcgagggacccgcagaagagggtactagggattccaaagtggggaagttcgtgcctaaaatactgggaacctttaaatcaaaaaaatag

SEQ ID NO: 296698 - DNA, 3540 bp, Artificial Sequence
  derived and/or modified sequence
atggcccggcgcagccagagcagcagccagggcgacaaccccctggcccctggctacctgcccccccactacaaggagtactaccgcctggccgtggatgccctggccgagggcggcagcgaggcctacagccgcttcctggccacagaaggagccccagacttcctgtgcccagaggagctggagcacgtgagccgccacctgcggcccccccagtatgtgacccgggagcccccagagggcagcctgctggatgtggacatggatggcagcagcggcacctactggcctgtgaacagcgaccaggccgtgcctgagctggacctgggctggcccctgaccttcggcttccagggcacagaggtgaccaccctggtgcagcccccacctccagacagccccagcatcaaggatgaggcccggaggatgatccgcagcgcccagcaggtggtggccgtggtgatggacatgttcacagatgtggacctgctgtctgaggtgctggaggccgccgccaggagagtgcctgtgtacatcctgctggatgagatgaatgcccagcacttcctggacatggctgacaagtgccgggtgaacctgcagcacgtggacttcctgcgggtgaggacagtggccggccccacctactactgcaggacaggcaagagcttcaagggccacgtgaaggagaagttcctgctggtggactgtgctgtggtgatgagcggcagctacagcttcatgtggagctttgagaagatccacaggagcctggcccacgtgttccagggcgagctggtgtcctcctttgatgaggagttccgcatcctgtttgcccagagcgagcccctggtgcccagcgctgctgccctggccaggatggatgcctatgccctggccccctatgctggggccggccccctggtgggcgtgcctggggtgggcgcccccacccccttctccttccccaagagggcccacctgctcttccccccaccccgggaggagggcctgggcttccccagcttcctggaccctgacagacacttcctgagcgccttcagaagagaggagccccccaggatgcctggaggagccctggagccccatgctggcctgcggcccctgagccggcggctggaggccgaggccggccctgctggggagctggccggggcccggggcttcttccaggcccggcacctggagatggatgccttcaagaggcacagctttgccacagagggcgctggagctgtggagaactttgctgctgcccggcaggtgtcccggcagaccttcctgagccatggagatgacttccgcttccagaccagccacttccaccgggaccagctgtaccagcagcagtaccagtgggacccccagctgaccccagcccggccccagggcctgtttgagaagctgcggggcggccgggccggctttgctgaccctgatgacttcaccctgggcgccggcccccgcttccctgagctgggcccagatggccaccagaggctggactatgtgcccagcagcgccagccgggaggtgagacatggcagtgaccctgcctttgcccctggcccccggggcctggagcccagcggggccccccggcccaacctgacccagcgcttcccctgccaggccgccgcccggcccggccctgaccctgcccctgaggccgagcctgagcggcggggcggccctgagggccgggccggcctgcggcgctggaggctggccagctacctgagcggctgccacggagaagatggaggagatgatggcctgcctgcccccatggaggccgaggcctatgaagatgatgtgctggcccctgggggccgggccccagctggggacctgctgcccagcgccttccgggtgcctgctgccttccccaccaaggtgcctgtgcccggccctggcagcggcggcaatggacctgagcgggagggccctgaggagcccggcctggccaagcaggacagcttccgcagccggctgaaccccctggtgcagaggagcagccggctgcggagcagcctcatcttcagcaccagccaggccgagggcgctgctggagctgctgctgccacagagaaggtgcagctgctgcacaaggagcagacagtgtctgagaccctgggccctggaggagaggccgtgcgctctgctgccagcaccaaggtggccgagctgctggagaagtacaagggccctgcccgggaccccggcggcggggccggggccatcaccgtggccagccacagcaaggctgtggtgtcccaggcctggagggaggaggtggccgcccctggagctgtgggcggggagaggaggagcctggagagctgcctgctggacctgcgggacagctttgcccagcagctgcaccaggaggccgagcggcagcctggagctgccagcctgacagctgcccagctgctggacaccctgggccgcagcggcagtgaccggctgcccagccgcttcctgagcgcccagagccacagcaccagcccccagggcctggacagccccctgcccctggagggcagcggggcccaccaggtgctgcacaatgaaagcaagggcagccccaccagcgcctacccagagaggaagggcagccccaccccaggcttcagcacccggcggggcagccccaccaccggcttcatcgagcagaagggcagccccaccagcgcctacccagagcggcggggcagccctgtgccccctgtgcctgagcggcgcagcagccctgtgccccctgtgcctgagcggcggggcagcctgaccctgaccatcagcggggagagccccaaggccggccctgctgaggagggccccagcggccccatggaggtgctgaggaagggcagcctgcggctgcggcagctgctgagccccaagggggagaggaggatggaggatgaaggaggcttccctgtgccccaggagaatggccagcctgagagcccccggcggctgagcctgggccagggcgacagcacagaggccgccacagaggagcggggcccccgggcccggctgagcagcgccacagccaatgccctgtacagcagcaacctgagagatgacaccaaggccatcctggagcagatcagcgcccacggccagaagcacagagctgtgcctgcccccagccctggccccacccacaacagccctgagctgggccggcccccagctgctggggtgctggccccagacatgtctgacaaggacaagtgcagcgccatcttcagaagtgacagcctgggcacccagggccgcctgagcaggaccctgcctgccagcgctgaggagcgggaccggctgctgcggaggatggagagcatgaggaaggagaagagggtgtacagcagatttgaggtgttctgcaagaaggaggaggccagcagccctggggccggggagggccctgctgaggagggcacccgggacagcaaggtgggcaagtttgtgcccaagatcctgggcaccttcaagagcaagaagtag

SEQ ID NO: 296699 - DNA, 3540 bp, Artificial Sequence
  derived and/or modified sequence
atggcccggcggagccagagcagcagccagggcgacaaccccctggcgcccggatacctgccaccccactataaggagtactatcggctggctgtggatgccctcgctgaaggcggttccgaggcgtacagccgctttctggctaccgagggggcccctgactttctgtgccctgaggagctggagcacgtgagccggcacctgaggccacctcaatacgtgactcgagagccacctgagggctcactgttggacgttgatatggacggttcatcgggtacttactggcctgtgaactctgatcaggccgtgcccgagttggacctgggctggcccttaaccttcggttttcagggcacagaggtgaccactcttgtccaaccccctcctcccgattccccatctatcaaagacgaggccagaaggatgattaggtcagcacaacaggtcgtcgctgtggtgatggacatgtttacagatgttgacttactttcagaagtgctggaagccgccgcaaggcgcgtccctgtgtacatattgctcgacgaaatgaacgcccagcatttcctggacatggccgataagtgtcgagtgaaccttcagcacgtggatttcctacgggttcgcaccgtggcgggccctacatattactgcagaacgggcaaaagtttcaaaggacatgtgaaggaaaagtttctgcttgtcgactgtgctgttgttatgagcgggtcttactccttcatgtggtccttcgaaaagatacaccgcagcttagcacatgtattccagggggagctggtgtcctctttcgatgaggaattccgaattctatttgcccaatcggagcccctggtgccatccgccgcagccctggcaaggatggacgcttacgccctagccccatacgccggcgcaggacccctcgtaggtgtccctggcgtgggggcccccacaccgtttagctttcctaaacgcgcccacctgttgttccctccaccaagagaggaagggctgggattcccttccttcctggatcctgaccggcactttctgtctgccttcaggagagaggaaccgccacgaatgccaggtggtgctctggagccacacgcgggactgcgacctttgtccagacgtttggaagccgaagctggacccgctggagagctggccggagctagaggctttttccaggcccgacacttagagatggacgctttcaagcgtcactccttcgcaaccgagggcgcaggtgccgttgaaaacttcgccgctgcccgccaagtttctaggcaaacatttctgtcacatggggatgacttccgcttccagacgtcccactttcaccgcgatcagctgtaccagcagcaatatcagtgggatccccagctgacccccgcgaggcctcagggcctctttgagaaactcagaggagggagggcaggattcgcagacccggatgacttcaccttgggggccgggccaagattccccgagctaggacctgacggtcaccaaagactcgactacgtgccaagttcagccagccgcgaggtgcggcatgggagtgatcccgcgttcgcgccagggcccagaggcttggaaccttctggtgccccacggcccaacctgacacaacgatttccttgccaggcagccgcaagacctggaccagatcccgcccctgaggcagagccagaaaggcgtgggggtccagaaggtcgtgccggtctgagaaggtggcggctggccagctatctgtctggatgtcacggagaggacggtggcgacgacggtctgcccgcccccatggaggctgaggcttatgaggacgacgttcttgccccggggggcagggctccagccggagatctcctgccatccgcgtttagagtccccgccgcctttcccacaaaagtccccgtgccgggtccagggtccggcgggaatggcccagagcgggaagggcccgaagaaccaggattagctaagcaagattctttccgatcacggctcaatccgctggtgcagcgcagcagcaggctgagatcctctctgatattctcaacctcacaggccgagggagccgccggggccgccgccgctacagaaaaagtgcagctgctgcataaagagcaaacagtgagcgaaacgttgggtccaggcggagaggcagtgcggtccgctgcatcaaccaaagtcgcagagctgttggaaaagtacaaagggcccgcccgggacccaggcgggggcgctggcgcaatcaccgtggcttcacacagtaaagccgtggtgtctcaggcctggcgagaagaggtcgctgctcctggtgcagtgggtggagaacggaggagcctggagagctgcctgctcgatctacgcgactcatttgcgcagcagttgcatcaagaggcagaacggcagccaggggcagcatcactcactgccgcacagctactggatacactgggaaggagtggcagcgatagactgcctagccggttcctgagcgcacagagtcacagcacctcaccccagggacttgactctccactacctctcgaaggcagcggggcacaccaggtgctccataacgagagtaagggctctcctacatctgcatatcctgaaagaaagggctcccccactccaggcttctccactcggagaggatcacctaccactggattcattgagcagaagggaagtccaacatcggcctaccctgaacgcagagggtccccagtgcctcctgtgccagaacgcaggagttcccctgtgcccccggtaccagaaaggagggggagtctgaccctcactatcagcggagagagcccgaaggctgggcctgctgaagaggggccctcgggcccaatggaagtgcttcgcaaagggagtctgagactgcgccagcttttatcccccaagggcgagcgcaggatggaagatgagggggggttccccgtcccgcaggagaacggccagccggaaagcccacgacgtctgtcattgggccagggcgattccacggaagcggccacggaggagaggggtccgcgtgccaggctatcctctgccacagccaatgcactctactcctcgaacctgcgtgacgacactaaggccatcttagagcagatttccgcgcatggccagaagcaccgggccgttcccgcgccctctcctggtcccacacataatagtccagagctcgggcggcctcccgctgccggcgttctggctcctgatatgtcggataaagacaagtgttcagcaatcttcaggtcagactccctcgggacacagggacgcctgtcacgcactctccccgcaagcgccgaggagcgggaccgattgctccggcgaatggagtccatgcgcaaggagaagcgagtttattccagatttgaagttttctgcaagaaggaggaggcaagctctccgggcgcaggggaggggcctgcagaggaaggcactagggattccaaggttggaaagttcgttccaaaaatcctcggcaccttcaagtcaaaaaaatag

SEQ ID NO: 296700 - DNA, 3540 bp, Artificial Sequence
  derived and/or modified sequence
atggcgagaaggagccagtccagttcccagggagacaatccccttgcacccggttacttgcctccgcactacaaggaatattatcgcctggctgtcgacgcactggctgaagggggtagtgaagcgtactcacggtttttggcgacggagggagcgcctgacttcctatgccctgaggagttagagcatgtttctcggcacctgagaccaccgcagtatgtgactagggagccccctgaaggctctctgctggacgttgacatggacgggtcctccggaacttactggccggtcaattcagatcaggcggttccagagctggacctggggtggccattaacctttggattccaggggaccgaagtgacaacacttgtgcagccgcctccacccgacagtccaagtatcaaagatgaggcacggcgtatgatcagatccgctcagcaggtggtggctgtagtcatggatatgtttaccgacgtggacctgctgagcgaggtcttggaggcggcagctcggagggtgcctgtctatatactcctcgatgagatgaatgcacagcatttcctggacatggccgacaagtgcagagtgaatctgcagcacgtggacttcctgagagtgagaacggtagccggacccacttactattgcaggacgggaaagtcatttaagggccacgtcaaggaaaagtttctgctagtggattgcgcggtcgtcatgagcggatcttatagttttatgtggagtttcgaaaagattcatagatctctcgctcatgtcttccaaggggagctggtcagcagcttcgacgaagaattccgcattctcttcgcccagtcagagcctctggtccccagcgccgcagcactagccagaatggacgcatacgctctggccccatacgcgggagcgggtcccctggttggtgtaccaggggtgggcgctcctacacctttttcattccccaaaagggctcatcttctgttccccccacctcgcgaggaaggactcgggttccctagctttcttgaccctgatagacatttcctctctgccttcagaagggaagagcccccacgcatgccgggaggagccttggaaccccacgccggtctgcggcctctttctcgcagactggaggccgaggcaggtcccgcaggagagctggccggtgcccgtgggttttttcaggctcgccatttggagatggacgcattcaagcggcatagcttcgcaacagagggggcaggcgctgtggagaactttgctgccgcaaggcaggtgtcccggcagaccttcctgtcccacggcgacgatttcagattccagaccagccattttcacagggaccaactttatcagcagcagtaccagtgggatccgcagctgaccccagccagaccccagggacttttcgagaagctccgcggagggagagccggttttgccgatccggacgacttcacgctaggcgctggcccacgctttccggaactgggcccagatggacaccagaggctagactacgtcccatcgtccgcctcccgggaggtgagacacggttctgacccagcctttgcccctggacctcggggactggagccatcaggagccccacgcccaaatctgactcagcgatttccatgccaagccgctgccagacctggccctgaccccgctcccgaagcagagcctgagcgcagagggggacctgagggaagagcaggactgagacgctggcggctcgcctcatacttgagcggatgccatggtgaggatggcggtgatgatggcctgccagcacccatggaggcggaagcatatgaagatgatgtcctggcacccggtggcagggccccagctggtgatcttctcccttccgcctttcgagtcccagcggcatttccaacaaaggtccctgttcctggcccagggtcaggcggaaatggccctgagcgggaaggacctgaagagcctggtctcgctaagcaagacagctttaggagtagattaaaccccctagtacagcgctcctcccggctgaggtcgtccctcatttttagcacaagccaagctgaaggggctgccggagcggctgccgcaacagagaaggtgcagctgctccataaagaacagactgtgtcagaaaccctggggccaggcggagaagccgtgcgatccgccgcttctacgaaagtcgctgagctccttgagaagtacaagggcccagcacgagaccctggtggcggagctggggctatcactgtggcaagccacagcaaggcagtggtgtcacaagcttggcgagaggaggtcgccgcacctggtgccgtgggaggagaacgacgcagtttggagtcttgcctgctggatctgcgagacagtttcgcccagcaactacaccaagaagcagaaaggcaacctggggcagcctctctcaccgcggctcaactcctggataccttgggtcgcagcgggtcggatcgacttcccagtagatttctctccgcacagtctcattcaacgagccctcagggtctcgatagtccactgcctctggaaggatctggcgcacatcaggttctccataatgagagtaagggcagccccacgagtgcctatcctgagagaaaaggtagtcctactccagggtttagcactcgcagaggctcccccactaccggcttcatagagcagaaaggcagtccaacctcggcctatcccgaaagacgtggttctccggtgccccctgtccccgagcgcagaagctcccctgtcccacctgttcccgagagacggggatccctcaccttaactatctccggggagagtcccaaagcaggtcctgccgaggagggaccatccgggccaatggaagtgcttcgaaaaggtagtctccgcctgcggcagctcctgagtcctaagggggaacgcagaatggaggacgaaggtggatttcccgtgccgcaggagaatgggcagcccgaatctccaagacgtctgtctttgggacagggagactccacagaggctgcgaccgaggaacggggtccacgtgcacggttgtcttctgctaccgccaatgctctgtactcttcaaacctgagagatgacactaaggccattcttgagcaaattagtgctcatggccagaagcatcgggctgttcccgcaccctctcccggacccacacacaacagtcccgagctggggagaccaccagccgctggggtgctggccccagacatgtccgataaggataaatgcagtgccatcttcagaagtgatagtttagggactcagggaagactcagcaggacgctgcctgcaagcgccgaggagcgcgaccgcctgcttcgtcgcatggagtctatgcgaaaagaaaagagagtttattctcgcttcgaagtgttttgtaagaaggaggaggccagtagtcctggcgctggcgaggggccagctgaagaaggaactcgggacagtaaggtggggaaattcgtccccaaaattttgggaaccttcaaaagcaagaagtag

SEQ ID NO: 296701 - DNA, 3540 bp, Artificial Sequence
  derived and/or modified sequence
atggccagaagaagccagagcagcagccagggcgacaaccccctggcccccggctacctgcccccccactacaaggagtactacagactggccgtggacgccctggccgagggcggcagcgaggcctacagcagattcctggccaccgagggcgcccccgacttcctgtgccccgaggagctggagcacgtgagcagacacctgagacccccccagtacgtgaccagagagccccccgagggcagcctgctggacgtggacatggacggcagcagcggcacctactggcccgtgaacagcgaccaggccgtgcccgagctggacctgggctggcccctgaccttcggcttccagggcaccgaggtgaccaccctggtgcagccccccccccccgacagccccagcatcaaggacgaggccagaagaatgatcagaagcgcccagcaggtggtggccgtggtgatggacatgttcaccgacgtggacctgctgagcgaggtgctggaggccgccgccagaagagtgcccgtgtacatcctgctggacgagatgaacgcccagcacttcctggacatggccgacaagtgcagagtgaacctgcagcacgtggacttcctgagagtgagaaccgtggccggccccacctactactgcagaaccggcaagagcttcaagggccacgtgaaggagaagttcctgctggtggactgcgccgtggtgatgagcggcagctacagcttcatgtggagcttcgagaagatccacagaagcctggcccacgtgttccagggcgagctggtgagcagcttcgacgaggagttcagaatcctgttcgcccagagcgagcccctggtgcccagcgccgccgccctggccagaatggacgcctacgccctggccccctacgccggcgccggccccctggtgggcgtgcccggcgtgggcgcccccacccccttcagcttccccaagagagcccacctgctgttccccccccccagagaggagggcctgggcttccccagcttcctggaccccgacagacacttcctgagcgccttcagaagagaggagccccccagaatgcccggcggcgccctggagccccacgccggcctgagacccctgagcagaagactggaggccgaggccggccccgccggcgagctggccggcgccagaggcttcttccaggccagacacctggagatggacgccttcaagagacacagcttcgccaccgagggcgccggcgccgtggagaacttcgccgccgccagacaggtgagcagacagaccttcctgagccacggcgacgacttcagattccagaccagccacttccacagagaccagctgtaccagcagcagtaccagtgggacccccagctgacccccgccagaccccagggcctgttcgagaagctgagaggcggcagagccggcttcgccgaccccgacgacttcaccctgggcgccggccccagattccccgagctgggccccgacggccaccagagactggactacgtgcccagcagcgccagcagagaggtgagacacggcagcgaccccgccttcgcccccggccccagaggcctggagcccagcggcgcccccagacccaacctgacccagagattcccctgccaggccgccgccagacccggccccgaccccgcccccgaggccgagcccgagagaagaggcggccccgagggcagagccggcctgagaagatggagactggccagctacctgagcggctgccacggcgaggacggcggcgacgacggcctgcccgcccccatggaggccgaggcctacgaggacgacgtgctggcccccggcggcagagcccccgccggcgacctgctgcccagcgccttcagagtgcccgccgccttccccaccaaggtgcccgtgcccggccccggcagcggcggcaacggccccgagagagagggccccgaggagcccggcctggccaagcaggacagcttcagaagcagactgaaccccctggtgcagagaagcagcagactgagaagcagcctgatcttcagcaccagccaggccgagggcgccgccggcgccgccgccgccaccgagaaggtgcagctgctgcacaaggagcagaccgtgagcgagaccctgggccccggcggcgaggccgtgagaagcgccgccagcaccaaggtggccgagctgctggagaagtacaagggccccgccagagaccccggcggcggcgccggcgccatcaccgtggccagccacagcaaggccgtggtgagccaggcctggagagaggaggtggccgcccccggcgccgtgggcggcgagagaagaagcctggagagctgcctgctggacctgagagacagcttcgcccagcagctgcaccaggaggccgagagacagcccggcgccgccagcctgaccgccgcccagctgctggacaccctgggcagaagcggcagcgacagactgcccagcagattcctgagcgcccagagccacagcaccagcccccagggcctggacagccccctgcccctggagggcagcggcgcccaccaggtgctgcacaacgagagcaagggcagccccaccagcgcctaccccgagagaaagggcagccccacccccggcttcagcaccagaagaggcagccccaccaccggcttcatcgagcagaagggcagccccaccagcgcctaccccgagagaagaggcagccccgtgccccccgtgcccgagagaagaagcagccccgtgccccccgtgcccgagagaagaggcagcctgaccctgaccatcagcggcgagagccccaaggccggccccgccgaggagggccccagcggccccatggaggtgctgagaaagggcagcctgagactgagacagctgctgagccccaagggcgagagaagaatggaggacgagggcggcttccccgtgccccaggagaacggccagcccgagagccccagaagactgagcctgggccagggcgacagcaccgaggccgccaccgaggagagaggccccagagccagactgagcagcgccaccgccaacgccctgtacagcagcaacctgagagacgacaccaaggccatcctggagcagatcagcgcccacggccagaagcacagagccgtgcccgcccccagccccggccccacccacaacagccccgagctgggcagaccccccgccgccggcgtgctggcccccgacatgagcgacaaggacaagtgcagcgccatcttcagaagcgacagcctgggcacccagggcagactgagcagaaccctgcccgccagcgccgaggagagagacagactgctgagaagaatggagagcatgagaaaggagaagagagtgtacagcagattcgaggtgttctgcaagaaggaggaggccagcagccccggcgccggcgagggccccgccgaggagggcaccagagacagcaaggtgggcaagttcgtgcccaagatcctgggcaccttcaagagcaagaagtag

SEQ ID NO: 296702 - protein, 1369 aa, Artificial Sequence
  derived and/or modified sequence
MRPPGFLSRAPSLNRAERGIWSCSMDQREPLPPAPAENEMKYDTNNNEEEEGEQFDFDSGDEIPEADRQAPSAPETGGAGASEAPAPTGGEDGAGAETTPVAEPTKLVLPMKVNPYSVIDITPFQEDQPPTPVPSAEEENVGLHVPCGYLVPVPCGYAVPSNLPLLLPAYSSPVIICATSLDEEAETPEVTEDRQPNSLSSEEPPTSEDQVGREDSALARWAADPANTAWMENPEEAIYDDVPRENSDSEPDEMIYDDVENGDEGGNSSLEYGWSSSEFESYEEQSDSECKNGIPRSFLRSNHKKQLSHDLTRLKEHYEKKMRDLMASTVGVVEIQQLRQKHELKMQKLVKAAKDGTKDGLERTRAAVKRGRSFIRTKSLIAQDHRSSLEEEQNLFIDVDCKHPEAILTPMPEGLSQQQVVRRYILGSVVDSEKNYVDALKRILEQYEKPLSEMEPKVLSERKLKTVFYRVKEILQCHSLFQIALASRVSEWDSVEMIGDVFVASFSKSMVLDAYSEYVNNFSTAVAVLKKTCATKPAFLEFLKQEQEASPDRTTLYSLMMKPIQRFPQFILLLQDMLKNTSKGHPDRLPLQMALTELETLAEKLNERKRDADQRCEVKQIAKAINERYLNKLLSSGSRYLIRSDDMIETVYNDRGEIVKTKERRVFMLNDVLMCATVSSRPSHDSRVMSSQRYLLKWSVPLGHVDAIEYGSSAGTGEHSRHLAVHPPESLAVVANAKPNKVYMGPGQLYQDLQNLLHDLNVIGQITQLIGNLKGNYQNLNQSVAHDWTSGLQRLILKKEDEIRAADCCRIQLQLPGKQDKSGRPTFFTAVFNTFTPAIKESWVNSLQMAKLALEEENHMGWFCVEDDGNHIKKEKHPLLVGHMPVMVAKQQEFKIECAAYNPEPYLNNESQPDSFSTAHGFLWIGSCTHQMGQIAIVSFQNSTPKVIECFNVESRILCMLYVPVEEKRREPGAPPDPETPAVRASDVPTICVGTEEGSISIYKSSQGSKKVRLQHFFTPEKSTVMSLACTSQSLYAGLVNGAVASYARAPDGSWDSEPQKVIKLGVLPVRSLLMMEDTLWAASGGQVFIISVETHAVEGQLEAHQEEGMVISHMAVSGVGIWIAFTSGSTLRLFHTETLKHLQDINIATPVHNMLPGHQRLSVTSLLVCHGLLMVGTSLGVLVALPVPRLQGIPKVTGRGMVSYHAHNSPVKFIVLATALHEKDKDKSRDSLAPGPEPQDEDQKDALPSGGAGSSLSQGDPDAAIWLGDSLGSMTQKSDLSSSSGSLSLSHGSSSLEHRSEDSTIYDLLKDPVSLRSKARRAKKAKASSALVVCGGQGHRRVHRKARQPHQEELAPTVMVWQIPLLNI

SEQ ID NO: 296703 - protein, 1579 aa, Artificial Sequence
  derived and/or modified sequence
MEPQRRELLAQCQQSLAQAMTEVEAVLGLLEAAGALSPGERRQLDEEAGGAKAELLLKLLLAKERDHFQDLRAALEKTQPHLLPILYLNGVVGPPQPAEGAGSTYSVLSTMPSDSESSSSLSSVGTTGKAPSPPPLLTDQQVNEKVENLSIQLRLMTRERNELRKRLAFATHGTAFDKRPYHRLNPDYERLKIQCVRAMSDLQSLQNQHTNALKRCEEVAKETDFYHTLHSRLLSDQTRLKDDVDMLRRENGQLLRERNLLQQSWEDMKRLHEEDQKEIGDLRAQQQQVLKHNGSSEILNKLYDTAMDKLEVVKKDYDALRKRYSEKVAIHNADLSRLEQLGEENQRLLKQTEMLTQQRDTAIQLQHQCALSLRRFEAIHHELNKATAQNKDLQWEMELLQSELTELRTTQVKTAKESEKYREERDAVYSEYKLIMSERDQVISELDKLQTEVELAESKLKSSTSEKKAANEEMEALRQIKDTVTMDAGRANKEVEILRKQCKALCQELKEALQEADVAKCRRDWAFQERDKIVAERDSIRTLCDNLRRERDRAVSELAEALRSLDDTRKQKNDVSRELKELKEQMESQLEKEARFRQLMAHSSHDSAIDTDSMEWETEVVEFERETEDIDLKALGFDMAEGVNEPCFPGDCGIFVTKVDKGSIADGRLRVNDWLLRINDVDLINKDKKQAIKALLNGEGAINMVVRRRKSLGGKVVTPLHINLSGQKDSGISLENGVYAAAVLPGSPAAKEGSLAVGDRIVAINGIALDNKSLNECESLLRSCQDSLTLSLLKEQKCVPASGELSPELQEWAPYSPGHSSRHSNPPLYPSRPSVGTVPRSLTPSTTVSSILRNPIYTVRSHRVGPCSSPPAARDAGPQGLHPSVQHQGRLSLDLSHRTCSDYSEMRATHGSNSLPSSARLGSSSNLQFKAERIKIPSTPRYPRSVVGSERGSVSHSECSTPPQSPLNIDTLSSCSQSQTSASTLPRIAVNPASLGERRKDRPYVEEPRHVKVQKGSEPLGISIVSGEKGGIYVSKVTVGSIAHQAGLEYGDQLLEFNGINLRSATEQQARLIIGQQCDTITILAQYNPHVHQLSSHSRSSSHLDPAGTHSTLQGSGTTTPEHPSVIDPLMEQDEGPSTPPAKQSSSRIAGDANKKTLEPRVVFIKKSQLELGVHLCGGNLHGVFVAEVEDDSPAKGPDGLVPGDLILEYGSLDVRNKTVEEVYVEMLKPRDGVRLKVQYRPEEFTKAKGLPGDSFYIRALYDRLADVEQELSFKKDDILYVDDTLPQGTFGSWMAWQLDENAQKIQRGQIPSKYVMDQEFSRRLSMSEVKDDNSATKTLSAAARRSFFRRKHKHKRSGSKDGKDLLALDAFSSDSIPLFEDSVSLAYQRVQKVDCTALRPVLILGPLLDVVKEMLVNEAPGKFCRCPLEVMKASQQAIERGVKDCLFVDYKRRSGHFDVTTVASIKEITEKNRHCLLDIAPHAIERLHHMHIYPIVIFIHYKSAKHIKEQRDPIYLRDKVTQRHSKEQFEAAQKLEQEYSRYFTGVIQGGALSSICTQILAMVNQEQNKVLWIPACPL

SEQ ID NO: 296704 - protein, 880 aa, Artificial Sequence
  derived and/or modified sequence
GAINMVVRRRKSLGGKVVTPLHINLSGQKDSGISLENGVYAAAVLPGSPAAKEGSLAVGDRIVAINGIALDNKSLNECESLLRSCQDSLTLSLLKEQKCVPASGELSPELQEWAPYSPGHSSRHSNPPLYPSRPSVGTVPRSLTPSTTVSSILRNPIYTVRSHRVGPCSSPPAARDAGPQGLHPSVQHQGRLSLDLSHRTCSDYSEMRATHGSNSLPSSARLGSSSNLQFKAERIKIPSTPRYPRSVVGSERGSVSHSECSTPPQSPLNIDTLSSCSQSQTSASTLPRIAVNPASLGERRKDRPYVEEPRHVKVQKGSEPLGISIVSGEKGGIYVSKVTVGSIAHQAGLEYGDQLLEFNGINLRSATEQQARLIIGQQCDTITILAQYNPHVHQLSSHSRSSSHLDPAGTHSTLQGSGTTTPEHPSVIDPLMEQDEGPSTPPAKQSSSRIAGDANKKTLEPRVVFIKKSQLELGVHLCGGNLHGVFVAEVEDDSPAKGPDGLVPGDLILEYGSLDVRNKTVEEVYVEMLKPRDGVRLKVQYRPEEFTKAKGLPGDSFYIRALYDRLADVEQELSFKKDDILYVDDTLPQGTFGSWMAWQLDENAQKIQRGQIPSKYVMDQEFSRRLSMSEVKDDNSATKTLSAAARRSFFRRKHKHKRSGSKDGKDLLALDAFSSDSIPLFEDSVSLAYQRVQKVDCTALRPVLILGPLLDVVKEMLVNEAPGKFCRCPLEVMKASQQAIERGVKDCLFVDYKRRSGHFDVTTVASIKEITEKNRHCLLDIAPHAIERLHHMHIYPIVIFIHYKSAKHIKEQRDPIYLRDKVTQRHSKEQFEAAQKLEQEYSRYFTGVIQGGALSSICTQILAMVNQEQNKVLWIPACPL

SEQ ID NO: 296705 - DNA, 4740 bp, Artificial Sequence
  derived and/or modified sequence
atggaaccgcaaaggagagagctactggcacagtgccaacagagcctcgcacaggccatgacggaagtggaagcagttctggggctgttggaagctgcgggagcactcagtccaggagagcggagacagcttgacgaggaggccggcggggctaaggctgaactcctcctgaagcttctgctcgcaaaggaacgggatcactttcaggacctgcgggcagcactggagaaaacgcaaccccatctacttccgatcctctacttgaacggtgtcgtgggccccccccagcccgcagaaggcgctggcagcacctacagtgtgctcagtaccatgccttctgacagcgagagcagctccagtctctccagcgtgggtacgacaggcaaggctccctcccctccacctctccttactgaccagcaagtgaatgagaaagtggaaaatctgtctatccagcttagactcatgacgagggagagaaacgaactgcgaaaacgcctagcctttgctacccatgggaccgcgttcgataaacggccgtatcaccggcttaatccggactacgagcggctgaagatccagtgtgtgagagctatgtcagatctgcaatctttacagaatcagcacaccaacgccctgaagaggtgtgaggaagttgccaaagagacagacttctaccatacacttcactcccggctattatctgatcaaactcggctgaaagatgacgtcgacatgctaaggcgagaaaacgggcagcttctgcgtgagagaaatttgcttcagcagagctgggaagatatgaagcgcctgcacgaggaggatcaaaaggaaatcggcgacctgagagctcagcagcaacaggtgctcaaacataatggatcgtccgagatcttgaacaagctctatgatacagccatggataaattggaggttgtcaagaaggactacgatgcattgcgcaagcggtattctgaaaaagttgcaattcataacgcagatctgagccggctggagcagctaggggaggaaaatcaaaggttgctgaagcagaccgaaatgctgacccagcagcgagacaccgccattcagctacagcatcagtgcgctctctcattgagacggttcgaggcaatccaccatgagttaaacaaagccaccgctcagaacaaggatctgcaatgggagatggaactactgcagagcgagcttacagaactgagaaccacccaagtgaagaccgctaaagaatccgagaagtacagagaagaaagagacgccgtctactcagagtacaagctgatcatgtcagagagagaccaggtaatatctgaattggataagctgcagacggaagtggagctggcagaatcgaagctcaagagctccactagcgaaaagaaggccgccaacgaagagatggaagctctaagacaaatcaaggacactgttaccatggacgctggccgagctaacaaggaggtcgagatcctccgcaaacaatgcaaggcactctgtcaggaattaaaagaagcactgcaggaagccgatgtggctaaatgtagaagggattgggcttttcaggagagagataaaattgtggctgaacgggattccataagaaccctgtgcgacaacctgagacgcgagcgcgatcgagcagtgtctgagcttgctgaggctctcaggtctttggacgacactcgtaaacagaagaatgacgtgtctcgtgagttaaaggagctgaaggagcaaatggaatcccagctagaaaaagaagctaggttccgccagctgatggctcacagcagccacgatagcgcaatcgacacggatagcatggagtgggagaccgaggtggtggagtttgaacgcgagaccgaggatatcgacctcaaggctctcgggtttgacatggccgaaggcgttaacgaaccatgtttccctggtgattgcggtatcttcgtaacaaaagttgataaaggttccatcgcagatggaagactgagagtaaatgattggctgctgcgtatcaacgatgtggacctgattaataaggataaaaaacaggctattaaggctctgctgaatggagagggggctattaatatggtggttcgtcggagaaaatctctgggcggcaaagtcgtgactccactgcacataaacttgtccggtcagaaagattcaggaatttccttggagaatggtgtttatgctgcagctgtacttccagggtcacctgcagccaaggagggctcccttgctgttggcgatagaattgtggctattaatggcatcgccctggacaacaaaagcttgaatgaatgcgagtcattgctgcggagctgtcaagactccttaactctttccctcctcaaagagcagaagtgtgtgcccgcgtccggtgaacttagccccgagctgcaggaatgggctccttactcacccggtcactcttcaagacacagcaatcctcctctgtatccttcccgaccctccgttggcacagttcctaggtcccttactccctcaactaccgtctcaagcatcctccgcaatccaatctacacagtgaggtcgcatagggtaggcccctgtagttcgcctccggcagcccgcgatgccggcccacaaggtctgcaccccagcgtccagcaccaaggaagactgtctctggatctgagtcacagaacttgctccgattattctgagatgagggccacgcatggcagtaatagtctgcccagttccgccaggctgggttcaagttcaaaccttcagtttaaagccgaacggatcaaaatccccagtaccccccgttatcctcgatcagttgtggggtctgaaagaggatccgttagccacagcgagtgctccacacctccgcagagtccactgaatatagataccttgtcatcgtgtagtcaatcacaaaccagcgcgagcacactgccacgaatcgccgtgaatcccgcctctttgggtgagagaaggaaggacagaccctacgtcgaggagcccagacacgttaaagtacaaaagggttccgagcccctgggaataagcattgtgtcaggcgagaaaggcggaatctacgtgtctaaggtgaccgtgggaagcattgcgcatcaggcggggctcgaatatggcgaccagctgttggagttcaacggaattaacctgagaagtgcaaccgagcagcaagccagattgatcataggtcagcagtgcgacaccatcaccattttggcacagtacaatccccatgtacatcagttaagcagtcacagcagatcaagttcccacctcgacccagccggtacacacagtacactccagggtagcggtacaaccacccctgagcatcctagcgtcatcgatccactgatggagcaggacgagggcccttctacacccccagcgaaacagagctcgagtcgcatagccggtgacgctaacaaaaagactctagaacctcgggtggtttttattaaaaaatcccagctggagctgggggtgcacctgtgtggcggcaatcttcacggtgtcttcgttgcagaagtcgaagacgactccccggcaaagggacccgacggccttgtacccggagacctgatcttggaatacggcagcctcgacgtgcgcaataaaacagtcgaggaggtttatgtggagatgctgaagcccagagatggtgttcgcctgaaggtccagtaccggcccgaagagtttacaaaggcgaagggcttaccaggagatagtttctacattagagctctgtatgaccgactcgctgacgtcgagcaagagctgagctttaagaaggatgacatcttgtacgtggatgacacactgccacaggggactttcggttcttggatggcatggcagctggacgagaacgcacagaaaattcagcgaggtcagatcccctctaagtatgtgatggaccaagagtttagcagaaggttgtccatgtctgaggtgaaggatgataacagcgcaaccaaaacattgtctgccgccgcccgacgaagtttcttccgtaggaagcataagcacaagagatcaggaagtaaggacggcaaggacctgctcgctttggacgcatttagttctgactcaattccactttttgaggattccgtgagccttgcttaccagagagtgcagaaggtcgattgtactgcgctgcgccctgttctaatactgggtccattattggatgtcgttaaggaaatgctggtgaacgaggctccaggcaaattctgccggtgtccattggaagtgatgaaagcaagccaacaggccattgagaggggtgtcaaggactgcctatttgtggattataaacgacgaagtggacactttgatgtcacaacggtcgcctcaattaaggagattacggagaaaaatcgccattgtctgttagacatcgcacctcacgccattgaacggcttcatcacatgcatatttatcctattgttattttcatacactacaagtctgcaaagcacatcaaagaacagcgcgatcccatttacctgagggataaggtcacccaaaggcacagtaaagagcaattcgaggctgctcaaaaactcgagcaggaatatagccggtatttcacgggagtgattcaaggcggcgctttgtcatccatctgtactcagattctagccatggtgaaccaggagcaaaacaaggttctgtggattcctgcctgtcctctatag

SEQ ID NO: 296706 - DNA, 2643 bp, Artificial Sequence
  derived and/or modified sequence
ggcgccataaatatggtcgttcgccgacggaagtctctgggcggaaaagtcgtaacaccattgcatatcaacttatccggccaaaaggacagcggcatttcccttgaaaatggtgtctatgcagcggccgtgctgccaggttctcccgccgccaaggaggggagcctggctgtgggtgaccgaatcgtcgcaatcaatggtattgcgctggacaacaagtccttgaatgaatgcgaatcgctgcttcggtcctgtcaggatagtctgacactgtccctcctgaaggagcagaagtgcgtgccggcttccggagaattaagcccagagcttcaagagtgggcaccatacagtcccggtcactccagccggcactctaacccccctctctatccctctcgacctagcgttggcaccgttccccgatcgttgactccttccaccacggtcagctcaattctacgaaatccaatatacaccgtgcgctctcatcgggtgggcccatgctcctcccccccagcggctagggacgctggacctcaaggactgcatccttctgtacagcaccagggtcgcctgtcactcgacctcagccatcgcacatgcagtgactactccgaaatgagggccacccacggcagtaactctctgccatcctcagcacggttgggatccagttcaaacctgcagtttaaggcagaacgtatcaaaattccatcaaccccaaggtacccccgctcagtcgtaggttcagagaggggatccgtctcacatagcgagtgttccaccccgcctcagtcacccctgaacatcgacactctgagtagctgcagccaatcacagacgagtgcgtcgactctgccgcggatcgccgttaatcctgcctcactgggggaacgccgtaaggacaggccgtatgtagaggagcctagacacgtgaaggttcaaaagggaagtgaaccactgggcatctctattgtgagtggcgagaaaggaggcatctatgtgtccaaggtgactgtgggtagcatcgctcatcaggcgggcctggagtacggggaccagttgctggagttcaacggtatcaatcttagaagtgccactgaacagcaagcaagacttatcatcgggcagcagtgcgacactatcacaatcctagcgcagtataatcctcacgtccaccaactttccagtcactcccgatcttcttcccatctggatcctgcaggaacccattcaacgctgcagggcagcggcactacaacaccggagcacccaagcgtgattgatcctctgatggaacaagatgagggtccatccacaccacctgcaaaacagagcagctccaggatcgctggagatgccaacaagaaaactctagaacccagggttgtgttcatcaagaagtcccagctggagctgggagtgcatctatgtggaggaaacctgcatggcgtgttcgtggcggaagtcgaggacgacagtcccgccaaaggccctgatgggctggtgcccggcgatctgatcttggagtacggctcattggatgtgaggaacaagacggtggaggaggtctatgtggagatgctgaagcctcgcgatggcgttcgtcttaaagtacagtataggcccgaagaatttaccaaggccaaaggtctaccgggtgacagcttttacatcagagccctatacgataggctagccgacgtggagcaggaattaagctttaagaaagacgacattctgtacgtagatgataccctgccccagggtacattcgggtcatggatggcttggcagctggacgagaatgcacaaaagatacagaggggacagatcccttcaaaatacgtgatggatcaagaatttagtagaaggctgagcatgtctgaagtcaaggacgacaattctgccacaaaaaccctgtctgccgctgctagaaggtcatttttcaggcgaaagcataaacacaagcgcagcggttcaaaggacgggaaggatctgttagctctggatgctttttcatcagatagcatacctctttttgaggacagcgtatcattagcctaccagagagtccagaaggtggattgcacagcacttaggcccgtgcttattttaggccccctgcttgatgtggtcaaagagatgttggtcaacgaagccccaggaaagttttgccgctgccctttggaggtgatgaaggccagtcaacaggctatcgagagaggtgtcaaagattgcctgttcgtggattacaaacggcgcagtgggcactttgacgttactacggttgccagtatcaaagaaattacagaaaaaaacagacactgccttctcgatattgctccgcacgcaattgaaaggcttcatcatatgcacatttatcctatcgttattttcattcactacaaaagcgctaagcatattaaagagcagagggaccccatttatttgcgggacaaagtgacgcaacgccattcaaaggagcagtttgaggccgctcaaaaactggaacaggaatactcccggtattttacaggggtgatccagggcggcgctctttcttccatatgtactcaaattctcgccatggtcaaccaagaacagaataaggtgctttggattccggcttgtcctttgtag

SEQ ID NO: 296707 - DNA, 4740 bp, Artificial Sequence
  derived and/or modified sequence
atggagccccagaggcgggagctgctggcccagtgccagcagagcctggcccaggccatgacagaggtggaggccgtgctgggcctgctggaggccgccggggccctgagccctggagagcggcggcagctggatgaggaggccggcggggccaaggccgagctgctgctgaagctgctgctggccaaggagcgggaccacttccaggacctgcgggccgccctggagaagacccagccccacctgctgcccatcctgtacctgaatggagtggtgggccccccccagcctgctgagggcgccggcagcacctacagcgtgctgagcaccatgcccagcgacagcgagagcagcagcagcctgagctctgtgggcaccaccgggaaggcccccagccccccacccctgctgacagaccagcaggtgaatgagaaggtggagaacctgagcatccagctgcggctgatgacccgggagagaaatgagctgaggaagaggctggcctttgccacccacggcacagcctttgacaagaggccctaccaccggctgaacccagactatgaaaggctgaagatccagtgtgtgcgggccatgtctgacctgcagagcctgcagaaccagcacaccaatgccctgaagagatgtgaggaggtggccaaggagacagacttctaccacaccctgcacagccggctgctgagtgaccagacccggctgaaggatgatgtggacatgctgcggcgggagaatggccagctgctgcgggagaggaacctgctgcagcagagctgggaggacatgaagaggctgcacgaggaggaccagaaggagattggagacctgcgggcccagcagcagcaggtgctgaagcacaacggcagcagcgagatcctgaacaagctgtatgacacagccatggacaagctggaggtggtgaagaaggactatgatgccctgaggaagcgctacagcgagaaggtggccatccacaatgctgacctgagccggctggagcagctgggggaggagaaccagaggctgctgaagcagacagagatgctgacccagcagagggacacagccatccagctgcagcaccagtgtgccctgagcctgcggagatttgaggccatccaccacgagctgaacaaggccacagcccagaacaaggacctgcagtgggagatggagctgctgcagagcgagctgacagagctgcggaccacccaggtgaagacagccaaggagagcgagaagtaccgggaggagagagatgctgtgtacagcgagtacaagctgatcatgtctgagcgggaccaggtgatcagcgagctggacaagctgcagacagaggtggagctggccgagagcaagctgaagagcagcaccagcgagaagaaggccgccaatgaggagatggaggccctgcggcagatcaaggacacagtgaccatggatgctggccgggccaacaaggaggtggagatcctgaggaagcagtgcaaggccctgtgccaggagctgaaggaggccctgcaggaggctgatgtggccaagtgccggcgggactgggccttccaggagcgggacaagatcgtggccgagcgggacagcatccgcaccctgtgtgacaacctgcggcgggagcgggacagagctgtgtctgagctggccgaggccctgcggagcctggatgacaccaggaagcagaagaatgatgtgtcccgggagctgaaggagctgaaggagcagatggagagccagctggagaaggaggcccgcttccggcagctgatggcccacagcagccatgattctgccatcgacacagacagcatggagtgggagacagaggtggtggagtttgagcgggagacagaggacatcgacctgaaggccctgggctttgacatggccgagggcgtgaatgagccctgcttccctggggactgtggcatctttgtgaccaaggtggacaagggcagcattgctgatggccgcctgcgggtgaatgactggctgctgcgcatcaatgatgtggacctgatcaacaaggacaagaagcaggccatcaaggccctgctgaatggagagggcgccatcaacatggtggtgagaagaaggaagagcctgggcggcaaggtggtgacccccctgcacatcaacctgagcggccagaaggacagcggcatcagcctggagaatggagtgtatgctgctgctgtgctgcccggcagccctgctgccaaggagggcagcctggccgtgggggacagaattgtggccatcaatggaattgccctggacaacaagagcctgaatgaatgtgagagcctgctgcggagctgccaggacagcctgaccctgagcctgctgaaggagcagaagtgtgtgcctgccagcggggagctgagccctgagctgcaggagtgggccccctacagccctggccacagcagccgccacagcaacccccccctgtaccccagccggcccagcgtgggcaccgtgcccaggagcctgacccccagcaccaccgtgagcagcatcctgaggaaccccatctacacagtgcgcagccaccgggtgggcccctgcagcagccccccagctgccagagatgctggcccccagggcctgcaccccagcgtgcagcaccagggccgcctgagcctggacctgagccacaggacctgcagcgactacagcgagatgagggccacccacggcagcaacagcctgcccagcagcgcccggctgggcagcagcagcaacctgcagttcaaggccgagcgcatcaagatccccagcaccccccgctaccccaggtctgtggtgggcagcgagcggggctctgtgagccacagcgagtgcagcaccccaccccagagccccctgaacatcgacaccctgagcagctgcagccagagccagaccagcgccagcaccctgcccagaattgctgtgaacccagccagcctgggggagaggaggaaggaccggccctacgtggaggagcccaggcatgtgaaggtgcagaagggcagcgagcccctgggcatcagcatcgtgtctggagagaagggcggcatctacgtgtccaaggtgacagtgggcagcatcgcccaccaggccggcctggagtatggagaccagctgctggagttcaacggcatcaacctgcggagcgccacagagcagcaggcccggctcatcatcggccagcagtgtgacaccatcaccatcctggcccagtacaacccccacgtgcaccagctgagcagccacagccgcagcagcagccacctggaccctgctggcacccacagcaccctgcagggcagcggcaccaccaccccagagcaccccagcgtgattgaccccctgatggagcaggatgagggccccagcaccccaccagccaagcagagcagcagcagaattgctggagatgccaacaagaagaccctggagccccgggtggtgttcatcaagaagagccagctggagctgggcgtgcacctgtgtggcggcaacctgcacggcgtgtttgtggccgaggtggaggatgacagccctgccaagggcccagatggcctggtgcctggggacctgatcctggagtatggcagcctggatgtgaggaacaagacagtggaggaggtgtatgtggagatgctgaagcccagagatggagtgcggctgaaggtgcagtacagacctgaggagttcaccaaggccaagggcctgcccggggacagcttctacatccgggccctgtatgaccggctggctgatgtggagcaggagctgtccttcaagaaggatgacatcctgtatgtggatgacaccctgccccagggcaccttcggctcctggatggcctggcagctggatgaaaatgcccagaagatccagaggggccagatccccagcaaatatgtgatggaccaggagttcagccggcggctgtccatgtctgaggtgaaggatgacaacagcgccaccaagaccctgtctgctgctgcccggcgctccttcttccggaggaagcacaagcacaagaggagcggcagcaaggatggcaaggacctgctggccctggatgccttcagcagtgacagcatccccctgtttgaagattctgtgtccctggcctaccagagggtgcagaaggtggactgcacagccctgcggcctgtgctgatcctgggccccctgctggatgtggtgaaggagatgctggtgaatgaggcccctgggaagttctgccgctgccccctggaggtgatgaaggccagccagcaggccatcgagcggggcgtgaaggactgcctgtttgtggactacaagagaagaagtggccactttgatgtgaccaccgtggccagcatcaaggagatcacagagaagaacagacactgcctgctggacatcgcccctcatgccatcgagcggctgcaccacatgcacatctaccccatcgtcatcttcatccactacaagagcgccaagcacatcaaggagcagagggaccccatctacctgcgggacaaggtgacccagaggcacagcaaggagcagtttgaggccgcccagaagctggagcaggagtacagccgctacttcaccggggtcatccagggcggggccctgagcagcatctgcacccagatcctggccatggtgaaccaggagcagaacaaggtgctgtggatcccagcctgccccctgtag

SEQ ID NO: 296708 - DNA, 2643 bp, Artificial Sequence
  derived and/or modified sequence
ggggccatcaacatggtggtgagaagaaggaagagcctgggcggcaaggtggtgacccccctgcacatcaacctgagcggccagaaggacagcggcatcagcctggagaatggagtgtatgctgctgctgtgctgcccggcagccctgctgccaaggagggcagcctggccgtgggggaccgcatcgtggccatcaatggcatcgccctggacaacaagagcctgaatgaatgtgagagcctgctgcggagctgccaggacagcctgaccctgagcctgctgaaggagcagaagtgtgtgcctgccagcggggagctgagccctgagctgcaggagtgggccccctacagccctggccacagcagccgccacagcaacccccccctgtaccccagccggcccagcgtgggcaccgtgcccaggagcctgacccccagcaccaccgtgagcagcatcctgaggaaccccatctacacagtgcgcagccaccgggtgggcccctgcagcagccccccagctgccagagatgctggcccccagggcctgcaccccagcgtgcagcaccagggccgcctgagcctggacctgagccacaggacctgcagcgactacagcgagatgagggccacccacggcagcaacagcctgcccagcagcgcccggctgggcagcagcagcaacctgcagttcaaggccgagcgcatcaagatccccagcaccccccgctaccccaggtctgtggtgggcagcgagcggggctctgtgagccacagtgaatgttccaccccaccccagagccccctgaacatcgacaccctgagcagctgcagccagagccagaccagcgccagcaccctgcccagaattgctgtgaacccagccagcctgggggagaggaggaaggaccggccctacgtggaggagcccaggcatgtgaaggtgcagaagggcagcgagcccctgggcatcagcatcgtgtctggagagaagggcggcatctacgtgtccaaggtgacagtgggcagcatcgcccaccaggccggcctggagtatggagaccagctgctggagttcaacggcatcaacctgcggagcgccacagagcagcaggcccggctcatcatcggccagcagtgtgacaccatcaccatcctggcccagtacaacccccacgtgcaccagctgagcagccacagccgcagcagcagccacctggaccctgctggcacccacagcaccctgcagggcagcggcaccaccaccccagagcaccccagcgtcatcgaccccctgatggagcaggatgagggccccagcaccccaccagccaagcagagcagcagcagaattgctggagatgccaacaagaagaccctggagccccgggtggtgttcatcaagaagagccagctggagctgggcgtgcacctgtgtggcggcaacctgcatggagtgtttgtggccgaggtggaggatgacagccctgccaagggcccagatggcctggtgcctggggacctgatcctggagtatggcagcctggatgtgaggaacaagacagtggaggaggtgtatgtggagatgctgaagcccagagatggagtgcggctgaaggtgcagtacagacctgaggagttcaccaaggccaagggcctgcccggggacagcttctacatccgggccctgtatgaccggctggctgatgtggagcaggagctgtccttcaagaaggatgacatcctgtatgtggatgacaccctgccccagggcaccttcggctcctggatggcctggcagctggatgaaaatgcccagaagatccagaggggccagatccccagcaaatatgtgatggaccaggagttcagccggcggctgtccatgtctgaggtgaaggatgacaacagcgccaccaagaccctgtctgctgctgcccggcgctccttcttccggaggaagcacaagcacaagaggagcggcagcaaggatggcaaggacctgctggccctggatgccttcagcagtgacagcatccccctgtttgaggacagcgtgtccctggcctaccagagggtgcagaaggtggactgcacagccctgcggcctgtgctgatcctgggccccctgctggatgtggtgaaggagatgctggtgaatgaggcccctgggaagttctgccgctgccccctggaggtgatgaaggccagccagcaggccatcgagcggggcgtgaaggactgcctgtttgtggactacaagaggaggagcggccactttgatgtgaccaccgtggccagcatcaaggagatcacagagaagaacagacactgcctgctggacatcgccccccacgccatcgagcggctgcaccacatgcacatctaccccatcgtcatcttcatccactacaagagcgccaagcacatcaaggagcagagggaccccatctacctgcgggacaaggtgacccagaggcacagcaaggagcagtttgaagctgcccagaagctggagcaggagtacagccgctacttcaccggggtcatccagggcggggccctgagcagcatctgcacccagatcctggccatggtgaaccaggagcagaacaaggtgctgtggatcccagcctgccccctgtag

SEQ ID NO: 296709 - DNA, 4740 bp, Artificial Sequence
  derived and/or modified sequence
atggagccccagcggcgggagctgctggcccagtgccagcagagcctggctcaggctatgacggaagtggaagcagtccttggtctcctcgaagcagccggtgcactcagccccggggagcgcaggcagctagacgaggaagctggtggggccaaagcagagctgctcctcaaactattgttagctaaggaacgtgatcactttcaggacctcagggccgctttggagaagacccagcctcatttgctcccaatactgtatctgaatggtgtcgtgggaccgcctcagcctgccgaaggtgccgggagtacctattccgtgctctcaaccatgccatcagacagcgaatcttcttcctctttatcatccgtcgggacaacgggcaaggcccccagcccgcccccgctgctcactgaccagcaggtgaatgagaaagttgagaacttaagtattcagttgaggctgatgacaagagagagaaacgagttgaggaagagattggcctttgcaacacacggaactgcctttgataaacggccctaccatagattgaatcctgactatgaaagactgaaaattcagtgcgtacgggcaatgagcgacttgcagtcattgcagaaccagcacacgaatgcgctcaagcgctgcgaggaagtagccaaggagaccgatttttaccacacactgcattctcgcctcctgagtgaccagaccagactgaaggacgacgtggatatgctgcggcgggagaatggccagctgctgcgcgaacgcaacctgcttcagcaatcctgggaggacatgaagagactacacgaagaagaccagaaggagattggagatctgcgggctcaacagcagcaggtcctcaagcataacgggtcatctgaaatactcaacaagctctatgacacagctatggataagttggaagtcgtcaagaaggactacgatgccctaaggaagcgttacagcgagaaggttgctatccataacgcagacctgtcccggctggaacagcttggtgaggagaaccagcgcctcctcaagcagacagagatgctgacacagcagagggatacagctattcagctgcaacaccagtgtgcgctgtctttaagacgctttgaagccattcaccacgaactgaacaaggccactgcgcagaataaggacctgcagtgggaaatggaactgttacagtcagagctgaccgaactgagaactacacaggtaaagaccgccaaagagtcagagaaatatcgtgaggaacgagacgctgtgtatagcgagtataaactgatcatgtctgaaagagatcaggtgattagcgaattagataaactgcagactgaagtggagcttgcagagtcaaaacttaaatcttccacttccgagaaaaaagccgctaacgaggagatggaagccctgcggcagattaaagacaccgtaacaatggatgcaggacgagccaacaaggaagtggagatattgcggaagcagtgtaaggccctctgccaggaactcaaagaagcgttgcaggaggcggatgttgccaagtgccgacgtgactgggcttttcaggagcgggataaaatcgtggctgagcgcgactctatccggactctctgtgacaacttgcgtcgggaacgtgatcgcgcagtatccgaacttgctgaggcactcagaagtctggatgatactagaaagcagaagaatgacgtgtctagagaactgaaggagctcaaggagcaaatggagtctcagctcgaaaaagaggcgcggttccgtcagctcatggctcactcttctcatgactccgccattgataccgatagtatggagtgggagactgaggtcgttgagttcgaaagggagactgaagacatcgacttgaaagcactggggtttgatatggcagagggcgtgaatgagccatgtttccccggcgactgcgggatctttgtaacaaaagtggataagggcagtatagcggatggacgcttacgagtgaatgactggctcctgcggatcaatgacgtggaccttattaacaaggacaagaaacaggccatcaaagcactgttgaacggtgagggcgccataaatatggtcgtgagaagacgcaagtcactgggtggtaaagtcgttacaccattacacataaatctttccgggcaaaaggattctggcatatccctggagaatggcgtctacgcagcagctgtgctgcctggttcccctgccgccaaggaaggctccttagccgtcggagatcggatcgtggccatcaacggaatcgctttggacaataagtctctgaacgagtgtgaatccctgctcaggtcctgtcaagacagtcttactctttctttattgaaggaacagaaatgtgtgccagcatcaggcgagctctcccccgaactgcaggaatgggccccatactcgccaggccattcaagtaggcactcgaatccaccactatacccgtcccgaccttctgtgggaactgtgcctcgtagtctgactcccagtacaacggtgtcctccattctgaggaacccgatttacactgtaaggagccatcgtgtaggcccttgttcatcaccccctgccgccagggatgccggcccacaaggccttcaccccagtgtgcaacaccagggccgcttgtctttagatctttcacacaggacctgttccgattattccgagatgagggctacccatgggtctaatagcctgcctagctcagcccggcttggctcctctagcaaccttcagtttaaagcagagcgaatcaaaatccctagtactccacggtaccctagatccgtggtgggcagcgagcgcggtagtgtttcccatagcgaatgctccaccccacctcaaagcccgctcaacatcgacacactgagctcctgcagccaatctcagacttcagccagcacactgcccagaattgccgtgaatccggcttctttgggcgagcgcagaaaggaccgcccatatgtggaagagcctcgccatgtgaaggtgcagaagggtagcgagcccttggggatctccatagtgtcaggcgagaaagggggaatctatgtgtcaaaagttaccgtgggcagtatcgctcaccaggccgggctggagtacggggaccagcttctggagtttaatggcattaacttacgctcagctaccgagcagcaggccaggctgattatcggccaacagtgcgatactatcacgattctggcacagtacaacccacacgtccatcagctgtcgtcacactcccgctcaagttctcatctggacccagcaggcacccattctactctgcaggggtcaggcacgacaacacctgagcatcccagcgtcatcgacccattaatggagcaggatgaaggcccaagcacaccaccagctaagcagagctccagtcgcatagccggggacgcgaataaaaaaactctagagccaagagtcgtttttataaagaagtcacagctggagctaggcgtccacctgtgcggaggcaatttacatggcgtgttcgttgctgaagtggaagatgattctccagccaaaggccccgacggcctcgtaccaggtgacctgatactggagtacggatcattagatgtgagaaataagacagtggaggaggtctatgtcgagatgctaaaacctagagatggggtacggctgaaagttcagtatcgcccagaggagttcactaaagccaaaggactgcccggcgattccttctatattagagccttgtacgaccgactggctgatgtagaacaggagctatcgttcaagaaagatgatatactgtacgttgatgacactctgccccagggaacttttgggagttggatggcctggcagttagatgagaatgcacagaaaatccagaggggtcaaatccctagcaagtatgttatggaccaggaattcagccgccgcctcagcatgtcagaggttaaagatgacaatagtgctactaaaacactgagcgccgcagctcgtagaagtttcttccgccggaagcacaagcataagcgaagcggctcaaaagatggtaaggacctgctggcattggacgctttctcgagtgactcaatacccttattcgaggactcagtgagcctggcctaccagcgcgtacaaaaggtggattgtacagccctcaggccggtgctgatcctgggcccgctgcttgatgttgtcaaagagatgctcgtgaacgaggctccaggaaagttctgccgatgccctctggaggtgatgaaggcctcccagcaggcaattgaacgtggagtcaaggattgtctgttcgtggactataagcgtaggtccggtcatttcgatgtcaccacagttgcatccattaaggaaataaccgagaaaaaccgccactgcctgctagacattgcaccccacgctatcgagcgcttgcaccatatgcatatctaccccatagtgatttttattcattacaagagcgccaagcacattaaagaacagcgcgatccaatctatttgcgcgataaggtaactcagaggcacagcaaggagcagttcgaagcggctcaaaagctggagcaggaatactccaggtacttcactggcgttattcaagggggggctctgagtagcatctgtacccagatccttgctatggtcaaccaggagcagaataaggtgctgtggatccctgcgtgccctctgtag

SEQ ID NO: 296710 - DNA, 2643 bp, Artificial Sequence
  derived and/or modified sequence
ggcgccatcaacatggtggtgcggcggcggaagagcctgggcggcaaggtggtcaccccacttcacatcaacctgtctgggcagaaggatagcggaatatccctggagaacggggtctatgccgccgccgtcctgcctggcagtcctgctgccaaggaagggtcccttgccgtgggagatcggattgtagcaataaatgggattgcactggacaataagtcccttaatgagtgcgaaagcttattacgcagctgtcaggacagcctgacgttatccctgctgaaagaacagaaatgtgtcccagccagtggcgagttatcacccgaactgcaggagtgggcaccttattctcctggacatagcagccgccattcaaaccctcctctttatccaagtcgcccttcagtcggtacagtgccacggtccctgacccccagcacaaccgtatccagtatacttcgaaaccccatttataccgttcggtcccatcgtgtcggcccctgctcaagcccgcctgcagccagggacgctgggccccagggattacatccatccgtacagcaccagggacgtctgtccctcgacctgtcccatagaacatgttccgactatagcgagatgcgcgcaacacacggctctaactctttgccatcctcagctagactcggatcaagctccaatctgcagtttaaggccgaacgcattaagattcccagcacaccccgatacccgagaagcgtggtcggatctgaaagaggatctgtgtcccacagcgaatgttctacccccccacagagtccccttaacattgatacactctcctcttgcagccaaagccagacgagtgcttctactcttccgagaatcgcagtcaatcccgcatcgctgggagagcgcaggaaagatagaccgtacgttgaggaacctaggcacgtgaaggtacagaaggggagtgaaccactgggcatctcaatcgtcagtggagagaagggagggatttacgtgtctaaggttactgttgggtctattgctcaccaagccggcctcgaatacggcgaccagttgctggaattcaatggcattaatcttcgatctgccaccgagcagcaagctagactgatcattggacagcagtgtgacactatcaccatactcgcacagtataacccacacgtccaccagctgagttcgcacagtcggtcgagctctcatctggacccggcgggcacgcactctacactgcaaggatctgggactacgactccagaacaccccagcgtgatcgatcccttgatggaacaagacgagggacccagtacccctccagccaaacagtcttcctctcgcattgccggcgacgctaacaagaaaacattggaaccaagggtcgtgttcataaagaagagtcagctcgagctcggggtgcacctgtgtggggggaacctgcatggggtgttcgtggcagaggtggaggacgattcccccgccaaggggcctgatggcttggtgccgggagatctgatccttgagtacggaagtctcgatgtgcggaataaaacggtggaagaggtatacgtggagatgctgaaaccccgcgacggggtcaggttgaaggtccagtatcggccagaagaattcactaaagcaaagggacttcccggcgactcattctacataagagccttgtatgacagactggcggatgttgaacaagagttgtcattcaagaaggacgacattttgtatgttgatgacactctcccgcagggcacctttggctcctggatggcctggcagctggacgagaacgcgcaaaagatacaacggggacagatcccttccaaatacgttatggaccaggagttcagcaggagactcagcatgtccgaagtgaaagatgacaactccgctactaagaccctctccgccgccgcccgcaggagcttcttcaggcggaagcacaagcataagaggtccggcagtaaagatggaaaagacctgcttgcactggatgcattctcgtccgattccattccattgtttgaagactctgtatcactagcataccagagggtccagaaggtggactgtacagccctgcggcctgtcctgatactgggccccctgttggatgtagtgaaggagatgctcgtcaacgaagcaccggggaagttctgtagatgcccactcgaggtgatgaaagccagccagcaggcaattgagagaggggttaaggattgcctgttcgttgattataagcgtcgttctggtcacttcgatgtgaccacagttgcttccatcaaagaaattaccgagaagaacagacactgtctgctggacatcgccccccatgccatagagcgtttgcaccacatgcatatttaccctattgtcatctttatccactacaagtctgcaaagcacattaaggagcaacgtgatccgatatatctacgggataaagttactcaaagacactccaaggaacagttcgaggctgcgcagaagctggagcaggaatattcccggtatttcaccggcgtcatacagggaggggcactctctagtatctgtacccaaattttggcaatggtgaatcaagagcagaacaaagtgctgtggatccccgcctgcccactgtag

SEQ ID NO: 296711 - DNA, 4740 bp, Artificial Sequence
  derived and/or modified sequence
atggagccccagaggagggagctgcttgcacagtgccagcaaagcctcgcgcaggccatgaccgaagtggaggcggtgctcgggttattggaggccgctggggctctctctccaggagagcgcaggcagttggacgaggaagctggcggagccaaagctgagctcctgctcaaactcctcctggcaaaagagcgggaccattttcaggacctgcgggctgccctggaaaaaacccagcctcacctgctgcccatcctctatttgaatggcgtcgtgggaccaccgcagccggcagagggtgctgggtcaacttactctgttctgagtaccatgccaagcgacagcgaatcatcctctagtttgagctccgtgggtaccaccggcaaggcccctagccctccccctctgttaaccgatcagcaggttaatgaaaaagtcgagaacctttccattcaactccgtttgatgacacgcgaaagaaatgagttgcggaaacgtctggcttttgctacccacggcactgcatttgataagcgcccataccacagactcaatcccgattatgagaggttgaagatccaatgcgtacgagccatgtctgacctgcagagtcttcagaatcagcatacaaatgcgctgaagagatgcgaagaagtggctaaggagacggacttttatcacactctgcactcccgcctgctgagtgaccagacaaggctcaaagatgacgtggacatgctacgacgggagaacgggcaattgctgcgggaacggaatctgttgcagcaaagttgggaagatatgaaaaggctccacgaagaagatcagaaggagatcggagatctccgtgcacagcagcaacaagtgttgaaacataacggctcctccgaaattctcaacaagctgtacgacaccgccatggacaaactcgaggtggtgaaaaaagattatgacgccctgcggaagcgatacagcgagaaagtggccatccacaatgccgacttgagtcgcctggagcagctgggggaggaaaatcaaagactcttgaagcagacagaaatgctgacccagcagagggataccgcaatccagctccagcatcaatgcgctctgtctctgcgcaggtttgaggccattcaccacgagctgaataaagccactgcacaaaacaaggatttgcaatgggagatggagctgctgcagtctgaattgaccgagctgcggaccactcaggtgaaaaccgcaaaagagtccgagaagtatagggaggaaagggatgccgtgtatagtgagtataagctgatcatgtcagaaagagatcaggttataagcgagttggataagctgcaaaccgaagtggagctcgcagaatcgaagctgaagagcagcacaagtgagaagaaggcagcaaacgaggagatggaagcactgaggcagataaaggacaccgtgactatggacgctgggagggctaataaagaggtggaaatcctcaggaaacagtgcaaggccctctgtcaagaacttaaagaagcactgcaagaggctgatgtcgcaaaatgccggcgagattgggcatttcaggagagggacaaaattgtggccgagcgcgattccattcgcactctatgcgacaacctgcgccgagaacgagaccgggcagtttctgagctagctgaggctttaagatccctcgatgacactcggaaacaaaagaacgatgtgtctagagaactgaaagaactcaaagaacagatggaatcacagttggaaaaagaagccaggtttcgccaattaatggctcacagttctcacgacagtgctatcgataccgacagcatggaatgggaaaccgaagtcgtggagttcgagagggagaccgaggacatagatttgaaagctctgggattcgacatggccgaaggcgtaaacgaaccatgctttcccggagactgcgggatcttcgtgacaaaggtggacaaagggtcaattgctgatgggcgactccgggtcaatgattggctactgcgtataaatgacgttgatcttattaataaagataagaaacaggcaataaaggcacttttgaatggagagggagccattaatatggttgtcaggcgcagaaagtccctgggaggtaaggttgtcaccccactgcatatcaatctgtcaggacaaaaggactcaggtatttctctggagaacggtgtgtacgcagcagccgttctccctggatcgcctgccgctaaagaaggctctcttgctgtgggcgaccgaatagttgctatcaacggaatcgcactggataacaaatccttaaatgagtgtgaatctcttcttcggtcctgccaagactctctaaccttgtccctgctgaaagaacaaaaatgcgtgcctgcatctggtgaactgtcccctgaactgcaggaatgggccccatattcccctggccacagctcccggcactctaatcctcctctgtatcccagcaggcctagcgtgggcacggtacccaggagtttgactccgtctaccactgtctctagtatcttgcgcaatccaatatacacagtgcggagccacagggtcggtccctgctcaagtcctcctgcagccagggatgctggacctcaaggtctccacccatcagttcagcatcagggcagactatcactggatctttctcacagaacttgttccgactattctgaaatgagagccactcatgggagcaattccttgccttcatcggcaaggctaggctctagttcaaatctgcagttcaaggcagaaaggataaaaattccaagcaccccgagatatccccgttcggtggtcggcagtgagagggggagtgtgtcccactccgagtgcagcactcctccccagtctccattaaatatcgacaccctgtcttcttgttcacagtcacagacatctgctagtacgctgcctaggatagcggttaaccccgcttcgcttggggagcgtcggaaggatagaccgtatgtagaagaaccccgacacgttaaggtgcaaaagggatctgagcctctggggatctctattgtcagtggcgagaaggggggtatctacgtttctaaagtgacagttggctctatcgcgcaccaggcgggacttgaatatggcgaccaactccttgagtttaatggcataaacctgagatctgccacggagcagcaggcccgactgattataggtcagcagtgtgatactatcactattttagcacagtacaatcctcacgtgcatcaattaagttcccactcacgttcctcatctcatctggaccctgctggcacacactctaccctgcagggcagtggcactactactcctgagcatccatctgtcatcgatccactgatggaacaggacgaaggtccatctacccccccagccaagcagtcaagctccaggatcgcgggtgatgccaacaaaaaaaccctggagcctcgggtcgtgtttataaagaagagccagctggaactcggggtgcacctctgcgggggaaatttgcatggggttttcgttgctgaagtcgaagacgattcccccgctaaggggccagacggacttgtgccaggagatttaatactagagtacgggtcactggatgtgcgcaacaagaccgtagaggaggtgtacgttgagatgctgaaaccccgagatggtgtaaggctgaaggtgcaatatcgacccgaggaattcacgaaagccaagggactgccaggcgactcattctacattcgggcactgtacgatagactagctgatgtggaacaggaactatcattcaaaaaggacgatattctgtacgtggacgacacgttaccacagggtacttttggatcgtggatggcttggcaactggatgagaatgcacagaagatccagagaggtcagatacccagcaaatacgtcatggaccaggaattctctcgaagactgtccatgagcgaggtgaaagatgataacagcgcgaccaaaactctctcagcagctgctcgcaggtcttttttccgacgtaagcataaacacaaacgttcaggctctaaggacggcaaagaccttctggccctggatgccttcagcagcgatagcatccccttgttcgaggactccgtgtcattggcttatcaacgagttcagaaggtggactgtacggccctccgccctgtgctcatcctggggcctctgctcgacgtcgtgaaggagatgctggtcaacgaggctccgggaaagttttgtagatgtccattggaagtgatgaaagcttcccagcaggccatcgaaaggggtgtcaaagattgtctatttgtggactacaaacgcaggtctggtcactttgacgtcaccactgttgcatctatcaaagaaattacagaaaagaacaggcattgtctccttgacatcgcaccccatgcaattgaacgacttcaccacatgcacatttatcccatagttatctttatccattacaagtcagccaagcatatcaaggagcagcgagatccaatctacttgagagataaagtaacccagagacatagcaaagagcagttcgaagccgctcagaaactagaacaggaatattcccgctacttcaccggcgttatccaaggaggtgccctgagctcaatttgcacgcaaatccttgccatggtgaatcaggaacagaacaaagtcctgtggattcctgcatgccctctctag

SEQ ID NO: 296712 - DNA, 2643 bp, Artificial Sequence
  derived and/or modified sequence
ggcgcaatcaatatggtggttcgcaggaggaaatccttgggcggtaaagttgtgaccccactccacatcaacctttcagggcagaaggattcagggatctctctcgagaacggcgtttatgccgctgcggtgctgccaggaagccccgcagcgaaggaaggcagcttagcagttggcgaccggatcgtggccatcaacggcatcgccctcgataacaagtcactcaacgaatgcgagtctctgttgaggtcttgtcaggattcactgacactgagcttgctgaaagaacagaagtgtgtgccggcttcaggagagctatcccccgagctgcaggaatgggccccttatagtccaggccattcttcacgtcacagcaacccgcctctttatcctagcaggccatccgtgggtacggtccctcgctcactgacgccttcaacaacagtctcaagcatactcagaaaccctatatatactgtcaggtcacaccgggtgggaccatgctcaagccccccagcagcaagggacgccggaccccaggggctccacccctcagtgcagcatcaaggccgtctgtccctggacctgtcccaccgaacatgcagcgactattccgaaatgagagccacacacggatcgaatagcctccccagttccgcaagactcgggtctagctccaatctccagttcaaggccgagcggataaaaataccaagcactcccaggtacccgaggagtgtggtgggaagcgaaaggggaagtgtgagccactccgagtgctctacacccccacagagccctctcaatattgataccctgtcctcttgttcccagtctcagacctccgcctccacactgccgaggatagcagtgaaccctgcctccctgggcgaacgacgcaaagaccggccttacgtcgaagagccaaggcacgtaaaggtgcagaaaggctcagagcccctcgggatttcgatcgtgtctggcgagaagggcggaatctatgtctctaaggtaacagtcggctccatcgcccatcaggccggactggagtatggggaccagctcctggagttcaatggaattaacctgcgctcagccactgaacaacaggcacgactgattatagggcagcaatgcgatacaataacgattctagctcagtacaaccctcacgtgcatcagttgtctagtcacagtaggtcttcaagtcatctggacccagccggaacacactccaccttgcaaggaagcgggacaactacaccagaacaccccagtgtcattgaccccctcatggaacaggatgagggaccatccactccacccgctaaacagagctcctcaagaatcgccggagatgccaataagaagactctggaacctcgggttgtttttatcaaaaagagccagttagaactgggagtccacttatgcggaggaaatctgcatggggtgttcgtcgccgaggtggaggacgattcaccagcaaaaggaccagacggacttgtgccaggagacttgatcctggagtatgggtctttggatgtaaggaataagacagtcgaggaagtctatgtggagatgctgaaacccagggatggagtcaggctgaaggtccagtaccgcccagaagagtttactaaggcaaaaggtctgcccggtgacagcttctacatccgagccctttacgaccgtctcgccgacgtggaacaggagctgtcttttaaaaaggatgacatcctgtacgtagacgacacactgcctcaggggacatttgggtcctggatggcttggcagctcgatgagaacgcacagaaaatacagaggggtcagattccctccaaatacgtcatggaccaagagttctcgaggcggctcagcatgagtgaggtgaaggacgacaatagtgccactaaaaccctgagtgctgccgcacgaagatctttttttcggcgaaagcacaagcacaagcgcagcggaagtaaagatggtaaggatctccttgctctcgatgcgtttagttcagatagtattcctctatttgaggactccgtctcccttgcatatcagcgggtgcagaaagtcgattgtactgctttgcgtcccgtgctaatcctcggacctctcctcgacgtggtgaaagagatgttggtgaatgaggcgccaggcaaattttgtaggtgccctctggaagtgatgaaggcctcccagcaggccatcgaaaggggggtcaaggactgcctgttcgtggattataaaaggagatcaggccacttcgatgtgaccacggttgcaagcatcaaggaaattactgaaaaaaatcgtcactgtctgcttgatattgcaccacatgccattgaaagactgcaccatatgcatatttatccaatagtgatctttatccactataagtcagcaaaacacataaaggaacagcgggaccccatctacctgcgggacaaggtcacgcagcgtcactccaaagagcagttcgaagccgctcaaaagctggagcaggagtacagccgctactttactggggttatacaggggggtgctctttcatctatctgcacacaaattctggcgatggtgaatcaggagcagaataaagtcctttggatcccggcttgtcctctgtag

SEQ ID NO: 296713 - DNA, 4740 bp, Artificial Sequence
  derived and/or modified sequence
atggagccccagagaagagagctgctggcccagtgccagcagagcctggcccaggccatgaccgaggtggaggccgtgctgggcctgctggaggccgccggcgccctgagccccggcgagagaagacagctggacgaggaggccggcggcgccaaggccgagctgctgctgaagctgctgctggccaaggagagagaccacttccaggacctgagagccgccctggagaagacccagccccacctgctgcccatcctgtacctgaacggcgtggtgggccccccccagcccgccgagggcgccggcagcacctacagcgtgctgagcaccatgcccagcgacagcgagagcagcagcagcctgagcagcgtgggcaccaccggcaaggcccccagccccccccccctgctgaccgaccagcaggtgaacgagaaggtggagaacctgagcatccagctgagactgatgaccagagagagaaacgagctgagaaagagactggccttcgccacccacggcaccgccttcgacaagagaccctaccacagactgaaccccgactacgagagactgaagatccagtgcgtgagagccatgagcgacctgcagagcctgcagaaccagcacaccaacgccctgaagagatgcgaggaggtggccaaggagaccgacttctaccacaccctgcacagcagactgctgagcgaccagaccagactgaaggacgacgtggacatgctgagaagagagaacggccagctgctgagagagagaaacctgctgcagcagagctgggaggacatgaagagactgcacgaggaggaccagaaggagatcggcgacctgagagcccagcagcagcaggtgctgaagcacaacggcagcagcgagatcctgaacaagctgtacgacaccgccatggacaagctggaggtggtgaagaaggactacgacgccctgagaaagagatacagcgagaaggtggccatccacaacgccgacctgagcagactggagcagctgggcgaggagaaccagagactgctgaagcagaccgagatgctgacccagcagagagacaccgccatccagctgcagcaccagtgcgccctgagcctgagaagattcgaggccatccaccacgagctgaacaaggccaccgcccagaacaaggacctgcagtgggagatggagctgctgcagagcgagctgaccgagctgagaaccacccaggtgaagaccgccaaggagagcgagaagtacagagaggagagagacgccgtgtacagcgagtacaagctgatcatgagcgagagagaccaggtgatcagcgagctggacaagctgcagaccgaggtggagctggccgagagcaagctgaagagcagcaccagcgagaagaaggccgccaacgaggagatggaggccctgagacagatcaaggacaccgtgaccatggacgccggcagagccaacaaggaggtggagatcctgagaaagcagtgcaaggccctgtgccaggagctgaaggaggccctgcaggaggccgacgtggccaagtgcagaagagactgggccttccaggagagagacaagatcgtggccgagagagacagcatcagaaccctgtgcgacaacctgagaagagagagagacagagccgtgagcgagctggccgaggccctgagaagcctggacgacaccagaaagcagaagaacgacgtgagcagagagctgaaggagctgaaggagcagatggagagccagctggagaaggaggccagattcagacagctgatggcccacagcagccacgacagcgccatcgacaccgacagcatggagtgggagaccgaggtggtggagttcgagagagagaccgaggacatcgacctgaaggccctgggcttcgacatggccgagggcgtgaacgagccctgcttccccggcgactgcggcatcttcgtgaccaaggtggacaagggcagcatcgccgacggcagactgagagtgaacgactggctgctgagaatcaacgacgtggacctgatcaacaaggacaagaagcaggccatcaaggccctgctgaacggcgagggcgccatcaacatggtggtgagaagaagaaagagcctgggcggcaaggtggtgacccccctgcacatcaacctgagcggccagaaggacagcggcatcagcctggagaacggcgtgtacgccgccgccgtgctgcccggcagccccgccgccaaggagggcagcctggccgtgggcgacagaatcgtggccatcaacggcatcgccctggacaacaagagcctgaacgagtgcgagagcctgctgagaagctgccaggacagcctgaccctgagcctgctgaaggagcagaagtgcgtgcccgccagcggcgagctgagccccgagctgcaggagtgggccccctacagccccggccacagcagcagacacagcaacccccccctgtaccccagcagacccagcgtgggcaccgtgcccagaagcctgacccccagcaccaccgtgagcagcatcctgagaaaccccatctacaccgtgagaagccacagagtgggcccctgcagcagcccccccgccgccagagacgccggcccccagggcctgcaccccagcgtgcagcaccagggcagactgagcctggacctgagccacagaacctgcagcgactacagcgagatgagagccacccacggcagcaacagcctgcccagcagcgccagactgggcagcagcagcaacctgcagttcaaggccgagagaatcaagatccccagcacccccagataccccagaagcgtggtgggcagcgagagaggcagcgtgagccacagcgagtgcagcacccccccccagagccccctgaacatcgacaccctgagcagctgcagccagagccagaccagcgccagcaccctgcccagaatcgccgtgaaccccgccagcctgggcgagagaagaaaggacagaccctacgtggaggagcccagacacgtgaaggtgcagaagggcagcgagcccctgggcatcagcatcgtgagcggcgagaagggcggcatctacgtgagcaaggtgaccgtgggcagcatcgcccaccaggccggcctggagtacggcgaccagctgctggagttcaacggcatcaacctgagaagcgccaccgagcagcaggccagactgatcatcggccagcagtgcgacaccatcaccatcctggcccagtacaacccccacgtgcaccagctgagcagccacagcagaagcagcagccacctggaccccgccggcacccacagcaccctgcagggcagcggcaccaccacccccgagcaccccagcgtgatcgaccccctgatggagcaggacgagggccccagcaccccccccgccaagcagagcagcagcagaatcgccggcgacgccaacaagaagaccctggagcccagagtggtgttcatcaagaagagccagctggagctgggcgtgcacctgtgcggcggcaacctgcacggcgtgttcgtggccgaggtggaggacgacagccccgccaagggccccgacggcctggtgcccggcgacctgatcctggagtacggcagcctggacgtgagaaacaagaccgtggaggaggtgtacgtggagatgctgaagcccagagacggcgtgagactgaaggtgcagtacagacccgaggagttcaccaaggccaagggcctgcccggcgacagcttctacatcagagccctgtacgacagactggccgacgtggagcaggagctgagcttcaagaaggacgacatcctgtacgtggacgacaccctgccccagggcaccttcggcagctggatggcctggcagctggacgagaacgcccagaagatccagagaggccagatccccagcaagtacgtgatggaccaggagttcagcagaagactgagcatgagcgaggtgaaggacgacaacagcgccaccaagaccctgagcgccgccgccagaagaagcttcttcagaagaaagcacaagcacaagagaagcggcagcaaggacggcaaggacctgctggccctggacgccttcagcagcgacagcatccccctgttcgaggacagcgtgagcctggcctaccagagagtgcagaaggtggactgcaccgccctgagacccgtgctgatcctgggccccctgctggacgtggtgaaggagatgctggtgaacgaggcccccggcaagttctgcagatgccccctggaggtgatgaaggccagccagcaggccatcgagagaggcgtgaaggactgcctgttcgtggactacaagagaagaagcggccacttcgacgtgaccaccgtggccagcatcaaggagatcaccgagaagaacagacactgcctgctggacatcgccccccacgccatcgagagactgcaccacatgcacatctaccccatcgtgatcttcatccactacaagagcgccaagcacatcaaggagcagagagaccccatctacctgagagacaaggtgacccagagacacagcaaggagcagttcgaggccgcccagaagctggagcaggagtacagcagatacttcaccggcgtgatccagggcggcgccctgagcagcatctgcacccagatcctggccatggtgaaccaggagcagaacaaggtgctgtggatccccgcctgccccctgtag

SEQ ID NO: 296714 - DNA, 2643 bp, Artificial Sequence
  derived and/or modified sequence
ggcgccatcaacatggtggtgagaagaagaaagagcctgggcggcaaggtggtgacccccctgcacatcaacctgagcggccagaaggacagcggcatcagcctggagaacggcgtgtacgccgccgccgtgctgcccggcagccccgccgccaaggagggcagcctggccgtgggcgacagaatcgtggccatcaacggcatcgccctggacaacaagagcctgaacgagtgcgagagcctgctgagaagctgccaggacagcctgaccctgagcctgctgaaggagcagaagtgcgtgcccgccagcggcgagctgagccccgagctgcaggagtgggccccctacagccccggccacagcagcagacacagcaacccccccctgtaccccagcagacccagcgtgggcaccgtgcccagaagcctgacccccagcaccaccgtgagcagcatcctgagaaaccccatctacaccgtgagaagccacagagtgggcccctgcagcagcccccccgccgccagagacgccggcccccagggcctgcaccccagcgtgcagcaccagggcagactgagcctggacctgagccacagaacctgcagcgactacagcgagatgagagccacccacggcagcaacagcctgcccagcagcgccagactgggcagcagcagcaacctgcagttcaaggccgagagaatcaagatccccagcacccccagataccccagaagcgtggtgggcagcgagagaggcagcgtgagccacagcgagtgcagcacccccccccagagccccctgaacatcgacaccctgagcagctgcagccagagccagaccagcgccagcaccctgcccagaatcgccgtgaaccccgccagcctgggcgagagaagaaaggacagaccctacgtggaggagcccagacacgtgaaggtgcagaagggcagcgagcccctgggcatcagcatcgtgagcggcgagaagggcggcatctacgtgagcaaggtgaccgtgggcagcatcgcccaccaggccggcctggagtacggcgaccagctgctggagttcaacggcatcaacctgagaagcgccaccgagcagcaggccagactgatcatcggccagcagtgcgacaccatcaccatcctggcccagtacaacccccacgtgcaccagctgagcagccacagcagaagcagcagccacctggaccccgccggcacccacagcaccctgcagggcagcggcaccaccacccccgagcaccccagcgtgatcgaccccctgatggagcaggacgagggccccagcaccccccccgccaagcagagcagcagcagaatcgccggcgacgccaacaagaagaccctggagcccagagtggtgttcatcaagaagagccagctggagctgggcgtgcacctgtgcggcggcaacctgcacggcgtgttcgtggccgaggtggaggacgacagccccgccaagggccccgacggcctggtgcccggcgacctgatcctggagtacggcagcctggacgtgagaaacaagaccgtggaggaggtgtacgtggagatgctgaagcccagagacggcgtgagactgaaggtgcagtacagacccgaggagttcaccaaggccaagggcctgcccggcgacagcttctacatcagagccctgtacgacagactggccgacgtggagcaggagctgagcttcaagaaggacgacatcctgtacgtggacgacaccctgccccagggcaccttcggcagctggatggcctggcagctggacgagaacgcccagaagatccagagaggccagatccccagcaagtacgtgatggaccaggagttcagcagaagactgagcatgagcgaggtgaaggacgacaacagcgccaccaagaccctgagcgccgccgccagaagaagcttcttcagaagaaagcacaagcacaagagaagcggcagcaaggacggcaaggacctgctggccctggacgccttcagcagcgacagcatccccctgttcgaggacagcgtgagcctggcctaccagagagtgcagaaggtggactgcaccgccctgagacccgtgctgatcctgggccccctgctggacgtggtgaaggagatgctggtgaacgaggcccccggcaagttctgcagatgccccctggaggtgatgaaggccagccagcaggccatcgagagaggcgtgaaggactgcctgttcgtggactacaagagaagaagcggccacttcgacgtgaccaccgtggccagcatcaaggagatcaccgagaagaacagacactgcctgctggacatcgccccccacgccatcgagagactgcaccacatgcacatctaccccatcgtgatcttcatccactacaagagcgccaagcacatcaaggagcagagagaccccatctacctgagagacaaggtgacccagagacacagcaaggagcagttcgaggccgcccagaagctggagcaggagtacagcagatacttcaccggcgtgatccagggcggcgccctgagcagcatctgcacccagatcctggccatggtgaaccaggagcagaacaaggtgctgtggatccccgcctgccccctgtag

SEQ ID NO: 296715 - DNA, 6487 bp, Artificial Sequence
  derived and/or modified sequence
cggcgccctagggctgctgccgaggtgctcgcctgcccgcccgccggcctcggggggcccgggaggcgtccggcggggcggggcggcgcggcccgccaccatggagccccagcgccgggagctgctcgcccagtgtcagcagagcctggcccaggccatgacggaggtggaagccgtgctcgggctgctcgaggccgcgggagcgctcagtcccggcgagcggcggcagctggacgaggaggcgggaggcgccaaggcggagctgctgctcaagctgctcttggccaaggagcgggaccacttccaggacctgcgggcggcgctggagaagacgcagcctcacctgctgcccattctctacctgaacggcgtcgtcgggccgccgcagcccgccgaaggcgcgggttctacctacagcgtcctgtccaccatgccctcagactcagaaagcagcagctccctcagcagtgtgggcactaccgggaaggcgccgtccccaccacccctcctcactgaccagcaagtgaatgagaaggtggagaacctctccattcagctgcggctgatgacccgggagagaaacgagctccgcaagcgcctggcctttgctacgcatggcacggcctttgacaagaggccctaccacaggctgaatcctgactatgagaggctgaagatccagtgcgtgcgagccatgtcggacctgcagagcctgcagaaccagcacaccaacgccttgaagaggtgtgaggaggtggccaaggagactgacttctaccacacactccacagccggctcctgagtgaccagactcggctgaaggatgacgtggacatgctgaggcgggagaatgggcagctgctgcgggagcgaaacctgctgcagcagtcatgggaggacatgaagcggctccacgaggaggaccagaaggagatcggtgacctccgtgcccagcagcagcaggtgttgaagcacaacgggtcatccgagattctcaacaaactgtatgacacggccatggacaagttggaggtggtcaagaaggactatgacgcccttcggaagaggtacagtgagaaagtcgccatccacaatgcagacctgagccgcctggagcagctgggggaggagaaccagcggttgctgaagcagacagagatgctgacccagcagagggacacggccatccagctgcagcaccagtgcgccctctccctgaggaggtttgaggcgatccaccatgagctgaacaaggccacggcgcagaacaaggacctgcagtgggagatggagctgctgcagtcagagctgaccgagctgagaaccacgcaggtgaagacagcaaaggagtcggagaaatacagggaggagcgggacgctgtgtacagcgagtacaagctcatcatgagtgagcgtgaccaggtcatctctgagctggacaagctgcagaccgaagtggagctggccgagtccaagctcaagagcagcacatctgagaagaaggcggccaatgaggagatggaggcgctgcggcagatcaaagacacggtgacaatggatgctgggagagccaacaaggaggttgaaatccttcgaaagcagtgcaaggctctgtgccaggagctgaaggaagccctccaggaggcggatgtggccaagtgccggcgggactgggccttccaggagcgagacaagattgtagcagagcgtgacagcatccggacactgtgtgacaacctgaggcgggagcgggaccgtgcggtgagcgagctggctgaggccctgcgcagcctggatgacacccgcaagcagaagaatgatgtcagccgcgagctgaaggagctcaaggaacagatggaatcccagttggaaaaggaggcccggttccgacagctgatggcccacagctcccacgactcggccattgacacggattccatggagtgggaaacggaagttgtagagttcgagagggagacggaggatattgacttgaaggcactggggtttgatatggcagaaggtgtgaatgagccttgtttcccgggggactgtggcatatttgtcactaaagtggacaaaggaagcattgctgatggccgcttaagggtcaatgactggctgctgagaatcaacgatgtggacctcatcaacaaggacaagaagcaggccatcaaggcgctcctcaatggggagggggccatcaacatggtcgtgcggcggaggaagtccctgggtgggaaggtggtcacgccgctgcacatcaacctcagtggacagaaagacagtggcatcagtctggagaatggagtgtatgctgccgctgtgctgcctggaagccctgccgctaaagaagggtcccttgctgtgggagacaggatcgttgcgatcaatggcattgcactggacaacaagtctctgaatgaatgtgaatctctgctgcgcagctgccaggactccctgaccctgtccctcctgaaggaacagaagtgtgtcccggccagtggagaactctccccggagctccaggagtgggcaccttactcgcctgggcattccagccggcacagcaaccccccgctataccctagcaggccgtctgtgggcactgttccccggagtttgacccccagcaccactgtgagctccatcctgcggaaccccatctacactgtgcgcagtcacagggtcggcccctgcagctctccacctgcggcccgagatgctggcccccagggtttgcatcccagtgtccagcaccagggacgcctgagcctggacctgagccacaggacctgcagcgactactccgagatgagagccacccatgggtccaactcactgccctccagcgcccgcctgggttcttcgagtaacttgcagttcaaggcggaacgcattaaaatcccatcaacaccaagatatccgcggagtgtcgtgggctccgagagaggttcagtgtcacattctgaatgcagcactcctccacagtcacccctgaacatcgacaccctgtcctcttgtagccagtcccagacctcagcctccacattgcccagaatcgctgtcaaccccgcgtccctcggggagcggagaaaggacaggccttatgtggaggagccacgccacgtgaaggtgcagaagggctcagagccgctgggcatctccatcgtgagtggagagaagggcggcatctacgtctccaaggtgaccgtggggagcatcgctcaccaggctggcctcgagtatggggatcagttactggagttcaacggcataaacctgcggagcgccacggagcagcaggcgcggctcatcatcgggcagcagtgtgataccatcaccatcctggcccagtacaacccccacgtgcaccagctcagcagccactcccggtccagctcacacctggaccctgccggtacccactccactctccagggcagtggcaccaccaccccggagcatccatctgtcatcgacccactgatggagcaggacgaggggcctagcacccccccagccaagcagagcagctccaggattgcgggagatgccaacaagaagaccctggagccacgcgttgtcttcatcaaaaagtcccagctggagcttggggtgcacttgtgtggtgggaacctgcatggggtgtttgtggccgaggtggaggatgacagtcctgccaagggtcctgacggcctcgtgccaggggacctcatcctggagtatggcagcctggacgtgcggaacaagacagtggaggaagtctatgtggagatgctgaagcccagggatggcgtccgcctgaaggtgcagtaccgccctgaggagttcacgaaggccaagggcctgcctggtgacagcttctacatcagggccctgtacgaccggctggcagatgtggagcaagagttgagctttaagaaggacgacatcctctacgtggatgacaccttaccccagggcacgttcgggtcctggatggcttggcagctggacgagaatgcccagaagatccagcgcgggcagattcccagcaaatatgtgatggaccaagaattctccaggaggctcagcatgtctgaagtcaaagatgacaatagcgccacaaagacgctgtcagcggctgcacgccggtccttttttcggaggaaacacaagcacaaacgcagcgggtccaaggacgggaaagacctgctcgccttggatgccttttccagtgactccattccactctttgaagattcggtgagcctggcctatcagcgggtccagaaggtggactgcaccgctctgaggcctgtcctgattctggggcctttgctggacgtggtgaaggagatgctggtgaatgaggctcctggcaagttctgcagatgtccccttgaggtgatgaaggcctcccagcaggccattgagcggggtgtcaaagattgcctgtttgtcgactataagcggagaagcggccatttcgatgtgaccactgtggcgtcaataaaggagatcacagaaaagaaccgacactgcctcctggacattgctccgcacgctattgagcggctccaccacatgcacatctaccccattgtcatcttcatccactacaagagcgccaagcacatcaaggagcagagagaccccatctacctgagggacaaggtgactcagaggcattccaaagagcagtttgaggcggcgcagaagcttgagcaggagtacagcaggtacttcacaggggtcatccagggaggagccctgtcaagcatttgcactcagatcttggcaatggtcaatcaagaacaaaataaagtcctgtggattccagcctgcccgctctaggagaatgctgtgctgtggatgactgcagctggccgcctgaggggacaccagactcagctcttttctagcgactgaaagtagaagtctgtccgtctatgaacatgcgggggaaggatccggaaccaggacccagaagcacctcctttgtagacagagggccacggctgcgtgcgatccaggcccaggcccacacactctgcccgtgtcacacgtgtgctttaacacaaaacagataacactaaagacgggttcagcacccacctttctttagccagctgatcagagatgctgcaaagagaacctttcggatcactcgtttacaagccttttctaagtatttggtggtttatgtttacttgaacggctccatgttgccggtgcccagcccctgtcccctctgtcaaccccctgtcgctttggtgttggtttcgttcccgtcttcagcaaaacgaccttggaacctcaatgggggctgctttgctttgggaggttcttgttggtgggaccagagctttgacaaacctcctgctccttggtggcacctctcctggaaggacgtcacaactccaggtgctcagactgcctgtggcagcagaaccagtgcctttggcattttcctcccacaatggggaaggtgactttggcattcttacaaactcgtctctcggcctttctctcctgccttccacagcctctcgtttctcctccatctgtgcttattacttgaggactgtgtctgctccgtgagagctgcgtgggcagggctgcagtggggtccaggtggtgttcagctgtgctgatgcctgccattgggtcctccttaggctctgtaagtcgtgacagccttcatcagtgcaatgtttgcagggtaattcttaaactttttagagggtggcaggtacatcagttctttttgatatgaaaacattcatgtttcagacattgaattgagagcttttaggggaagcataatggttattgtcactatcaacagtctaaaaagaaaaactgaggtctttttaatcttgattacagcactcacggcatgcaccctactcagtgtgggtgtcttcgtttgggggctttttttttttttgcacttctgaggctagatatgtctggctgaagatttgatgtggttcctccttaagctatgcgtcctgttaataataggtactgtactgggctctgtgtaagtgtcgttggggtaggacctatattttaatactgttcctaacatttcattttactagcgagaaatctttgatttcattttattctttgtaattctagacactagattgtagtttagccataactgatgttttttaaaaagggatatattttcttgcacagttgttcaaaaaagagacaagtttcagtcctcaatgctgtcctttgttttacaggtacaagttttctagctcagacaaactatgaaaaactgtagactattctcaaggtattaactcgcagaccctctgggggtaggggctgttttctaagttacaggcagagtgggactgagatggtacagtgtgcacagacaggtactgagctgacagactgggattttctgtactaaaatgttactttgtatcaaaagttaaacaggctttagtacaacaaataaaggtcaatttctgt

SEQ ID NO: 296716 - DNA, 4292 bp, Artificial Sequence
  derived and/or modified sequence
ggggccatcaacatggtcgtgcggcggaggaagtccctgggtgggaaggtggtcacgccgctgcacatcaacctcagtggacagaaagacagtggcatcagtctggagaatggagtgtatgctgccgctgtgctgcctggaagccctgccgctaaagaagggtcccttgctgtgggagacaggatcgttgcgatcaatggcattgcactggacaacaagtctctgaatgaatgtgaatctctgctgcgcagctgccaggactccctgaccctgtccctcctgaaggaacagaagtgtgtcccggccagtggagaactctccccggagctccaggagtgggcaccttactcgcctgggcattccagccggcacagcaaccccccgctataccctagcaggccgtctgtgggcactgttccccggagtttgacccccagcaccactgtgagctccatcctgcggaaccccatctacactgtgcgcagtcacagggtcggcccctgcagctctccacctgcggcccgagatgctggcccccagggtttgcatcccagtgtccagcaccagggacgcctgagcctggacctgagccacaggacctgcagcgactactccgagatgagagccacccatgggtccaactcactgccctccagcgcccgcctgggttcttcgagtaacttgcagttcaaggcggaacgcattaaaatcccatcaacaccaagatatccgcggagtgtcgtgggctccgagagaggttcagtgtcacattctgaatgcagcactcctccacagtcacccctgaacatcgacaccctgtcctcttgtagccagtcccagacctcagcctccacattgcccagaatcgctgtcaaccccgcgtccctcggggagcggagaaaggacaggccttatgtggaggagccacgccacgtgaaggtgcagaagggctcagagccgctgggcatctccatcgtgagtggagagaagggcggcatctacgtctccaaggtgaccgtggggagcatcgctcaccaggctggcctcgagtatggggatcagttactggagttcaacggcataaacctgcggagcgccacggagcagcaggcgcggctcatcatcgggcagcagtgtgataccatcaccatcctggcccagtacaacccccacgtgcaccagctcagcagccactcccggtccagctcacacctggaccctgccggtacccactccactctccagggcagtggcaccaccaccccggagcatccatctgtcatcgacccactgatggagcaggacgaggggcctagcacccccccagccaagcagagcagctccaggattgcgggagatgccaacaagaagaccctggagccacgcgttgtcttcatcaaaaagtcccagctggagcttggggtgcacttgtgtggtgggaacctgcatggggtgtttgtggccgaggtggaggatgacagtcctgccaagggtcctgacggcctcgtgccaggggacctcatcctggagtatggcagcctggacgtgcggaacaagacagtggaggaagtctatgtggagatgctgaagcccagggatggcgtccgcctgaaggtgcagtaccgccctgaggagttcacgaaggccaagggcctgcctggtgacagcttctacatcagggccctgtacgaccggctggcagatgtggagcaagagttgagctttaagaaggacgacatcctctacgtggatgacaccttaccccagggcacgttcgggtcctggatggcttggcagctggacgagaatgcccagaagatccagcgcgggcagattcccagcaaatatgtgatggaccaagaattctccaggaggctcagcatgtctgaagtcaaagatgacaatagcgccacaaagacgctgtcagcggctgcacgccggtccttttttcggaggaaacacaagcacaaacgcagcgggtccaaggacgggaaagacctgctcgccttggatgccttttccagtgactccattccactctttgaagattcggtgagcctggcctatcagcgggtccagaaggtggactgcaccgctctgaggcctgtcctgattctggggcctttgctggacgtggtgaaggagatgctggtgaatgaggctcctggcaagttctgcagatgtccccttgaggtgatgaaggcctcccagcaggccattgagcggggtgtcaaagattgcctgtttgtcgactataagcggagaagcggccatttcgatgtgaccactgtggcgtcaataaaggagatcacagaaaagaaccgacactgcctcctggacattgctccgcacgctattgagcggctccaccacatgcacatctaccccattgtcatcttcatccactacaagagcgccaagcacatcaaggagcagagagaccccatctacctgagggacaaggtgactcagaggcattccaaagagcagtttgaggcggcgcagaagcttgagcaggagtacagcaggtacttcacaggggtcatccagggaggagccctgtcaagcatttgcactcagatcttggcaatggtcaatcaagaacaaaataaagtcctgtggattccagcctgcccgctctaggagaatgctgtgctgtggatgactgcagctggccgcctgaggggacaccagactcagctcttttctagcgactgaaagtagaagtctgtccgtctatgaacatgcgggggaaggatccggaaccaggacccagaagcacctcctttgtagacagagggccacggctgcgtgcgatccaggcccaggcccacacactctgcccgtgtcacacgtgtgctttaacacaaaacagataacactaaagacgggttcagcacccacctttctttagccagctgatcagagatgctgcaaagagaacctttcggatcactcgtttacaagccttttctaagtatttggtggtttatgtttacttgaacggctccatgttgccggtgcccagcccctgtcccctctgtcaaccccctgtcgctttggtgttggtttcgttcccgtcttcagcaaaacgaccttggaacctcaatgggggctgctttgctttgggaggttcttgttggtgggaccagagctttgacaaacctcctgctccttggtggcacctctcctggaaggacgtcacaactccaggtgctcagactgcctgtggcagcagaaccagtgcctttggcattttcctcccacaatggggaaggtgactttggcattcttacaaactcgtctctcggcctttctctcctgccttccacagcctctcgtttctcctccatctgtgcttattacttgaggactgtgtctgctccgtgagagctgcgtgggcagggctgcagtggggtccaggtggtgttcagctgtgctgatgcctgccattgggtcctccttaggctctgtaagtcgtgacagccttcatcagtgcaatgtttgcagggtaattcttaaactttttagagggtggcaggtacatcagttctttttgatatgaaaacattcatgtttcagacattgaattgagagcttttaggggaagcataatggttattgtcactatcaacagtctaaaaagaaaaactgaggtctttttaatcttgattacagcactcacggcatgcaccctactcagtgtgggtgtcttcgtttgggggctttttttttttttgcacttctgaggctagatatgtctggctgaagatttgatgtggttcctccttaagctatgcgtcctgttaataataggtactgtactgggctctgtgtaagtgtcgttggggtaggacctatattttaatactgttcctaacatttcattttactagcgagaaatctttgatttcattttattctttgtaattctagacactagattgtagtttagccataactgatgttttttaaaaagggatatattttcttgcacagttgttcaaaaaagagacaagtttcagtcctcaatgctgtcctttgttttacaggtacaagttttctagctcagacaaactatgaaaaactgtagactattctcaaggtattaactcgcagaccctctgggggtaggggctgttttctaagttacaggcagagtgggactgagatggtacagtgtgcacagacaggtactgagctgacagactgggattttctgtactaaaatgttactttgtatcaaaagttaaacaggctttagtacaacaaataaaggtcaatttctgtaa

SEQ ID NO: 296717 - DNA, 129 bp, Artificial Sequence
  derived and/or modified sequence
atggagctgctgcaggccgagggcgccaccgccagatggccccccggcagaggctgcggccccgtgcccgccggcggcgccagaccccacgccccccccccccccgccgccccctgccagggcccctag

SEQ ID NO: 296718 - DNA, 473 bp, Artificial Sequence
  derived and/or modified sequence
aggaagctggtgaagtgggggaggatgcgtgctccggagggccgccaccccaggaatgtgtggctggcgggtggggctggcacaggagggtggggcccgtgcggaggggcggcagcccagccgtttctagggcaggccaagaggatgaggagaggaggaccagcctgcgataggagtaggcaggtcctgacccggtgcctgcgccctccccacaggacaggcatgttgttgggactggcggccatggagctgaaggtgtgggtggatggcatccagcgtgtggtctgtggggtctcagagcagaccacctgccaggaagtggtcatcgcactagcccaagcaataggccagactggccgctttgtgcttgtgcagcggcttcgggagaaggagcggcagttgctgccacaagagtgtccagtgggcgcccaggccacctgcggacagtttgccagcgatgtccagtttgtcct

SEQ ID NO: 296719 - protein, 444 aa, Artificial Sequence
  derived and/or modified sequence
MKVVPSLLLSVLLAQVWLVPGLAPSPQSPETPAPQNQTSRVVQAPKEEEEDEQEASEEKASEEEKAWLMASRQQLAKETSNFGFSLLRKISMRHDGNMVFSPFGMSLAMTGLMLGATGPTETQIKRGLHLQALKPTKPGLLPSLFKGLRETLSRNLELGLTQGSFAFIHKDFDVKETFFNLSKRYFDTECVPMNFRNASQAKRLMNHYINKETRGKIPKLFDEINPETKLILVDYILFKGKWLTPFDPVFTEVDTFHLDKYKTIKVPMMYGAGKFASTFDKNFRCHVLKLPYQGNATMLVVLMEKMGDHLALEDYLTTDLVETWLRNMKTRNMEVFFPKFKLDQKYEMHELLRQMGIRRIFSPFADLSELSATGRNLQVSRVLQRTVIEVDERGTEAVAGILSEITAYSMPPVIKVDRPFHFMIYEETSGMLLFLGRVVNPTLL

SEQ ID NO: 296720 - protein, 484 aa, Artificial Sequence
  derived and/or modified sequence
MSRSTQELLGYHCRLQDKLQEQEGSLAAEGRHSLASAADHMKVVPSLLLSVLLAQVWLVPGLAPSPQSPETPAPQNQTSRVVQAPKEEEEDEQEASEEKASEEEKAWLMASRQQLAKETSNFGFSLLRKISMRHDGNMVFSPFGMSLAMTGLMLGATGPTETQIKRGLHLQALKPTKPGLLPSLFKGLRETLSRNLELGLTQGSFAFIHKDFDVKETFFNLSKRYFDTECVPMNFRNASQAKRLMNHYINKETRGKIPKLFDEINPETKLILVDYILFKGKWLTPFDPVFTEVDTFHLDKYKTIKVPMMYGAGKFASTFDKNFRCHVLKLPYQGNATMLVVLMEKMGDHLALEDYLTTDLVETWLRNMKTRNMEVFFPKFKLDQKYEMHELLRQMGIRRIFSPFADLSELSATGRNLQVSRVLQRTVIEVDERGTEAVAGILSEITAYSMPPVIKVDRPFHFMIYEETSGMLLFLGRVVNPTLL

SEQ ID NO: 296721 - DNA, 1455 bp, Artificial Sequence
  derived and/or modified sequence
atgagtcgcagcacccaggaacttctcggataccattgtcgactccaggacaagctccaggagcaggagggttccttggcagccgaaggcagacactccctggcctccgcagccgatcatatgaaagtcgtgccttctctgctcctgagtgtattactggctcaagtttggctcgtcccaggtctggcccctagcccacaaagcccagagacccccgccccacagaaccagacatcacgcgtcgtgcaggccccaaaagaggaggaggaagatgagcaagaggcatccgaggaaaaggctagcgaagaggagaaggcttggctgatggcgagccgacaacagctggccaaggaaactagtaatttcggctttagcttgctgcggaagatcagtatgagacacgacggcaatatggtgttctcaccttttgggatgtcgctggcaatgaccggcctgatgcttggtgccaccggacccactgagacccagattaaaagaggtcttcacctgcaagcactcaaacctaccaagcctggtctcctaccttcgctcttcaagggcctccgtgaaacgctctcccgaaatctcgagttagggctgacgcaagggagttttgcttttatccacaaggattttgatgtcaaagagactttttttaatctgagcaaacgatattttgataccgagtgcgtccccatgaacttcaggaacgcttcacaagcaaagcgcctcatgaaccactatataaataaagagacccgggggaaaattcctaaactctttgatgaaatcaaccctgaaaccaagctgattctggttgattacattctgtttaaggggaagtggcttacaccgtttgatccagttttcaccgaggtcgataccttccacttagataagtacaagaccattaaagtgcccatgatgtatggggccggtaagttcgcttccacctttgataagaacttcagatgccacgtactgaaactgccttaccagggcaatgcaactatgttagtggtcctcatggagaaaatgggcgaccacctggctcttgaggactatctcaccaccgatctcgtcgagacatggctgcggaatatgaagacacgaaacatggaagttttcttccctaaatttaaactggatcagaagtatgaaatgcacgagctgctcaggcaaatgggcattcgacgcatcttttctccgtttgccgaccttagcgaactgtcagctacaggaaggaatctgcaggtttctcgggtgttgcagcgtaccgtgattgaagtggacgaaagaggaaccgaggccgtggccggaatactgtctgaaatcacagcgtactccatgccaccagtcattaaggtggatcgccccttccatttcatgatctacgaggagacaagcggcatgttactgtttctgggtcgagtggtgaacccaaccttactgtag

SEQ ID NO: 296722 - DNA, 1455 bp, Artificial Sequence
  derived and/or modified sequence
atgagccgcagcacccaggagctgctgggctaccactgccgcctgcaggacaagctgcaggagcaggagggcagcctggccgctgagggccgccacagcctggccagcgctgctgaccacatgaaggtggtgcccagcctgctgctgtctgtgctgctggcccaggtgtggctggtgcccggcctggcccccagcccccagagccctgagaccccagccccccagaaccagaccagccgggtggtgcaggcccccaaggaggaggaggaggatgagcaggaggccagcgaggagaaggccagcgaggaggagaaggcctggctgatggccagccggcagcagctggccaaggagaccagcaactttggcttcagcctgctgaggaagatctccatgagacatgatggcaacatggtgttcagccccttcggcatgagcctggccatgacaggcctgatgctgggcgccaccggccccacagagacccagatcaagaggggcctgcacctgcaggccctgaagcccaccaagccaggcctgctgcccagcctcttcaagggcctgcgggagaccctgagcaggaacctggagctgggcctgacccagggcagctttgccttcatccacaaggactttgatgtgaaggagaccttcttcaacctgagcaagcgctactttgacacagaatgtgtgcccatgaacttcagaaatgccagccaggccaagaggctgatgaaccactacatcaacaaggagacccggggcaagatccccaagctgtttgatgagatcaaccctgagaccaagctgatcctggtggactacatcctcttcaagggcaagtggctgaccccatttgaccccgtcttcacagaggtggacaccttccacctggacaagtacaagaccatcaaggtgcccatgatgtacggggccggcaagtttgccagcacctttgacaagaacttccgctgccacgtgctgaagctgccctaccagggcaatgccaccatgctggtggtgctgatggagaagatgggagaccacctggccctggaggactacctgaccacagacctggtggagacctggctgaggaacatgaagaccaggaacatggaggtgttcttccccaagttcaagctggaccagaagtatgagatgcatgagctgctgcggcagatgggcatccgccgcatcttcagcccctttgctgacctgtctgagctgagcgccactggaagaaacctgcaggtgtcccgggtgctgcagaggacagtcatcgaggtggatgagcggggcacagaagctgtggccggcatcctgtctgagatcacagcctacagcatgcctcctgtgatcaaggtggaccggcccttccacttcatgatctatgaggagaccagcggcatgctgctcttcctgggccgggtggtgaaccccaccctgctgtag

SEQ ID NO: 296723 - DNA, 1455 bp, Artificial Sequence
  derived and/or modified sequence
atgagccggagcacccaggagctgctgggctaccactgccggctgcaggataagctccaggagcaggagggctctctggctgcagaaggacgtcacagtttggcctctgcagcagaccacatgaaggtagtcccgtccctgctgctgtctgtcctcctggcccaggtgtggttggtgccaggtcttgccccctcgccacaaagccctgaaactcctgctccacagaaccagactagtagagtcgtccaggccccaaaggaggaagaggaagatgagcaggaagcgagcgaggagaaggcgagcgaagaagagaaagcctggctgatggcttctaggcagcaacttgccaaggagacctctaatttcgggtttagcctgctccgtaagatttctatgcgccacgacggcaacatggtgttttctccttttgggatgagcctagccatgacaggcctgatgcttggtgcgaccggccctactgaaactcagatcaagagaggactgcacctgcaggcattgaaacctactaaaccaggactactgccctccttattcaagggtctcagagagacgctctctcgtaatctggaactagggctgacacaaggcagtttcgcttttattcacaaagacttcgacgtcaaggagacattctttaacttgtccaagagatactttgataccgagtgtgtacctatgaatttccgcaatgcatcacaggctaagcggctgatgaaccactatatcaacaaggaaacaaggggaaagattccaaagctgttcgatgaaattaaccctgagaccaagctgatcctagtggactacattttgttcaaaggaaagtggctgacccctttcgaccctgtttttacagaggtggacaccttccatctggacaagtacaaaacaataaaggtgccgatgatgtacggagctggaaagttcgcttccaccttcgacaagaacttccgatgtcatgtgctgaagctgccttaccagggaaatgcaaccatgttggttgtgttgatggaaaagatgggcgaccacctcgccttagaggattacctgacaacagacctcgtggagacgtggctgcgcaacatgaaaactaggaatatggaggtgttctttcctaaattcaaactcgaccagaaatatgaaatgcacgagctgctccgacagatgggaatacggcgcatattctcgccattcgctgatctctcagagctatcagctaccggaaggaacctgcaagtgagtcgtgttctccagcgcaccgtcattgaggtggacgagaggggcaccgaagctgtggccgggattctgtctgagattaccgcctatagtatgcctcccgttattaaagtggaccgacccttccactttatgatctatgaggaaacgtccggcatgctgcttttccttgggagagtggtaaaccctactctgctttag

SEQ ID NO: 296724 - DNA, 1455 bp, Artificial Sequence
  derived and/or modified sequence
atgtccaggtcaacacaggagctgctgggatatcactgtagactccaagacaagctccaagagcaggagggatccctcgctgcggagggtcgacacagtctggcaagcgcagccgaccacatgaaggtggtgcctagtctgcttctctctgtattattagcacaggtatggttggtgcccggtctggcgccttcgcctcagtcacctgagacaccagcaccccaaaatcagacttctagagtggttcaggctcccaaagaggaggaggaggatgagcaagaagcctcagaagagaaggctagcgaggaggaaaaggcgtggcttatggcctctaggcagcagctggcaaaagaaaccagcaatttcggattttcattactaagaaaaatttccatgcgccacgatggcaacatggtattttcgccttttggcatgtccctcgcgatgacagggctaatgctcggggcaacaggccctacagagacacagataaaaaggggcctgcacctgcaggctcttaagccgactaaacctgggttactgcccagcctgtttaaaggcctgcgcgagacgctcagtcgaaatctggagctgggacttacccagggctcttttgcttttatacacaaagatttcgatgtaaaggagaccttcttcaacctctcaaaaagatatttcgatactgagtgtgtcccgatgaactttcgcaacgctagccaggccaagaggctgatgaaccactatatcaacaaagagacgcggggtaagattccaaaactgttcgacgaaatcaacccagaaaccaaactgatactagtggactatatcttatttaaaggtaagtggctaaccccctttgatcccgtgttcaccgaggtggacacgtttcacctggataagtataaaactatcaaagtgcccatgatgtatggagccggtaagttcgccagcacctttgacaagaattttagatgtcacgtactcaagctaccctaccaggggaatgcaacaatgcttgtggtgctgatggagaagatgggcgatcatcttgcattggaagattatctgactactgacttagtcgaaacgtggcttcgcaacatgaagacccggaatatggaggtcttcttccccaaatttaaacttgaccaaaaatacgaaatgcatgaactgctgaggcagatgggcattaggaggattttttccccgtttgccgatttgagtgagctgtccgcgactggacgcaacctgcaagtgtctagggtacttcaaaggaccgttatcgaagtggacgaacggggaactgaagctgttgccggaattctaagtgagatcacagcttactcaatgccaccagtgatcaaagtggaccgccctttccacttcatgatttacgaggagacctccgggatgttgctcttcctagggagagtggtaaaccctacactcctgtag

SEQ ID NO: 296725 - DNA, 1455 bp, Artificial Sequence
  derived and/or modified sequence
atgagtagaagcacacaagagttgctggggtatcactgtagattgcaggataaacttcaggaacaagagggatccctggccgcggagggaaggcattcactagcttctgcggctgaccacatgaaggtcgtgccatcccttttattatccgtactgctagcccaggtgtggttggttcctggcctggccccaagccctcagtccccagagacacctgctccccagaatcagacgtcgagggtagtgcaggcacccaaggaggaggaagaagatgagcaggaggcctctgaagaaaaggcctccgaggaagagaaggcttggctaatggcatcacgccagcagctggcaaaggagacatctaatttcggcttttccctgctgcggaagatctctatgcgacacgacggcaatatggtgtttagtccgtttggaatgtccttagcaatgaccggacttatgttgggggctaccggtccaactgaaacccaaatcaaacgtggattacatcttcaggcattgaaaccaacgaagcctggtcttctcccgtccttgtttaaaggtctcagggaaaccctttccaggaatctagaattgggtctgacccagggcagcttcgcctttattcataaagatttcgacgttaaagaaacattctttaatttatcaaaaaggtactttgacaccgagtgtgttcccatgaacttccggaatgcctcgcaggccaaacgtctgatgaatcactacatcaataaagagaccagagggaaaatccctaagttgtttgatgaaattaatcctgaaactaaacttatcctagtggactatattttgtttaagggcaaatggctgacgccctttgacccagtgtttactgaagttgatacctttcacctggacaaatacaaaaccattaaagtaccaatgatgtacggcgcgggtaaattcgcctccacattcgataaaaattttcggtgccatgttctgaaactgccttaccagggaaacgctactatgcttgttgttcttatggaaaaaatgggtgaccacctggctttagaggattacctgactactgatctggtggaaacttggttgcgaaacatgaaaacaaggaatatggaggtcttcttccctaaattcaaactcgaccagaagtacgaaatgcacgagctgctgcgccagatgggaatacgacggatcttttcccctttcgccgacctgtctgaattgagcgctactggcagaaacctgcaggtctctcgtgtcttgcaacgtacagtaatcgaggtagacgagcgaggaactgaggccgtcgcaggaatcctgagcgaaataaccgcatacagtatgccgcctgtgattaaggtcgatcggccatttcattttatgatctacgaggaaacgtccggtatgctactgtttctgggcagggtggtcaaccctacactattatag

SEQ ID NO: 296726 - DNA, 1455 bp, Artificial Sequence
  derived and/or modified sequence
atgagtaggagcacacaagagttgcttgggtaccattgtcgtcttcaggataaattgcaagaacaggaaggaagtctggcagccgagggccggcatagtttggcctcagccgctgatcacatgaaagtcgtcccaagcttgttactgtcagtgctcctggcacaggtctggctcgttcccggtctggccccatcccctcagtcccccgagactccagcacctcaaaatcagacatcccgagtggtccaagccccaaaagaagaggaggaggacgagcaggaagctagcgaggaaaaggcctctgaggaggagaaagcttggctgatggcgtccaggcagcaattagctaaagaaacttccaatttcggattctcactgctcaggaagatcagtatgaggcatgatggtaatatggttttctcccccttcggtatgtccttagccatgaccggcctgatgttgggcgctaccggccctaccgagacacagatcaagagaggacttcacctacaggccctgaaacctactaagcctggattgcttccctcactgtttaaaggactgagagaaacactgtcacgcaatctcgaactggggctaacgcaaggctcttttgcattcatccacaaagacttcgacgtgaaagagacctttttcaacctgagcaaacggtactttgacaccgagtgtgtgcctatgaattttcgcaacgcttcccaggccaagcggctgatgaatcattatatcaacaaggagaccagaggcaagattcccaagctgttcgatgaaatcaacccagaaacgaaactcatactggtggattatatcctatttaaaggtaagtggctgaccccctttgaccctgttttcaccgaggtagatacctttcacctggataagtacaaaaccattaaagtaccaatgatgtacggcgcgggtaaattcgcctccacattcgataaaaattttcggtgccatgttctgaaactgccttaccagggaaacgctactatgcttgttgttcttatggaaaaaatgggtgaccacctggctttagaggattacctgactactgatctggtggaaacttggttgcgaaacatgaaaacaaggaatatggaggtcttcttccctaaattcaaactcgaccagaagtacgaaatgcacgagctgctgcgccagatgggaatacgacggatctttagcccttttgcagacctcagtgaactgagcgccaccggcagaaatctccaagtttccagagtgctccagaggacagtgatagaagtcgatgaacgaggcactgaagccgtcgccgggattctctccgagataacagcttattctatgcccccagttatcaaagtggataggcccttccatttcatgatctacgaagaaacctccggaatgcttctattccttggcagagtagtcaaccccactttactatag

SEQ ID NO: 296727 - DNA, 2116 bp, Artificial Sequence
  derived and/or modified sequence
gctgaaggttctgggctgcaaagctgaagctttggtttctgctctaaatgaaggacttttccaggacccaaggccacacactggaagtcttgcagctgaagggaggcactccttggcctccgcagccgatcacatgaaggtggtgccaagtctcctgctctccgtcctcctggcacaggtgtggctggtacccggcttggcccccagtcctcagtcgccagagaccccagcccctcagaaccagaccagcagggtagtgcaggctcccaaggaggaagaggaagatgagcaggaggccagcgaggagaaggccagtgaggaagagaaagcctggctgatggccagcaggcagcagcttgccaaggagacttcaaacttcggattcagcctgctgcgaaagatctccatgaggcacgatggcaacatggtcttctctccatttggcatgtccttggccatgacaggcttgatgctgggggccacagggccgactgaaacccagatcaagagagggctccacttgcaggccctgaagcccaccaagcccgggctcctgccttccctctttaagggactcagagagaccctctcccgcaacctggaactgggcctcacacaggggagttttgccttcatccacaaggattttgatgtcaaagagactttcttcaatttatccaagaggtattttgatacagagtgcgtgcctatgaattttcgcaatgcctcacaggccaaaaggctcatgaatcattacattaacaaagagactcgggggaaaattcccaaactgtttgatgagattaatcctgaaaccaaattaattcttgtggattacatcttgttcaaagggaaatggttgaccccatttgaccctgtcttcaccgaagtcgacactttccacctggacaagtacaagaccattaaggtgcccatgatgtacggtgcaggcaagtttgcctccacctttgacaagaattttcgttgtcatgtcctcaaactgccctaccaaggaaatgccaccatgctggtggtcctcatggagaaaatgggtgaccacctcgcccttgaagactacctgaccacagacttggtggagacatggctcagaaacatgaaaaccagaaacatggaagttttctttccgaagttcaagctagatcagaagtatgagatgcatgagctgcttaggcagatgggaatcagaagaatcttctcaccctttgctgaccttagtgaactctcagctactggaagaaatctccaagtatccagggttttacaaagaacagtgattgaagttgatgaaaggggcactgaggcagtggcaggaatcttgtcagaaattactgcttattccatgcctcctgtcatcaaagtggaccggccatttcatttcatgatctatgaagaaacctctggaatgcttctgtttctgggcagggtggtgaatccgactctcctataattcaggacacgcataagcacttcgtgctgtagtagatgctgaatctgaggtatcaaacacacacaggataccagcaatggatggcaggggagagtgttccttttgttcttaactagtttagggtgttctcaaataaatacagtagtccccacttatctgagggggatacattcaaagacccccagcagatgcctgaaacggtggacagtgctgaaccttatatatattttttcctacacatacatacctatgataaagtttaatttataaattaggcacagtaagagattaacaataataacaacattaagtaaaatgagttacttgaatgcaagcactgcaataccataacagtcaaactgattatagagaaggctactaagtgactcatgggcgaggagcatagacagtgtggagacattgggcaaggggagaattcacatcctgggtgggacagagcaggacaatgcaagattccatcccactactcagaatggcatgctgcttaagacttttagattgtttatttctggaatttttcatttaatgtttttggaccatggttgaccatggttaactgagactgcagaaagcaaaaccatggataagggaggactactacaaaagcattaaattgatacatatttt

SEQ ID NO: 296728 - DNA, 2451 bp, Artificial Sequence
  derived and/or modified sequence
ctggagtggggtaagaggcgaattatagacacaaggggctcctctgcaggaaggaggccaagggaaagaggcttgaaaggcttgatatttcacccaccaccactcactgccggagtaagcaggtctccccttcccagggctgaggggaggcagggatgtgtgctgtcccagggctgagaagtggcaggtgagctggtgattccttactgcccaggttctgtctaggaaggtgcgtcctcaccatgctggatggtgtcctagtccaggagcaccccctgagctcctggcctagactccaaagggttgggtagatgagcaaagactttacaaagaccttaggcgatatatgtccaggagcacccaggaattactgggctaccactgcagactgcaggacaagctccaagaacaggaaggaagtcttgcagctgaagggaggcactccttggcctccgcagccgatcacatgaaggtggtgccaagtctcctgctctccgtcctcctggcacaggtgtggctggtacccggcttggcccccagtcctcagtcgccagagaccccagcccctcagaaccagaccagcagggtagtgcaggctcccaaggaggaagaggaagatgagcaggaggccagcgaggagaaggccagtgaggaagagaaagcctggctgatggccagcaggcagcagcttgccaaggagacttcaaacttcggattcagcctgctgcgaaagatctccatgaggcacgatggcaacatggtcttctctccatttggcatgtccttggccatgacaggcttgatgctgggggccacagggccgactgaaacccagatcaagagagggctccacttgcaggccctgaagcccaccaagcccgggctcctgccttccctctttaagggactcagagagaccctctcccgcaacctggaactgggcctcacacaggggagttttgccttcatccacaaggattttgatgtcaaagagactttcttcaatttatccaagaggtattttgatacagagtgcgtgcctatgaattttcgcaatgcctcacaggccaaaaggctcatgaatcattacattaacaaagagactcgggggaaaattcccaaactgtttgatgagattaatcctgaaaccaaattaattcttgtggattacatcttgttcaaagggaaatggttgaccccatttgaccctgtcttcaccgaagtcgacactttccacctggacaagtacaagaccattaaggtgcccatgatgtacggtgcaggcaagtttgcctccacctttgacaagaattttcgttgtcatgtcctcaaactgccctaccaaggaaatgccaccatgctggtggtcctcatggagaaaatgggtgaccacctcgcccttgaagactacctgaccacagacttggtggagacatggctcagaaacatgaaaaccagaaacatggaagttttctttccgaagttcaagctagatcagaagtatgagatgcatgagctgcttaggcagatgggaatcagaagaatcttctcaccctttgctgaccttagtgaactctcagctactggaagaaatctccaagtatccagggttttacaaagaacagtgattgaagttgatgaaaggggcactgaggcagtggcaggaatcttgtcagaaattactgcttattccatgcctcctgtcatcaaagtggaccggccatttcatttcatgatctatgaagaaacctctggaatgcttctgtttctgggcagggtggtgaatccgactctcctataattcaggacacgcataagcacttcgtgctgtagtagatgctgaatctgaggtatcaaacacacacaggataccagcaatggatggcaggggagagtgttccttttgttcttaactagtttagggtgttctcaaataaatacagtagtccccacttatctgagggggatacattcaaagacccccagcagatgcctgaaacggtggacagtgctgaaccttatatatattttttcctacacatacatacctatgataaagtttaatttataaattaggcacagtaagagattaacaataataacaacattaagtaaaatgagttacttgaatgcaagcactgcaataccataacagtcaaactgattatagagaaggctactaagtgactcatgggcgaggagcatagacagtgtggagacattgggcaaggggagaattcacatcctgggtgggacagagcaggacaatgcaagattccatcccactactcagaatggcatgctgcttaagacttttagattgtttatttctggaatttttcatttaatgtttttggaccatggttgaccatggttaactgagactgcagaaagcaaaaccatggataagggaggactactacaaaagcattaaattgatacatatttttt

SEQ ID NO: 296729 - DNA, 2000 bp, Artificial Sequence
  derived and/or modified sequence
cacaggaagtcttgcagctgaagggaggcactccttggcctccgcagccgatcacatgaaggtggtgccaagtctcctgctctccgtcctcctggcacaggtgtggctggtacccggcttggcccccagtcctcagtcgccagagaccccagcccctcagaaccagaccagcagggtagtgcaggctcccaaggaggaagaggaagatgagcaggaggccagcgaggagaaggccagtgaggaagagaaagcctggctgatggccagcaggcagcagcttgccaaggagacttcaaacttcggattcagcctgctgcgaaagatctccatgaggcacgatggcaacatggtcttctctccatttggcatgtccttggccatgacaggcttgatgctgggggccacagggccgactgaaacccagatcaagagagggctccacttgcaggccctgaagcccaccaagcccgggctcctgccttccctctttaagggactcagagagaccctctcccgcaacctggaactgggcctcacacaggggagttttgccttcatccacaaggattttgatgtcaaagagactttcttcaatttatccaagaggtattttgatacagagtgcgtgcctatgaattttcgcaatgcctcacaggccaaaaggctcatgaatcattacattaacaaagagactcgggggaaaattcccaaactgtttgatgagattaatcctgaaaccaaattaattcttgtggattacatcttgttcaaagggaaatggttgaccccatttgaccctgtcttcaccgaagtcgacactttccacctggacaagtacaagaccattaaggtgcccatgatgtacggtgcaggcaagtttgcctccacctttgacaagaattttcgttgtcatgtcctcaaactgccctaccaaggaaatgccaccatgctggtggtcctcatggagaaaatgggtgaccacctcgcccttgaagactacctgaccacagacttggtggagacatggctcagaaacatgaaaaccagaaacatggaagttttctttccgaagttcaagctagatcagaagtatgagatgcatgagctgcttaggcagatgggaatcagaagaatcttctcaccctttgctgaccttagtgaactctcagctactggaagaaatctccaagtatccagggttttacaaagaacagtgattgaagttgatgaaaggggcactgaggcagtggcaggaatcttgtcagaaattactgcttattccatgcctcctgtcatcaaagtggaccggccatttcatttcatgatctatgaagaaacctctggaatgcttctgtttctgggcagggtggtgaatccgactctcctataattcaggacacgcataagcacttcgtgctgtagtagatgctgaatctgaggtatcaaacacacacaggataccagcaatggatggcaggggagagtgttccttttgttcttaactagtttagggtgttctcaaataaatacagtagtccccacttatctgagggggatacattcaaagacccccagcagatgcctgaaacggtggacagtgctgaaccttatatatattttttcctacacatacatacctatgataaagtttaatttataaattaggcacagtaagagattaacaataataacaacattaagtaaaatgagttacttgaatgcaagcactgcaataccataacagtcaaactgattatagagaaggctactaagtgactcatgggcgaggagcatagacagtgtggagacattgggcaaggggagaattcacatcctgggtgggacagagcaggacaatgcaagattccatcccactactcagaatggcatgctgcttaagacttttagattgtttatttctggaatttttcatttaatgtttttggaccatggttgaccatggttaactgagactgcagaaagcaaaaccatggataagg

SEQ ID NO: 296730 - DNA, 2526 bp, Artificial Sequence
  derived and/or modified sequence
gagggctgtgtggctgagcagtgcaaagacctccatcctacactccacagggactgtacatacagattgggagctggagtggggtaagaggcgaattatagacacaaggggctcctctgcaggaaggaggccaagggaaagaggcttgaaaggcttgatatttcacccaccaccactcactgccggagtaagcaggtctccccttcccagggctgaggggaggcagggatgtgtgctgtcccagggctgagaagtggcaggtgagctggtgattccttactgcccaggttctgtctaggaaggtgcgtcctcaccatgctggatggtgtcctagtccaggagcaccccctgagctcctggcctagactccaaagggttgggtagatgagcaaagactttacaaagaccttaggcgatatatgtccaggagcacccaggaattactgggctaccactgcagactgcaggacaagctccaagaacaggaaggaagtcttgcagctgaagggaggcactccttggcctccgcagccgatcacatgaaggtggtgccaagtctcctgctctccgtcctcctggcacaggtgtggctggtacccggcttggcccccagtcctcagtcgccagagaccccagcccctcagaaccagaccagcagggtagtgcaggctcccaaggaggaagaggaagatgagcaggaggccagcgaggagaaggccagtgaggaagagaaagcctggctgatggccagcaggcagcagcttgccaaggagacttcaaacttcggattcagcctgctgcgaaagatctccatgaggcacgatggcaacatggtcttctctccatttggcatgtccttggccatgacaggcttgatgctgggggccacagggccgactgaaacccagatcaagagagggctccacttgcaggccctgaagcccaccaagcccgggctcctgccttccctctttaagggactcagagagaccctctcccgcaacctggaactgggcctcacacaggggagttttgccttcatccacaaggattttgatgtcaaagagactttcttcaatttatccaagaggtattttgatacagagtgcgtgcctatgaattttcgcaatgcctcacaggccaaaaggctcatgaatcattacattaacaaagagactcgggggaaaattcccaaactgtttgatgagattaatcctgaaaccaaattaattcttgtggattacatcttgttcaaagggaaatggttgaccccatttgaccctgtcttcaccgaagtcgacactttccacctggacaagtacaagaccattaaggtgcccatgatgtacggtgcaggcaagtttgcctccacctttgacaagaattttcgttgtcatgtcctcaaactgccctaccaaggaaatgccaccatgctggtggtcctcatggagaaaatgggtgaccacctcgcccttgaagactacctgaccacagacttggtggagacatggctcagaaacatgaaaaccagaaacatggaagttttctttccgaagttcaagctagatcagaagtatgagatgcatgagctgcttaggcagatgggaatcagaagaatcttctcaccctttgctgaccttagtgaactctcagctactggaagaaatctccaagtatccagggttttacaaagaacagtgattgaagttgatgaaaggggcactgaggcagtggcaggaatcttgtcagaaattactgcttattccatgcctcctgtcatcaaagtggaccggccatttcatttcatgatctatgaagaaacctctggaatgcttctgtttctgggcagggtggtgaatccgactctcctataattcaggacacgcataagcacttcgtgctgtagtagatgctgaatctgaggtatcaaacacacacaggataccagcaatggatggcaggggagagtgttccttttgttcttaactagtttagggtgttctcaaataaatacagtagtccccacttatctgagggggatacattcaaagacccccagcagatgcctgaaacggtggacagtgctgaaccttatatatattttttcctacacatacatacctatgataaagtttaatttataaattaggcacagtaagagattaacaataataacaacattaagtaaaatgagttacttgaatgcaagcactgcaataccataacagtcaaactgattatagagaaggctactaagtgactcatgggcgaggagcatagacagtgtggagacattgggcaaggggagaattcacatcctgggtgggacagagcaggacaatgcaagattccatcccactactcagaatggcatgctgcttaagacttttagattgtttatttctggaatttttcatttaatgtttttggaccatggttgaccatggttaactgagactgcagaaagcaaaaccatggataagggaggactactacaaaagcattaaattgatacatattttttaa

SEQ ID NO: 296731 - DNA, 1455 bp, Artificial Sequence
  derived and/or modified sequence
atgagcagaagcacccaggagctgctgggctaccactgcagactgcaggacaagctgcaggagcaggagggcagcctggccgccgagggcagacacagcctggccagcgccgccgaccacatgaaggtggtgcccagcctgctgctgagcgtgctgctggcccaggtgtggctggtgcccggcctggcccccagcccccagagccccgagacccccgccccccagaaccagaccagcagagtggtgcaggcccccaaggaggaggaggaggacgagcaggaggccagcgaggagaaggccagcgaggaggagaaggcctggctgatggccagcagacagcagctggccaaggagaccagcaacttcggcttcagcctgctgagaaagatcagcatgagacacgacggcaacatggtgttcagccccttcggcatgagcctggccatgaccggcctgatgctgggcgccaccggccccaccgagacccagatcaagagaggcctgcacctgcaggccctgaagcccaccaagcccggcctgctgcccagcctgttcaagggcctgagagagaccctgagcagaaacctggagctgggcctgacccagggcagcttcgccttcatccacaaggacttcgacgtgaaggagaccttcttcaacctgagcaagagatacttcgacaccgagtgcgtgcccatgaacttcagaaacgccagccaggccaagagactgatgaaccactacatcaacaaggagaccagaggcaagatccccaagctgttcgacgagatcaaccccgagaccaagctgatcctggtggactacatcctgttcaagggcaagtggctgacccccttcgaccccgtgttcaccgaggtggacaccttccacctggacaagtacaagaccatcaaggtgcccatgatgtacggcgccggcaagttcgccagcaccttcgacaagaacttcagatgccacgtgctgaagctgccctaccagggcaacgccaccatgctggtggtgctgatggagaagatgggcgaccacctggccctggaggactacctgaccaccgacctggtggagacctggctgagaaacatgaagaccagaaacatggaggtgttcttccccaagttcaagctggaccagaagtacgagatgcacgagctgctgagacagatgggcatcagaagaatcttcagccccttcgccgacctgagcgagctgagcgccaccggcagaaacctgcaggtgagcagagtgctgcagagaaccgtgatcgaggtggacgagagaggcaccgaggccgtggccggcatcctgagcgagatcaccgcctacagcatgccccccgtgatcaaggtggacagacccttccacttcatgatctacgaggagaccagcggcatgctgctgttcctgggcagagtggtgaaccccaccctgctgtag

SEQ ID NO: 296732 - protein, 603 aa, Artificial Sequence
  derived and/or modified sequence
MAIEQSLADKTRGPTTAEATASACTNRQPAHFYPWTRSTAPPESSPARAPMGLFQGVMQKYSSSLFKTSQLAPADPLIKAIKDGDEEALKTMIKEGKNLAEPNKEGWLPLHEAAYYGQVGCLKVLQRAYPGTIDQRTLQEETAVYLATCRGHLDCLLSLLQAGAEPDISNKSRETPLYKACERKNAEAVKILVQHNADTNHRCNRGWTALHESVSRNDLEVMQILVSGGAKVESKNAYGITPLFVAAQSGQLEALRFLAKYGADINTQASDNASALYEACKNEHEEVVEFLLSQGADANKTNKDGLLPLHIASKKGNYRIVQMLLPVTSRTRIRRSGVSPLHLAAERNHDEVLEALLSARFDVNTPLAPERARLYEDRRSSALYFAVVNNNVYATELLLQHGADPNRDVISPLLVAIRHGCLRTMQLLLDHGANIDAYIATHPTAFPATIMFAMKCLSLLKFLMDLGCDGEPCFSCLYGNGPHPPAPQPSSRFNDAPAADKEPSVVQFCEFVSAPEVSRWAGPIIDVLLDYVGNVQLCSRLKEHIDSFEDWAVIKEKAEPPRPLAHLCRLRVRKAIGKYRIKLLDTLPLPGRLIRYLKYENTQ

SEQ ID NO: 296733 - protein, 489 aa, Artificial Sequence
  derived and/or modified sequence
MRPADPLIKAIKDGDEEALKTMIKEGKNLAEPNKEGWLPLHEAAYYGQVGCLKVLQRAYPGTIDQRTLQEETAVYLATCRGHLDCLLSLLQAGAEPDISNKSRETPLYKACERKNAEAVKILVQHNADTNHRCNRGWTALHESVSRNDLEVMQILVSGGAKVESKNAYGITPLFVAAQSGQLEALRFLAKYGADINTQASDNASALYEACKNEHEEVVEFLLSQGADANKTNKDGLLPLHIASKKGNYRIVQMLLPVTSRTRIRRSGVSPLHLAAERNHDEVLEALLSARFDVNTPLAPERARLYEDRRSSALYFAVVNNNVYATELLLQHGADPNRDVISPLLVAIRHGCLRTMQLLLDHGANIDAYIATHPTAFPATIMFAMKCLSLLKFLMDLGCDGEPCFSCLYGNGPHPPAPQPSSRFNDAPAADKEPSVVQFCEFVSAPEVSRWAGPIIDVLLDYVGNVQLCSRLKEHIDSFEDWVLEGFVKY

SEQ ID NO: 296734 - protein, 635 aa, Artificial Sequence
  derived and/or modified sequence
MATQISTRGSQCTIGQEEYSLYSSLSEDELVQMAIEQSLADKTRGPTTAEATASACTNRQPAHFYPWTRSTAPPESSPARAPMGLFQGVMQKYSSSLFKTSQLAPADPLIKAIKDGDEEALKTMIKEGKNLAEPNKEGWLPLHEAAYYGQVGCLKVLQRAYPGTIDQRTLQEETAVYLATCRGHLDCLLSLLQAGAEPDISNKSRETPLYKACERKNAEAVKILVQHNADTNHRCNRGWTALHESVSRNDLEVMQILVSGGAKVESKNAYGITPLFVAAQSGQLEALRFLAKYGADINTQASDNASALYEACKNEHEEVVEFLLSQGADANKTNKDGLLPLHIASKKGNYRIVQMLLPVTSRTRIRRSGVSPLHLAAERNHDEVLEALLSARFDVNTPLAPERARLYEDRRSSALYFAVVNNNVYATELLLQHGADPNRDVISPLLVAIRHGCLRTMQLLLDHGANIDAYIATHPTAFPATIMFAMKCLSLLKFLMDLGCDGEPCFSCLYGNGPHPPAPQPSSRFNDAPAADKEPSVVQFCEFVSAPEVSRWAGPIIDVLLDYVGNVQLCSRLKEHIDSFEDWAVIKEKAEPPRPLAHLCRLRVRKAIGKYRIKLLDTLPLPGRLIRYLKYENTQ

SEQ ID NO: 296735 - DNA, 1812 bp, Artificial Sequence
  derived and/or modified sequence
atggctattgaacagtctctcgctgataagacacgtggaccgacaactgcagaggcgactgccagcgcctgcaccaaccgtcagccagcacatttctacccctggacacgctcaacagctccaccagaatcttctccagccagggctcctatgggactttttcagggtgtgatgcagaagtacagttcctccctgttcaaaaccagccagctggcgcctgcagatccgctcatcaaggccattaaagatggtgacgaagaagcgctgaagactatgatcaaggaaggaaaaaacctggctgagcccaacaaggagggctggctaccacttcacgaggccgcctactatgggcaagtgggatgtctgaaagtccttcagcgggcataccctggtaccattgatcagagaacacttcaggaggaaaccgctgtctatctagcaacttgtcgcgggcacctggactgcctactcagcttgctccaggctggcgcagagcccgacatcagcaacaagtccagagagacgcccttatacaaggcttgtgagcggaaaaatgccgaggcggtgaaaattctggtccagcataatgctgatacaaatcaccgatgtaatcgggggtggactgcgttgcacgaaagtgttagtcgaaatgacctcgaagtgatgcagatcttagtgtcaggcggcgccaaggtggagagcaagaatgcgtatggaataacccccttgttcgtggctgcccaaagtggccaactcgaggccctccgatttctggccaagtacggagcggatattaatactcaggcctcagataatgcatccgccttgtatgaagcctgcaagaacgagcacgaggaggtggtcgagtttttgctgagccagggtgctgacgccaataaaaccaacaaggacgggctgctcccactgcatattgcctccaagaaaggtaattatcgcattgtgcagatgctcctgcccgtgaccagccgcactaggatcaggcgctcaggagtctcccctttacacctagccgcagaacgtaatcatgatgaggtgcttgaggccctgctatccgcccgttttgacgtgaacaccccacttgccccggaaagggcgcgcctttatgaggaccgtcgctcatccgccctgtatttcgcggtggttaataataacgtgtacgcgaccgagctactcttgcagcacggcgcagatccaaacagagacgtgatctctccgctcctcgtcgccattagacacggctgcttgcgaacgatgcagctgctcctcgatcacggcgcgaatatcgacgcctatattgccactcaccctactgcctttcccgccaccataatgttcgctatgaagtgtctgtctctactgaaatttttgatggacctgggctgcgatggagagccgtgcttctcatgtctttacggcaacgggccgcatcctccggctccccagcctagcagcagattcaacgacgctccagctgccgataaggagccctctgtcgtccagttttgtgaattcgtctccgcacctgaggtatccaggtgggccggccccattatcgacgtgctgctggattacgtcggcaacgtccagttgtgtagccgtcttaaggagcatatcgactctttcgaagattgggcagtcataaaagaaaaagcagaaccacccaggcctctggcacacctgtgcagactccgagtccgcaaagctatcggtaaataccggatcaagctccttgacacattgcccttgccagggcgtttaatcaggtatctgaagtacgagaatacacaatag

SEQ ID NO: 296736 - DNA, 1908 bp, Artificial Sequence
  derived and/or modified sequence
atggccactcaaatctcaacccgcggttcacaatgcacgatcggccaggaagagtattctctgtatagcagcctgagcgaggatgaactagtgcagatggctatcgagcagtcgttggctgacaaaaccaggggacctacaacggcagaggctacagccagcgcatgtactaacagacaaccagcacacttctatccctggacacgatcgactgccccaccggagtcaagtccagccagagccccaatgggtctgttccaaggcgttatgcagaagtacagctctagccttttcaagacctcccagcttgcccccgcagacccgctcatcaaggccattaaggacggagatgaggaggctctgaaaacaatgatcaaagagggtaagaatctcgccgagccaaataaggaaggctggttgccgctgcacgaggcagcatattacgggcaggtgggatgtttgaaggtgcttcagcgggcctatcccggaaccatcgaccagcgcaccctccaagaggagaccgccgtttatcttgctacatgtagaggtcatttagattgcttgctttccctgctgcaagcaggagccgagcccgatattagtaataaatctcgcgaaacccctttgtacaaagcctgcgagcgcaagaatgcggaggccgtaaagattctcgtccaacacaatgcggatactaatcaccgatgtaaccgaggctggaccgctctccatgagtcagtaagtcgtaatgacctggaagttatgcaaatcctcgtgagcggtggcgcaaaagtggaatcgaagaatgcctatggtatcacccccctgtttgtggccgcccagtctggacagctcgaggctcttcgtttcctggcgaaatacggagcagatatcaatactcaggccagtgacaatgcatccgccctctacgaagcctgcaaaaatgaacatgaagaagtcgtggaattcctcttgtctcaaggagccgatgccaacaagaccaataaggacggcttattgccccttcacattgcaagcaagaagggaaactatcgcattgtgcagatgctgctgccggtgacaagtaggacccggatcaggagatcaggtgtctctcccctccacctcgccgccgagcgaaatcacgacgaggtgcttgaggctctgcttagcgcgcgtttcgacgtaaacactccgctggcgcctgagcgcgcccgactatacgaggaccgcaggtccagcgctttatattttgccgttgttaataataacgtgtacgcaaccgaactgctgcttcagcacggcgccgatccaaaccgcgacgtgattagccctctgctcgtggctatcagacacggatgtctgaggactatgcaacttttacttgatcatggagcaaacatcgacgcctatattgcaactcaccctacggcctttcctgctactatcatgttcgctatgaagtgtctctcattgcttaaatttttaatggatctcgggtgtgacggcgaaccttgcttctcttgcctgtatggaaatggccctcacccgccggcccctcaaccctctagtcgcttcaacgacgcacctgccgctgataaggagccctcggtggttcagttttgtgagtttgtttctgccccggaggtctcaaggtgggccggacctattatcgatgtgctgctagattatgtaggaaacgtgcaactttgctctcggctgaaggaacacatcgatagttttgaagactgggccgtgattaaggagaaggccgaaccaccccgaccgctggctcacctttgccgtctcagggtgcgcaaagctatcgggaagtacaggattaagctgctggatacactcccattgcctgggcggctcatccggtacttaaaatacgaaaacacccaatag

SEQ ID NO: 296737 - DNA, 1812 bp, Artificial Sequence
  derived and/or modified sequence
atggccatcgagcagagcctggccgacaagacccggggccccaccacagctgaggccacagccagcgcctgcaccaaccggcagcctgcccacttctacccctggaccaggagcacagcccctcctgagagcagccctgcccgggcccccatgggcctcttccagggcgtgatgcagaagtacagcagcagcctcttcaagaccagccagctggccccagctgaccccctcatcaaggccatcaaggatggagatgaggaggccctgaagaccatgatcaaggagggcaagaacctggccgagcccaacaaggagggctggctgcccctgcatgaagctgcctactacggccaggtgggctgcctgaaggtgctgcagagggcctacccaggcaccatcgaccagaggaccctgcaggaggagacagctgtgtacctggccacctgccggggccacctggactgcctgctgagcctgctgcaggccggggctgagccagacatcagcaacaagagccgggagacccccctgtacaaggcctgtgagaggaagaatgctgaggccgtgaagatcctggtgcagcacaatgctgacaccaaccaccgctgcaacagaggctggacagccctgcatgaatctgtgtccagaaatgacctggaggtgatgcagatcctggtgtctggaggagccaaggtggagagcaagaatgcctacggcatcacccccctgtttgtggccgcccagagcggccagctggaggccctgcgcttcctggccaagtatggagctgacatcaacacccaggccagtgacaatgccagcgccctgtatgaggcctgcaagaatgagcacgaggaggtggtggagttcctgctgagccagggcgcagatgccaacaagaccaacaaggatggcctgctgcccctgcacatcgccagcaagaagggcaactaccgcatcgtgcagatgctgctgcctgtgaccagcaggacccgcatccgccgcagcggcgtgagccccctgcacctggccgctgagagaaatcatgatgaggtgctggaggccctgctgagcgccaggtttgatgtgaacacccccctggcccctgagcgggcccggctgtatgaggaccggcgcagcagcgccctgtactttgctgtggtgaacaacaacgtgtatgccacagagctgctgctgcagcacggggctgaccccaacagagatgtgatcagccccctgctggtggccatcagacatggctgcctgcggaccatgcagctgctgctggaccatggagccaacattgatgcctacatcgccacccaccccacagccttccctgccaccatcatgtttgccatgaagtgcctgagcctgctgaagttcctgatggacctgggctgtgatggagagccctgcttcagctgcctgtatggaaatggcccccaccccccagccccccagcccagcagccgcttcaatgatgccccagctgctgacaaggagcccagcgtggtgcagttctgtgaatttgtgtctgcccctgaggtgagccgctgggccggccccatcattgatgtgctgctggactatgtgggcaatgtgcagctgtgcagccggctgaaggagcacatcgacagctttgaggactgggccgtcatcaaggagaaggccgagcccccccggcccctggcccacctgtgccgcctgcgggtgaggaaggccatcggcaagtaccgcatcaagctgctggacaccctgcccctgcccggccgcctcatccgctacctgaagtatgagaacacccagtag

SEQ ID NO: 296738 - DNA, 1908 bp, Artificial Sequence
  derived and/or modified sequence
atggccacccagatcagcacccggggcagccagtgcaccatcggccaggaggagtacagcctgtacagcagcctgtctgaagatgagctggtgcagatggccatcgagcagagcctggccgacaagacccggggccccaccacagctgaggccacagccagcgcctgcaccaaccggcagcctgcccacttctacccctggaccaggagcacagcccctcctgagagcagccctgcccgggcccccatgggcctcttccagggcgtgatgcagaagtacagcagcagcctcttcaagaccagccagctggccccagctgaccccctcatcaaggccatcaaggatggagatgaggaggccctgaagaccatgatcaaggagggcaagaacctggccgagcccaacaaggagggctggctgcccctgcatgaagctgcctactacggccaggtgggctgcctgaaggtgctgcagagggcctacccaggcaccatcgaccagaggaccctgcaggaggagacagctgtgtacctggccacctgccggggccacctggactgcctgctgagcctgctgcaggccggggctgagccagacatcagcaacaagagccgggagacccccctgtacaaggcctgtgagaggaagaatgctgaggccgtgaagatcctggtgcagcacaatgctgacaccaaccaccgctgcaacagaggctggacagccctgcatgaatctgtgtccagaaatgacctggaggtgatgcagatcctggtgtctggaggagccaaggtggagagcaagaatgcctacggcatcacccccctgtttgtggccgcccagagcggccagctggaggccctgcgcttcctggccaagtatggagctgacatcaacacccaggccagtgacaatgccagcgccctgtatgaggcctgcaagaatgagcacgaggaggtggtggagttcctgctgagccagggcgcagatgccaacaagaccaacaaggatggcctgctgcccctgcacatcgccagcaagaagggcaactaccgcatcgtgcagatgctgctgcctgtgaccagcaggacccgcatccgccgcagcggcgtgagccccctgcacctggccgctgagagaaatcatgatgaggtgctggaggccctgctgagcgccaggtttgatgtgaacacccccctggcccctgagcgggcccggctgtatgaggaccggcgcagcagcgccctgtactttgctgtggtgaacaacaacgtgtatgccacagagctgctgctgcagcacggggctgaccccaacagagatgtgatcagccccctgctggtggccatcagacatggctgcctgcggaccatgcagctgctgctggaccatggagccaacattgatgcctacatcgccacccaccccacagccttccctgccaccatcatgtttgccatgaagtgcctgagcctgctgaagttcctgatggacctgggctgtgatggagagccctgcttcagctgcctgtatggaaatggcccccaccccccagccccccagcccagcagccgcttcaatgatgccccagctgctgacaaggagcccagcgtggtgcagttctgtgaatttgtgtctgcccctgaggtgagccgctgggccggccccatcattgatgtgctgctggactatgtgggcaatgtgcagctgtgcagccggctgaaggagcacatcgacagctttgaggactgggccgtcatcaaggagaaggccgagcccccccggcccctggcccacctgtgccgcctgcgggtgaggaaggccatcggcaagtaccgcatcaagctgctggacaccctgcccctgcccggccgcctcatccgctacctgaagtatgagaacacccagtag

SEQ ID NO: 296739 - DNA, 1812 bp, Artificial Sequence
  derived and/or modified sequence
atggccatcgagcagagcctggccgacaagacccggggccccaccaccgccgaggcaactgcaagtgcctgcaccaaccgccagcctgcgcacttttacccgtggacccgctcaacggctccaccagagtcctccccagcccgtgctcctatgggactgttccagggagtcatgcagaagtacagcagctctttgttcaaaacctctcagttggcacctgctgaccctctcataaaagccataaaggatggcgacgaggaagctttgaaaaccatgataaaagagggtaagaacctcgcagagccgaataaggagggttggttgccattacacgaggctgcttactatggccaggtcggctgcctcaaggtgttacaacgcgcgtatcctggtaccatagaccagcgcacgttgcaagaagaaactgcggtttacctagcgacgtgtcggggacaccttgattgcctgctgtctctgctccaggctggggctgaacctgacatctcaaacaagtctcgcgagacccccctttataaggcctgtgaaaggaagaacgcagaggctgtgaagatcctggtacagcacaatgccgatactaaccatagatgtaacagaggttggacagccctccacgaatccgtgagtcgcaacgatctggaggtaatgcagattctggtctccggtggtgctaaggttgaatccaaaaacgcatacggaatcactccattgtttgtcgccgcccagtccggacagctggaggcgctgaggtttctggctaaatatggagccgacatcaatactcaggcctccgacaatgcttcagctttgtatgaggcatgcaagaatgaacatgaggaggttgttgagttcctccttagccaaggggccgatgcgaacaaaaccaataaggacggtctgttgcccctgcacatcgcgtccaaaaaggggaactaccggattgtgcagatgcttctgcctgtgacaagtaggactcggattcgcagatctggcgtgtccccccttcacctggccgccgagcgaaaccatgacgaggtgctggaagcactgttgtcagctaggttcgatgtgaacacacctctggccccggagagagcccgtctgtacgaggatcgaaggtcaagtgcactgtacttcgccgtggtcaacaataatgtgtacgctacggaacttctgctacagcacggcgccgacccaaatagggatgtcatcagccctctcctcgttgccatcaggcatggatgcctccggaccatgcaactgcttttggaccacggagccaacattgacgcttatattgccacacatcctacagctttccctgccactattatgtttgcaatgaagtgcctgtccttgctcaagttcctgatggatctgggatgtgatggcgagccatgtttcagctgcctctacggaaatggccctcaccccccagcaccacagccctcatcccgatttaacgacgctcctgctgctgataaggagcccagcgtcgtgcagttctgtgaattcgtgtcggctccagaggtctctcggtgggccggacctatcatcgacgtacttctcgattacgtggggaatgtccagctgtgttctcgcttgaaggagcatatagatagctttgaagattgggcagtaatcaaagaaaaagcagagccacctcggcccctggcccacctatgccgactgcgagtccgtaaagcaatagggaaataccggatcaagcttctcgatactctgcccctgcccggcagacttatcagatacctcaaatacgagaatacccagtag

SEQ ID NO: 296740 - DNA, 1908 bp, Artificial Sequence
  derived and/or modified sequence
atggccacccagatcagcacccggggcagccagtgcaccatcggccaggaggagtattccttgtattcctcactgagtgaagacgagttggtccagatggccatcgagcagagcctggcagataaaacgagggggcccaccaccgcagaggccaccgcgagcgcatgtacaaatcggcagcccgcccacttctacccttggactagaagtactgcaccgccggagtcctctcccgctcgggctcccatggggctcttccagggggtgatgcaaaagtactcgtctagcctgttcaagacaagccagttagcccctgccgaccctctgatcaaagcaattaaggacggtgacgaagaagctttgaagaccatgattaaagaaggaaaaaatctggcagagcctaacaaggagggttggctgcctttacacgaggccgcatattacggtcaggtagggtgtctgaaagttttacagagggcatatcctggcacaatcgatcagagaaccctgcaggaggaaactgctgtgtaccttgcaacatgccggggccatctggactgcctattgtccttgctccaggcaggggcggaaccggatatttccaataaatccagggagacgccactgtacaaagcttgcgaacggaagaacgccgaagctgtgaaaatcctggtacagcacaatgctgacaccaaccatcgatgcaatcgcggctggacagcgctccacgagtcagtgagccggaatgatttggaggttatgcagattttagtatccgggggggccaaagtggagagcaaaaatgcctacggaattacaccacttttcgttgccgcccagagtggccagctcgaggcactccgcttcctggccaagtacggcgccgatattaacacccaggcttctgataacgcgagtgctctctacgaggcctgtaaaaatgagcacgaagaagtggtggagtttctcttaagtcaaggcgcagatgctaacaagacaaacaaagacggtttgctccctctccacatcgctagcaaaaaaggcaattacagaatcgtgcagatgctgttaccagtaacatcccggacacggatcaggcggtccggcgtctctccccttcacctggctgcagagaggaaccacgatgaggtgttggaagccctgctgtccgctaggtttgatgttaacactcctctggctccagaacgcgcccggttgtacgaagaccgccgttcatcagccctgtattttgcggtcgttaataacaacgtctacgcgactgaactgctgctgcaacatggggccgatcctaatagagacgtgatttccccactattggttgcgattcggcatggctgcctgcgcactatgcagctcttattagatcacggagctaatatcgacgcctacatcgccacacacccaacagcctttcctgccacaataatgttcgccatgaagtgtctgtctctgttaaaattcctgatggatctgggatgcgatggcgaaccctgtttcagctgtttgtatggcaatggccctcaccccccggccccgcagccttcctcaagattcaacgatgcaccagcagccgacaaagagccgtctgtggtgcaattttgcgaattcgtatcagcccccgaggtgtctcgctgggccggacccattatcgatgtgctcctcgattacgtgggcaatgtgcagctctgcagccgtctgaaggaacacatagactcttttgaagactgggcggtcatcaaagagaaagccgagcctccgcgcccattggctcacttgtgcagactccgggtgcggaaggctataggtaagtaccgtatcaaactgctcgatactttaccacttcctggaagactaatccggtatttgaagtacgaaaatacacagtag

SEQ ID NO: 296741 - DNA, 2729 bp, Artificial Sequence
  derived and/or modified sequence
attcgatgcacccggaggaacggaaggcaggattgcagcttcctcagtgcaacctccaaacaggaaatctgagatgtataacatcttatagtttggcttgtcaacgttggtcatgcggtggccccaaaataaactccctgcttcaaaggacagcgtttcagaactgcctggcagagcagccagaagcttggggccagggcagaaggaaaactcggggagcatgttctgaattaagacactttcaagaaaatcctttgtattacccctgaattgtacccttgtttcagagcctaacagggttttctgatttgctgttccctcctccccactgggtgtctgttctggaggccagggtgagaggtggaggaggagtacagcctgtacagcagcctgagcgaggatgaactggtgcagatggccatcgagcagagcctagcggacaagacaaggggcccaaccactgctgaggccaccgcgtctgcatgtaccaaccgccaacctgcccatttctacccatggaccaggtccactgcacctcctgagagttcgccggcccgggccccaatgggcttgttccaaggggtcatgcagaaatacagcagcagcttgttcaagacctcccagctggcgcctgcggaccccttgataaaggccatcaaggatggcgatgaagaggccttgaagaccatgatcaaggaagggaagaatctcgcagagcccaacaaggagggctggctgccgctgcacgaggccgcatactatggccaggtgggctgcctgaaagtcctgcagcgagcgtacccagggaccatcgaccagcgcaccctgcaggaggaaacagccgtttacttggcaacgtgcaggggccacctggactgtctcctgtcactgctccaagcaggggcagagccggacatctccaacaaatcccgagagacaccgctctacaaagcctgcgagcgcaagaacgcggaggccgtgaagattctggtgcagcacaatgcagacaccaaccaccgctgcaaccgcggctggaccgctctgcacgagtctgtgtctcgcaatgacctggaggtcatgcagatcctggtgagcggaggagccaaggtggaatccaagaacgcctacggcatcacccccttgttcgtggccgcccagagtggacagttggaggccttgaggttcttagccaagtacggtgctgacatcaacacgcaggccagcgacaacgcgtctgccctctacgaggcctgcaagaatgagcatgaggaggtggtggagtttctgctgtcacagggtgccgacgccaacaagaccaacaaggacggcttgctcccgctgcacatcgcctccaagaagggcaactacaggatcgtgcagatgctgctgccggtgaccagccgcacgcgcatacgccgtagcggcgtcagtccgctgcacctggcggccgagcgcaaccacgacgaggtgctggaggcgctgctgagcgcgcgcttcgacgtgaacacgccgctggcccccgagcgcgcgcgcctctacgaagaccggcgcagctccgcgctgtacttcgcggtggtcaacaacaacgtgtacgccaccgagctgctgctgcaacacggcgccgaccccaaccgcgacgtcatcagccccttgctcgtggccatccgccacggctgcctgcgcacaatgcagctgctgctggaccacggcgcgaacatcgacgcctatatcgccacgcaccccaccgccttccccgccaccatcatgttcgccatgaagtgcctgtcgctgctcaagttcctcatggacctgggctgcgacggcgagccctgcttctcatgcctctacggcaacggcccgcacccgccggccccgcagccctccagcaggttcaacgacgcgcccgcggccgacaaggagcccagcgtggtgcagttctgtgagttcgtatctgccccagaggtgagccgctgggcggggcccatcatcgatgtcctcctggactacgtgggcaacgtgcagctctgctcgcggctgaaggaacacatcgacagctttgaggactgggccgtcatcaaggagaaggcagaacctccaagacctctggctcacctttgccgactgcgggttcgaaaggccattgggaaataccgtataaaactcctagacaccttgccgctcccaggcaggctgattagatacctgaaatacgagaacacccagtaactggggccacggggagagaggagtagcccctcagactcttcttactaagtctcaggacgtcggtgttcccaactccaaggggacctggtgacagacgaggctgcaggctgcctccctctcagcctggacagctaccaggatctcactgggtctcagggcccagagctttggccagagcagagaacagaatgtgtcaaggagaagaatcatttgtttacaaactgatgagcagatcccagaccttctctaccttcaggaatggcagaaacctctattcctggggccagggcagagcttgaggtgttctggggaaggtggtgctcagagccttccctgtgcccctccacttgttctggaaaactcaccacttgacttcagagctttctctccaaagactaagatgaagacgtggcccaaggtagggggtagggggagcctgggtcttggagggctttgttaagtattaatataataaatgttacacatgtgacacctgcccagtg

SEQ ID NO: 296742 - DNA, 2842 bp, Artificial Sequence
  derived and/or modified sequence
acaaatgatgacatcacgtgagggccaaagctccgggatcctctctgaagtgagagtctgtattcgatgcacccggaggaacggaaggcaggattgcagcttcctcagtgcaacctccaaacaggaaatctgagatgtataacatcttatagtttggcttgtcaacgttggtcatgcggtggccccaaaataaactccctgcttcaaaggacagcgtttcagaactgcctggcagagcagccagaagcttggggccagggcagaaggaaaactcggggagcatgttctgaattaagacactttcaagaaaatcctttgtattacccctgaattgtacccttgtttcagagcctaacagggttttctgatttgctgttccctcctccccactgggtgtctgttctggaggccagggtgagaggtggaggaggatggccacgcagatcagcactcggggcagccagtgtaccattgggcaggaggagtacagcctgtacagcagcctgagcgaggatgaactggtgcagatggccatcgagcagagcctagcggacaagacaaggggcccaaccactgctgaggccaccgcgtctgcatgtaccaaccgccaacctgcccatttctacccatggaccaggtccactgcacctcctgagagttcgccggcccgggccccaatgggcttgttccaaggggtcatgcagaaatacagcagcagcttgttcaagacctcccagctggcgcctgcggaccccttgataaaggccatcaaggatggcgatgaagaggccttgaagaccatgatcaaggaagggaagaatctcgcagagcccaacaaggagggctggctgccgctgcacgaggccgcatactatggccaggtgggctgcctgaaagtcctgcagcgagcgtacccagggaccatcgaccagcgcaccctgcaggaggaaacagccgtttacttggcaacgtgcaggggccacctggactgtctcctgtcactgctccaagcaggggcagagccggacatctccaacaaatcccgagagacaccgctctacaaagcctgcgagcgcaagaacgcggaggccgtgaagattctggtgcagcacaatgcagacaccaaccaccgctgcaaccgcggctggaccgctctgcacgagtctgtgtctcgcaatgacctggaggtcatgcagatcctggtgagcggaggagccaaggtggaatccaagaacgcctacggcatcacccccttgttcgtggccgcccagagtggacagttggaggccttgaggttcttagccaagtacggtgctgacatcaacacgcaggccagcgacaacgcgtctgccctctacgaggcctgcaagaatgagcatgaggaggtggtggagtttctgctgtcacagggtgccgacgccaacaagaccaacaaggacggcttgctcccgctgcacatcgcctccaagaagggcaactacaggatcgtgcagatgctgctgccggtgaccagccgcacgcgcatacgccgtagcggcgtcagtccgctgcacctggcggccgagcgcaaccacgacgaggtgctggaggcgctgctgagcgcgcgcttcgacgtgaacacgccgctggcccccgagcgcgcgcgcctctacgaagaccggcgcagctccgcgctgtacttcgcggtggtcaacaacaacgtgtacgccaccgagctgctgctgcaacacggcgccgaccccaaccgcgacgtcatcagccccttgctcgtggccatccgccacggctgcctgcgcacaatgcagctgctgctggaccacggcgcgaacatcgacgcctatatcgccacgcaccccaccgccttccccgccaccatcatgttcgccatgaagtgcctgtcgctgctcaagttcctcatggacctgggctgcgacggcgagccctgcttctcatgcctctacggcaacggcccgcacccgccggccccgcagccctccagcaggttcaacgacgcgcccgcggccgacaaggagcccagcgtggtgcagttctgtgagttcgtatctgccccagaggtgagccgctgggcggggcccatcatcgatgtcctcctggactacgtgggcaacgtgcagctctgctcgcggctgaaggaacacatcgacagctttgaggactgggccgtcatcaaggagaaggcagaacctccaagacctctggctcacctttgccgactgcgggttcgaaaggccattgggaaataccgtataaaactcctagacaccttgccgctcccaggcaggctgattagatacctgaaatacgagaacacccagtaactggggccacggggagagaggagtagcccctcagactcttcttactaagtctcaggacgtcggtgttcccaactccaaggggacctggtgacagacgaggctgcaggctgcctccctctcagcctggacagctaccaggatctcactgggtctcagggcccagagctttggccagagcagagaacagaatgtgtcaaggagaagaatcatttgtttacaaactgatgagcagatcccagaccttctctaccttcaggaatggcagaaacctctattcctggggccagggcagagcttgaggtgttctggggaaggtggtgctcagagccttccctgtgcccctccacttgttctggaaaactcaccacttgacttcagagctttctctccaaagactaagatgaagacgtggcccaaggtagggggtagggggagcctgggtcttggagggctttgttaagtattaatataataaatgttacacatgtgacacctgcccagtg

SEQ ID NO: 296743 - DNA, 1812 bp, Artificial Sequence
  derived and/or modified sequence
atggcaatcgaacagagcctcgctgataaaacgcgcggtcctactactgccgaagccacagccagtgcttgtacaaatcgtcagcctgcccacttttacccatggacccggagcacggccccacctgagtcctctcccgcaagggcccctatgggcctctttcagggagtcatgcagaagtattcgtccagcctctttaaaaccagccagctggcccctgccgaccccctgattaaggccattaaggacggggacgaagaagccctcaaaacaatgattaaggaagggaaaaacctagcagaacctaataaagaaggttggctgcctctgcatgaagccgcatactacggtcaggtaggttgcctaaaagtgctgcaacgggcatacccgggaaccatagatcaacggactctgcaggaggagacagccgtctatctggccacgtgtagaggacatctggattgtttattgagcctgctgcaagctggcgctgaaccggatatctcaaacaagagcagggagactccattatacaaggcttgtgaacgtaaaaacgctgaggccgtcaagattctcgtccaacacaatgccgacaccaatcatcgctgtaaccgtgggtggacagccctacatgaatccgtaagtcggaatgatctcgaggttatgcagatacttgtctccggcggagccaaggttgagagcaaaaatgcttacggcataactcctttattcgtggctgcccaatcaggccagctggaagccctcaggttcctcgcgaagtatggtgctgatatcaacacacaagccagcgataatgcctctgctttgtatgaagcatgtaaaaatgagcacgaagaagtggtggaattcttgctgagtcagggtgctgatgccaacaagacaaataaggatgggttactgccgttgcacattgcttccaaaaaagggaattaccgcatcgtacagatgctgttgcccgtgacttccaggaccaggatacgcagatccggcgtctccccattacacctggcagcggaaaggaaccacgacgaagtgctggaggccttactgagtgcccgatttgacgtgaatactccgttagcaccagaaagggccaggttatacgaggatagacgatcatccgctctttactttgccgtagtgaacaacaacgtgtatgctactgaattactactgcaacacggcgctgacccaaatagggacgtgatctcacctctgctcgtggccatcagacatggttgcctgaggactatgcaattactgctggatcatggtgccaatattgacgcatacatagcgacgcacccaacagcctttccagccaccattatgttcgccatgaaatgtctctctcttctcaagttcctgatggacctgggctgcgacggtgagccatgtttctcatgcttgtacgggaatggtccacatccccctgcaccgcagccctcgtcacgattcaatgacgccccagccgctgacaaggaacccagtgtggtgcaattttgcgaatttgtatccgccccagaagtgtctagatgggctgggcctataattgatgtgctgcttgattatgtgggaaacgtgcaattgtgctcccggctgaaggagcatatcgactctttcgaggactgggctgtgataaaagaaaaagccgaaccgccacgtcccctggctcacttatgccgactcagagtccgtaaggcaattggtaaataccgaatcaaactcctggacacacttccgctccctgggcgtcttatcagatatctcaagtatgagaacacacagtag

SEQ ID NO: 296744 - DNA, 1908 bp, Artificial Sequence
  derived and/or modified sequence
atggctacacagatttctacaagggggagtcagtgtaccattgggcaggaggagtactccctctactcaagccttagtgaggatgagctggttcagatggctattgagcaatccctagccgacaagactcgcggaccgacaaccgccgaagccacagccagcgcctgtaccaaccggcagcccgctcatttctatccatggacgagatcaaccgcaccacccgagtcctcgccggcaagggctcccatggggctgtttcaaggcgtgatgcagaagtattccagcagtctatttaaaactagccagctggctcccgctgaccctttgataaaggcaattaaagatggggatgaggaagctctcaagactatgataaaagagggcaagaacctcgctgaaccgaacaaagaaggctggctccccttgcacgaagccgcttactacggccaggtaggttgcctgaaagtgttgcaacgtgcctacccaggaactatagatcagcggactttgcaggaggagaccgccgtgtacttggccacttgcaggggccacctggattgtctcctgtcactgcttcaggccggagctgagcccgacatttcgaacaagtcaagagagactccgttatataaggcctgtgagcgtaagaacgccgaggcagtgaagattctagtgcaacacaacgccgataccaatcatcggtgcaatcgaggctggaccgcactccatgagtcggtcagcaggaacgatcttgaggtcatgcagatactggtcagcggaggcgcaaaagtcgagagcaaaaatgcgtatggcattaccccgttatttgttgctgcacagagtggacagttagaggcactcaggtttcttgccaagtatggtgcagacattaatacacaagcgagcgacaacgcttcggcgctctacgaggcctgtaagaacgaacacgaagaggtagttgagttcctactctcgcagggcgctgacgctaacaagacgaacaaggacgggctgctcccacttcacattgcttccaagaagggcaattacaggattgtgcagatgctgttgccagtgacatctaggaccagaattagacgttctggagtgtcaccgcttcacctcgcagccgagcgaaaccacgatgaagttttggaagccctgctgtcggctcgcttcgatgttaatacccctctcgccccagagagggcacggctttatgaagaccgcaggtcctcagctctctacttcgcagtggtcaataataatgtctatgccacagagctgctcttgcagcatggcgctgatccgaatcgcgatgtcatatcccctctactagtagcgatccggcatggttgcttgagaaccatgcagttgctactagaccacggtgcaaatatcgatgcttacatcgctactcacccaaccgcctttcctgctactatcatgttcgccatgaaatgcctgtccctgctcaagtttctgatggacctcggttgtgacggggaaccatgtttctcatgcctgtacggaaacgggccacaccctcccgctccacagccctcctcccggttcaatgacgccccagcagccgataaagaaccatcagtggtccagttctgtgaatttgtctctgcaccagaggtttccaggtgggccggtcccatcatcgatgtgctcctagactacgttggaaacgtgcagctgtgctctcggctgaaagagcacattgactcctttgaagattgggccgtgatcaaagaaaaggccgagcctcccaggccactcgcacatttgtgtcgtctgcgcgttaggaaggccattgggaagtatcgcataaagctccttgacaccctgccactccctggcagattgatcagatatttgaagtatgagaatacccagtag

SEQ ID NO: 296745 - DNA, 1812 bp, Artificial Sequence
  derived and/or modified sequence
atggccatcgagcagagcctggccgacaagaccagaggccccaccaccgccgaggccaccgccagcgcctgcaccaacagacagcccgcccacttctacccctggaccagaagcaccgccccccccgagagcagccccgccagagcccccatgggcctgttccagggcgtgatgcagaagtacagcagcagcctgttcaagaccagccagctggcccccgccgaccccctgatcaaggccatcaaggacggcgacgaggaggccctgaagaccatgatcaaggagggcaagaacctggccgagcccaacaaggagggctggctgcccctgcacgaggccgcctactacggccaggtgggctgcctgaaggtgctgcagagagcctaccccggcaccatcgaccagagaaccctgcaggaggagaccgccgtgtacctggccacctgcagaggccacctggactgcctgctgagcctgctgcaggccggcgccgagcccgacatcagcaacaagagcagagagacccccctgtacaaggcctgcgagagaaagaacgccgaggccgtgaagatcctggtgcagcacaacgccgacaccaaccacagatgcaacagaggctggaccgccctgcacgagagcgtgagcagaaacgacctggaggtgatgcagatcctggtgagcggcggcgccaaggtggagagcaagaacgcctacggcatcacccccctgttcgtggccgcccagagcggccagctggaggccctgagattcctggccaagtacggcgccgacatcaacacccaggccagcgacaacgccagcgccctgtacgaggcctgcaagaacgagcacgaggaggtggtggagttcctgctgagccagggcgccgacgccaacaagaccaacaaggacggcctgctgcccctgcacatcgccagcaagaagggcaactacagaatcgtgcagatgctgctgcccgtgaccagcagaaccagaatcagaagaagcggcgtgagccccctgcacctggccgccgagagaaaccacgacgaggtgctggaggccctgctgagcgccagattcgacgtgaacacccccctggcccccgagagagccagactgtacgaggacagaagaagcagcgccctgtacttcgccgtggtgaacaacaacgtgtacgccaccgagctgctgctgcagcacggcgccgaccccaacagagacgtgatcagccccctgctggtggccatcagacacggctgcctgagaaccatgcagctgctgctggaccacggcgccaacatcgacgcctacatcgccacccaccccaccgccttccccgccaccatcatgttcgccatgaagtgcctgagcctgctgaagttcctgatggacctgggctgcgacggcgagccctgcttcagctgcctgtacggcaacggcccccacccccccgccccccagcccagcagcagattcaacgacgcccccgccgccgacaaggagcccagcgtggtgcagttctgcgagttcgtgagcgcccccgaggtgagcagatgggccggccccatcatcgacgtgctgctggactacgtgggcaacgtgcagctgtgcagcagactgaaggagcacatcgacagcttcgaggactgggccgtgatcaaggagaaggccgagccccccagacccctggcccacctgtgcagactgagagtgagaaaggccatcggcaagtacagaatcaagctgctggacaccctgcccctgcccggcagactgatcagatacctgaagtacgagaacacccagtag

SEQ ID NO: 296746 - DNA, 1908 bp, Artificial Sequence
  derived and/or modified sequence
atggccacccagatcagcaccagaggcagccagtgcaccatcggccaggaggagtacagcctgtacagcagcctgagcgaggacgagctggtgcagatggccatcgagcagagcctggccgacaagaccagaggccccaccaccgccgaggccaccgccagcgcctgcaccaacagacagcccgcccacttctacccctggaccagaagcaccgccccccccgagagcagccccgccagagcccccatgggcctgttccagggcgtgatgcagaagtacagcagcagcctgttcaagaccagccagctggcccccgccgaccccctgatcaaggccatcaaggacggcgacgaggaggccctgaagaccatgatcaaggagggcaagaacctggccgagcccaacaaggagggctggctgcccctgcacgaggccgcctactacggccaggtgggctgcctgaaggtgctgcagagagcctaccccggcaccatcgaccagagaaccctgcaggaggagaccgccgtgtacctggccacctgcagaggccacctggactgcctgctgagcctgctgcaggccggcgccgagcccgacatcagcaacaagagcagagagacccccctgtacaaggcctgcgagagaaagaacgccgaggccgtgaagatcctggtgcagcacaacgccgacaccaaccacagatgcaacagaggctggaccgccctgcacgagagcgtgagcagaaacgacctggaggtgatgcagatcctggtgagcggcggcgccaaggtggagagcaagaacgcctacggcatcacccccctgttcgtggccgcccagagcggccagctggaggccctgagattcctggccaagtacggcgccgacatcaacacccaggccagcgacaacgccagcgccctgtacgaggcctgcaagaacgagcacgaggaggtggtggagttcctgctgagccagggcgccgacgccaacaagaccaacaaggacggcctgctgcccctgcacatcgccagcaagaagggcaactacagaatcgtgcagatgctgctgcccgtgaccagcagaaccagaatcagaagaagcggcgtgagccccctgcacctggccgccgagagaaaccacgacgaggtgctggaggccctgctgagcgccagattcgacgtgaacacccccctggcccccgagagagccagactgtacgaggacagaagaagcagcgccctgtacttcgccgtggtgaacaacaacgtgtacgccaccgagctgctgctgcagcacggcgccgaccccaacagagacgtgatcagccccctgctggtggccatcagacacggctgcctgagaaccatgcagctgctgctggaccacggcgccaacatcgacgcctacatcgccacccaccccaccgccttccccgccaccatcatgttcgccatgaagtgcctgagcctgctgaagttcctgatggacctgggctgcgacggcgagccctgcttcagctgcctgtacggcaacggcccccacccccccgccccccagcccagcagcagattcaacgacgcccccgccgccgacaaggagcccagcgtggtgcagttctgcgagttcgtgagcgcccccgaggtgagcagatgggccggccccatcatcgacgtgctgctggactacgtgggcaacgtgcagctgtgcagcagactgaaggagcacatcgacagcttcgaggactgggccgtgatcaaggagaaggccgagccccccagacccctggcccacctgtgcagactgagagtgagaaaggccatcggcaagtacagaatcaagctgctggacaccctgcccctgcccggcagactgatcagatacctgaagtacgagaacacccagtag

SEQ ID NO: 296747 - protein, 122 aa, Artificial Sequence
  derived and/or modified sequence
MSRSVALAVLALLSLSGLEAIQRTPKIQVYSRHPAENGKSNFLNCYVSGFHPSDIEVDLLKNGERIEKVEHSDLSFSKDWSFYLLYYTEFTPTEKDEYACRVNHVTLSQPKIVKWGKSYILL

SEQ ID NO: 296748 - DNA, 369 bp, Artificial Sequence
  derived and/or modified sequence
atgagccggagcgtggccttggctgtgctggctctactgagtctgtctggcttggaggctatacagagaacccccaagatacaggtgtacagtaggcaccctgccgagaacgggaagagtaactttctgaattgctacgtgagcggttttcacccctccgatatcgaagtagatttactgaagaatggagaacggatcgaaaaagtggaacacagcgacttatcgttttcaaaagactggtcattctatctactgtattataccgaattcacaccaacagaaaaggacgaatatgcctgcagagtaaaccacgtcaccctgagccaacctaagattgttaaatgggggaagtcttacatactgctctag

SEQ ID NO: 296749 - DNA, 369 bp, Artificial Sequence
  derived and/or modified sequence
atgtccaggagtgttgcgctcgccgtactagccctgctctccctcagtggattggaggccatacagagaactccgaaaatccaggtctattcacgtcaccctgctgaaaacgggaagtccaacttcttaaactgctacgtgtccggtttccatccttccgacatcgaggtggacctgctgaaaaacggagaacggatagaaaaagtggagcattcagatctttccttctctaaggattggtcgttttatcttctgtattacactgaatttactcccaccgagaaagacgaatatgcctgtcgcgtgaatcacgtcaccctgagccagcctaagatcgtaaaatggggcaagagttatatactactgtag

SEQ ID NO: 296750 - DNA, 369 bp, Artificial Sequence
  derived and/or modified sequence
atgagccgctctgtggccctggccgtgctggccctgctgagcctgagcggcctggaggccatccagaggacccccaagatccaggtgtacagccgccacccagcagaaaatggcaagagcaacttcctgaactgctacgtgtctggcttccaccccagcgacatcgaggtggacctgctgaagaatggagagcgcatcgagaaggtggagcacagcgacctgtccttcagcaaggactggagcttctacctgctgtactacacagagttcacccccacagagaaggatgaatatgcctgccgggtgaaccacgtgaccctgagccagcccaagatcgtgaagtggggcaagagctacatcctgctgtag

SEQ ID NO: 296751 - DNA, 369 bp, Artificial Sequence
  derived and/or modified sequence
atgagccggagcgtggccctggccgtgctggccctgctgagcctgtcaggactggaagcaatccagcgtactccgaaaatacaggtgtactctaggcaccccgcagaaaatggtaaaagcaacttcctgaactgttacgtgtctggtttccatccatccgacatcgaggttgaccttctgaaaaatggggaaagaattgagaaggtggagcacagcgacctttcattcagcaaagattggtccttttatctgttatactataccgaatttacccctacagaaaaagatgaatacgcttgcagggtcaaccatgtgactctatctcagccaaagattgttaagtggggaaagtcttacattttactgtag

SEQ ID NO: 296752 - DNA, 369 bp, Artificial Sequence
  derived and/or modified sequence
atgagccggagcgtggccctggccgtgctggccctgctgagcctgtccggacttgaagctatccagcgcactcccaaaatacaggtttatagcaggcacccagcagagaacggaaaatccaattttctcaactgttacgtgagcggctttcacccctccgatatagaagttgacttattaaagaatggggaacggattgagaaagtcgaacatagtgatttatccttttctaaggactggagcttctatctactctactatacagaatttaccccgacagaaaaagacgagtatgcctgtcgggttaaccacgtgacactttcccagcccaagattgtgaaatggggtaagtcctatatactcctgtag

SEQ ID NO: 296753 - DNA, 369 bp, Artificial Sequence
  derived and/or modified sequence
atgtctaggtcagtggcactggcagtgcttgcattattaagcctgagcgggctggaggccatccagcggacaccaaagattcaagtttattccaggcaccccgctgagaacggtaaatctaacttccttaattgttacgtatcaggtttccacccctccgatattgaagtggatctactcaaaaatggggaaagaattgaaaaggttgaacatagcgatctgtcgttcagcaaagattggtccttttacttattgtattacaccgagttcactccaaccgagaaagacgagtacgcctgcagggtcaaccatgtcaccctctctcagcctaagattgtaaagtggggaaaaagttatatccttttatag

SEQ ID NO: 296754 - DNA, 369 bp, Artificial Sequence
  derived and/or modified sequence
atgtctcgatccgtagcacttgcggtactcgccttactttctcttagtggcttggaggcgatacagcggaccccgaagattcaggtgtacagcagacatcctgctgagaacgggaagagcaactttcttaattgttacgtctccggctttcaccccagcgacatcgaagtggatctcttgaagaatggagaaagaatcgaaaaggtagaacattcggatctcagtttctcaaaagattggtcattctacctgctgtactatactgaatttacgccgaccgagaaggatgaatacgcctgtagagtgaatcacgtgacgctgagtcagccaaagattgtcaagtggggcaaatcctatatcctgttatag

SEQ ID NO: 296755 - DNA, 369 bp, Artificial Sequence
  derived and/or modified sequence
atgtccagatccgtggcacttgccgtgctcgcattactctccctgtcaggcctcgaggctatccagagaacgccgaaaatccaggtctacagtcgacatccggcggagaacggaaaatcaaacttcttgaactgctacgtctcaggatttcatccaagcgacatcgaggtggacttgcttaagaatggagaacgcattgaaaaagtcgaacacagcgacctaagtttctctaaagattggtcattctatctgctttattatacagaatttacgccaacagaaaaagacgagtacgcatgtagagttaaccacgtcacattgagtcaacctaagatcgtgaagtggggaaaaagctacatcctcctgtag

SEQ ID NO: 296756 - DNA, 369 bp, Artificial Sequence
  derived and/or modified sequence
atgtcgaggtcagtggccctggctgtgctagccctgctgtccctttccggactagaagctatccaaaggacgccaaagattcaggtctattcacgacatcctgccgagaacgggaaatctaactttttaaactgttatgtgagtggattccatccatccgatatcgaagtcgaccttctcaagaatggagaacgcatagagaaagtcgagcactccgatctgagtttttctaaggactggtccttctatctcctctactataccgagttcacccccactgagaaagatgagtacgcatgccgggttaaccatgtcaccctgtctcagcctaaaatcgtcaaatggggaaaatcttacattctcctatag

SEQ ID NO: 296757 - DNA, 369 bp, Artificial Sequence
  derived and/or modified sequence
atgtccagatccgtggcacttgccgtgctcgcattactctccctgtcaggcctcgaggctatccagagaacgccgaaaatccaggtctacagtcgacatccggcggagaacggaaaatcaaacttcttgaactgctacgtctcaggatttcatccaagcgacatcgaggtggacttgcttaagaatggagaacgcattgaaaaagtcgaacacagcgacctaagtttctctaaagattggtcattctatctgctttattatacagaatttacgccaacagaaaaagacgagtacgcatgtcgggtcaatcacgttaccctcagccaacctaagatcgtgaagtggggaaagtcatatatattgctgtag

SEQ ID NO: 296758 - DNA, 369 bp, Artificial Sequence
  derived and/or modified sequence
atgtcgaggtcagtggccctggctgtgctagccctgctgtccctttccggactagaagctatccaaaggacgccaaagattcaggtctattcacgacatcctgccgagaacgggaaatctaactttttaaactgttatgtgagtggattccatccatccgatatcgaagtcgaccttctcaagaatggagaacgcatagagaaagtcgagcactccgatctgagtttttctaaggactggtccttctatctcctctactataccgagttcacccccactgagaaagatgagtacgcatgccgggtaaaccatgttacactatcccaaccaaaaatcgttaagtggggaaaaagttatatacttctttag

SEQ ID NO: 296759 - DNA, 1027 bp, Artificial Sequence
  derived and/or modified sequence
attcctgaagctgacagcattcgggccgagatgtctcgctccgtggccttagctgtgctcgcgctactctctctttctggcctggaggctatccagcgtactccaaagattcaggtttactcacgtcatccagcagagaatggaaagtcaaatttcctgaattgctatgtgtctgggtttcatccatccgacattgaagttgacttactgaagaatggagagagaattgaaaaagtggagcattcagacttgtctttcagcaaggactggtctttctatctcttgtactacactgaattcacccccactgaaaaagatgagtatgcctgccgtgtgaaccatgtgactttgtcacagcccaagatagttaagtggggtaagtcttacattcttttgtaagctgctgaaagttgtgtatgagtagtcatatcataaagctgctttgatataaaaaaggtctatggccatactaccctgaatgagtcccatcccatctgatataaacaatctgcatattgggattgtcagggaatgttcttaaagatcagattagtggcacctgctgagatactgatgcacagcatggtttctgaaccagtagtttccctgcagttgagcagggagcagcagcagcacttgcacaaatacatatacactcttaacacttcttacctactggcttcctctagcttttgtggcagcttcaggtatatttagcactgaacgaacatctcaagaaggtataggcctttgtttgtaagtcctgctgtcctagcatcctataatcctggacttctccagtactttctggctggattggtatctgaggctagtaggaagggcttgttcctgctgggtagctctaaacaatgtattcatgggtaggaacagcagcctattctgccagccttatttctaaccattttagacatttgttagtacatggtattttaaaagtaaaacttaatgtcttccttttttttctccactgtctttttcatagatcgagacatgtaagcagcatcat

SEQ ID NO: 296760 - DNA, 1220 bp, Artificial Sequence
  derived and/or modified sequence
aatataagtggaggcgtcgcgctggcgggcattcctgaagctgacagcattcgggccgagatgtctcgctccgtggccttagctgtgctcgcgctactctctctttctggcctggaggctatccagcgtactccaaagattcaggtttactcacgtcatccagcagagaatggaaagtcaaatttcctgaattgctatgtgtctgggtttcatccatccgacattgaagttgacttactgaagaatggagagagaattgaaaaagtggagcattcagacttgtctttcagcaaggactggtctttctatctcttgtactacactgaattcacccccactgaaaaagatgagtatgcctgccgtgtgaaccatgtgactttgtcacagcccaagatagttaagtggggtaagtcttacattcttttgtaagctgctgaaagttgtgtatgagtagtcatatcataaagctgctttgatataaaaaaggtctatggccatactaccctgaatgagtcccatcccatctgatataaacaatctgcatattgggattgtcagggaatgttcttaaagatcagattagtggcacctgctgagatactgatgcacagcatggtttctgaaccagtagtttccctgcagttgagcagggagcagcagcagcacttgcacaaatacatatacactcttaacacttcttacctactggcttcctctagcttttgtggcagcttcaggtatatttagcactgaacgaacatctcaagaaggtataggcctttgtttgtaagtcctgctgtcctagcatcctataatcctggacttctccagtactttctggctggattggtatctgaggctagtaggaagggcttgttcctgctgggtagctctaaacaatgtattcatgggtaggaacagcagcctattctgccagccttatttctaaccattttagacatttgttagtacatggtattttaaaagtaaaacttaatgtcttccttttttttctccactgtctttttcatagatcgagacatgtaagcagcatcatggaggtttgaagatgccgcatttggattggatgaattccaaattctgcttgcttgctttttaatattgatatgcttatacacttacactttatgcacaaaatgtagggttataataatgttaacatggacatgatcttctttataattctactttgagtgctg

SEQ ID NO: 296761 - DNA, 369 bp, Artificial Sequence
  derived and/or modified sequence
atgagcagaagcgtggccctggccgtgctggccctgctgagcctgagcggcctggaggccatccagagaacccccaagatccaggtgtacagcagacaccccgccgagaacggcaagagcaacttcctgaactgctacgtgagcggcttccaccccagcgacatcgaggtggacctgctgaagaacggcgagagaatcgagaaggtggagcacagcgacctgagcttcagcaaggactggagcttctacctgctgtactacaccgagttcacccccaccgagaaggacgagtacgcctgcagagtgaaccacgtgaccctgagccagcccaagatcgtgaagtggggcaagagctacatcctgctgtag

SEQ ID NO: 296762 - protein, 862 aa, Artificial Sequence
  derived and/or modified sequence
MAADVVGDVYVLVEHPFEYTGKDGRRVAIRPNERYRLLRRSTEHWWHVRREPGGRPFYLPAQYVRELPALGNPAAAAPPGPHPSPAAPEPLAYDYRFVSAAATAGPDGAPEESGGRTSSLCGPAQRGAATQRSSLAPGLPACLYLRPAAPVRPAQSLNDLACAAVSPPAGLLGSSGSFKACSVAGSWVCPRPLARSDSENVYEVIQDLHVPPREESAEQVDDPPEPVYANIERQPRATSPGAAAAPLPSPVWETHTDAGTGRPYYYNPDTGVTTWESPFEAAEGAASPATSPASVDSHVSLETEWGQYWDEESRRVFFYNPLTGETAWEDEAENEPEEELEMQPGLSPGSPGDPRPPTPETDYPESLTSYPEEDYSPVGSFGEPGPTSPLTTPPGWSCHVSQDKQMLYTNHFTQEQVPVPAPRSIHKSSQDGDTPAQASPPEEKVPAELDEVGSWEEVSPATAAVRTKTLDKAGVLHRTKTADKGKRLRKKHWSASWTVLEGGVLTFFKDSKTSAAGGLRQPSKFSTPEYTVELRGATLSWAPKDKSSRKNVLELRSRDGSEYLIQHDSEAIISTWHKAIAQGIQELSAELPPEESESSRVDFGSSERLGSWQEKEEDARPNAAAPALGPVGLESDLSKVRHKLRKFLQRRPTLQSLREKGYIKDQVFGCALAALCERERSRVPRFVQQCIRAVEARGLDIDGLYRISGNLATIQKLRYKVDHDERLDLDDGRWEDVHVITGALKLFFRELPEPLFPFSHFRQFIAAIKLQDQARRSRCVRDLVRSLPAPNHDTLRMLFQHLCRVIEHGEQNRMSVQSVAIVFGPTLLRPEVEETSMPMTMVFQNQVVELILQQCADIFPPH

SEQ ID NO: 296763 - DNA, 2589 bp, Artificial Sequence
  derived and/or modified sequence
atggccgccgacgtggtgggcgacgtgtacgtgctggtggagcaccccttcgagtacaccggcaaggacggcagaagagtggccatcagacccaacgagagatacagactgctgagaagaagcaccgagcactggtggcacgtgagaagagagcccggcggcagacccttctacctgcccgcccagtacgtgagagagctgcccgccctgggcaaccccgccgccgccgccccccccggcccccaccccagccccgccgcccccgagcccctggcctacgactacagattcgtgagcgccgccgccaccgccggccccgacggcgcccccgaggagagcggcggcagaaccagcagcctgtgcggccccgcccagagaggcgccgccacccagagaagcagcctggcccccggcctgcccgcctgcctgtacctgagacccgccgcccccgtgagacccgcccagagcctgaacgacctggcctgcgccgccgtgagcccccccgccggcctgctgggcagcagcggcagcttcaaggcctgcagcgtggccggcagctgggtgtgccccagacccctggccagaagcgacagcgagaacgtgtacgaggtgatccaggacctgcacgtgccccccagagaggagagcgccgagcaggtggacgacccccccgagcccgtgtacgccaacatcgagagacagcccagagccaccagccccggcgccgccgccgcccccctgcccagccccgtgtgggagacccacaccgacgccggcaccggcagaccctactactacaaccccgacaccggcgtgaccacctgggagagccccttcgaggccgccgagggcgccgccagccccgccaccagccccgccagcgtggacagccacgtgagcctggagaccgagtggggccagtactgggacgaggagagcagaagagtgttcttctacaaccccctgaccggcgagaccgcctgggaggacgaggccgagaacgagcccgaggaggagctggagatgcagcccggcctgagccccggcagccccggcgaccccagaccccccacccccgagaccgactaccccgagagcctgaccagctaccccgaggaggactacagccccgtgggcagcttcggcgagcccggccccaccagccccctgaccaccccccccggctggagctgccacgtgagccaggacaagcagatgctgtacaccaaccacttcacccaggagcaggtgcccgtgcccgcccccagaagcatccacaagagcagccaggacggcgacacccccgcccaggccagcccccccgaggagaaggtgcccgccgagctggacgaggtgggcagctgggaggaggtgagccccgccaccgccgccgtgagaaccaagaccctggacaaggccggcgtgctgcacagaaccaagaccgccgacaagggcaagagactgagaaagaagcactggagcgccagctggaccgtgctggagggcggcgtgctgaccttcttcaaggacagcaagaccagcgccgccggcggcctgagacagcccagcaagttcagcacccccgagtacaccgtggagctgagaggcgccaccctgagctgggcccccaaggacaagagcagcagaaagaacgtgctggagctgagaagcagagacggcagcgagtacctgatccagcacgacagcgaggccatcatcagcacctggcacaaggccatcgcccagggcatccaggagctgagcgccgagctgccccccgaggagagcgagagcagcagagtggacttcggcagcagcgagagactgggcagctggcaggagaaggaggaggacgccagacccaacgccgccgcccccgccctgggccccgtgggcctggagagcgacctgagcaaggtgagacacaagctgagaaagttcctgcagagaagacccaccctgcagagcctgagagagaagggctacatcaaggaccaggtgttcggctgcgccctggccgccctgtgcgagagagagagaagcagagtgcccagattcgtgcagcagtgcatcagagccgtggaggccagaggcctggacatcgacggcctgtacagaatcagcggcaacctggccaccatccagaagctgagatacaaggtggaccacgacgagagactggacctggacgacggcagatgggaggacgtgcacgtgatcaccggcgccctgaagctgttcttcagagagctgcccgagcccctgttccccttcagccacttcagacagttcatcgccgccatcaagctgcaggaccaggccagaagaagcagatgcgtgagagacctggtgagaagcctgcccgcccccaaccacgacaccctgagaatgctgttccagcacctgtgcagagtgatcgagcacggcgagcagaacagaatgagcgtgcagagcgtggccatcgtgttcggccccaccctgctgagacccgaggtggaggagaccagcatgcccatgaccatggtgttccagaaccaggtggtggagctgatcctgcagcagtgcgccgacatcttccccccccactag

SEQ ID NO: 296764 - DNA, 2589 bp, Artificial Sequence
  derived and/or modified sequence
atggctgctgatgtggtcggagatgtctatgtactcgtggaacacccattcgagtacactggaaaggatggaagaagggttgccatccgacccaacgaaaggtataggcttctgcgtagaagtactgaacactggtggcatgtgcggagggagcctggggggaggcctttttaccttccagcccagtatgttcgtgaactgcccgcactggggaatcctgcagcagcagccccgccaggtccacacccatctcctgccgccccagagcctttggcctacgactacaggtttgtcagtgccgcggccacagctggacctgacggtgcacccgaggagtctggcgggaggacaagttctctgtgcgggcccgcacaacgtggagctgcaacccagcggtcttcattggcacccggtctgccagcctgtctatatcttcggcccgcagcgccagtgcgtccagcccagagccttaatgatcttgcctgcgccgcagtgtctccgcccgcaggactcctgggatcttccggatcgttcaaggcctgctctgttgccgggtcctgggtgtgccctcgccccctggctcggagcgattccgaaaacgtgtacgaagtgatccaggacttgcacgtgccccctagagaagaaagcgccgaacaggtggacgatcctcctgagcctgtgtacgcaaatattgagaggcagccaagggcaacctcgcctggggccgcggccgccccactgccatcacctgtttgggagacccacaccgatgccggaaccggccggccctattattataacccagacaccggagtgaccacctgggagagccctttcgaggcagctgaaggagccgcgtctcccgccacaagccctgcgagtgttgactcccacgtctccttggaaacagaatgggggcagtactgggatgaagagtcgagacgggtgttcttttataaccccctcacgggtgagacagcctgggaagatgaggccgaaaatgagcctgaggaagagttagagatgcagcccgggctgagtcccggcagccccggcgaccccagacctcccactccagagaccgattaccctgagtctctgacatcttatcctgaggaagattatagccctgtgggatcatttggtgagcccggacctacatcccccttgaccacccctcccggctggtcttgtcacgtcagccaggacaagcagatgttatacacaaatcacttcacccaggaacaggtgcctgtacccgctcccagaagcattcacaagtctagccaggatggagatactccagcccaggcctcaccacccgaggaaaaggtgcctgcagagctggatgaggtaggtagttgggaggaagttagtccagcaaccgctgcagtgcgtacaaaaacactggataaagccggcgttcttcataggaccaagacggccgataagggtaaaagattacgcaagaagcattggtccgcatcctggaccgtgctcgaggggggggtgctgacgttttttaaagactcaaaaacttcagccgccggcggcctgcgccagccatccaagtttagcacacccgagtataccgtcgagctgcgcggggccacacttagctgggcccctaaagacaagagctcacgcaaaaacgttctggagttacgctctcgtgatggatccgaatacttaatccagcatgatagcgaagcaattatttccacatggcataaagctattgctcaaggaattcaagagctgtcggctgagctgccccctgaagagtcagagtcctccagggtggattttggctcctctgaaaggttgggttcttggcaggaaaaagaggaggacgcccggcccaatgcggcggcacccgctctgggcccggtgggtctcgaaagtgacctgtcaaaggtccgccacaagctacgcaagttcctccaacgcaggcctacgttgcagtctctccgggaaaaaggctacatcaaggaccaagtgtttggatgtgctctggccgccctgtgcgaaagagaacgctctcgggtgccccggtttgtacagcagtgcatccgtgccgtagaagcacggggactggatatcgacggattatatagaatcagcggtaatctggcaactattcagaagctccgatacaaagtggatcatgatgagaggctggacctggacgacggacgctgggaagacgtgcatgtgatcaccggcgctctgaagctgttcttcagggaactgcccgagccactctttccgttcagccactttcggcagttcattgctgccatcaaactccaggaccaggcccgaagatcccgttgcgtcagggatttagtgaggagtctgccagcccctaaccacgacacactgcgcatgttatttcagcatctgtgtcgcgtaattgagcatggagaacagaatcgcatgtctgttcagtcggtcgcgatcgtcttcgggcccactctcctgaggcccgaggtggaggagacctccatgcctatgaccatggtcttccagaaccaggtggtggaactcattttgcagcaatgcgctgatatcttccctccacattag

SEQ ID NO: 296765 - DNA, 2589 bp, Artificial Sequence
  derived and/or modified sequence
atggctgctgatgtggtgggagatgtgtatgtgctggtggagcacccctttgagtacaccgggaaggatggaagaagagtggccatccggcccaatgaaagataccgcctgctgcggcgcagcacagagcactggtggcacgtgagaagagagcccggcggccggcccttctacctgcctgcccagtatgtgcgggagctgcctgccctgggcaacccagctgctgctgcccctcctggcccccaccccagccctgctgcccctgagcccctggcctatgactacagatttgtgtctgctgctgccacagctggcccagatggagcccctgaggagagcggcggccgcaccagcagcctgtgtggccctgcccagagaggagctgccacccagaggagcagcctggcccctggcctgcctgcctgcctgtacctgcggcctgctgcccctgtgcggcctgcccagagcctgaatgacctggcctgtgccgctgtgtccccacctgctggcctgctgggcagcagcggcagcttcaaggcctgcagcgtggccggctcctgggtgtgcccccggcccctggcccggagtgacagtgaaaatgtgtatgaggtgatccaggacctgcacgtgcccccccgggaggagagcgctgagcaggtggatgatcctcctgagcctgtgtatgccaacatcgagcggcagccccgggccaccagccctggagctgctgctgcccccctgcccagccctgtgtgggagacccacacagatgctggcaccggccggccctactactacaacccagacaccggggtgaccacctgggagagcccctttgaagctgctgagggcgccgccagccctgccaccagccctgcctctgtggacagccacgtgtccctggagacagagtggggccagtactgggatgaggagagccggcgggtcttcttctacaaccccctgactggagaaacagcctgggaggatgaagcagaaaatgaacctgaggaggagctggagatgcagcccggcctgagccctggcagccctggggacccccggccccccaccccagagacagactacccagagagcctgaccagctacccagaggaggactacagccctgtgggcagctttggagagcccggccccaccagccccctgaccaccccacctggctggagctgccacgtgtcccaggacaagcagatgctgtacaccaaccacttcacccaggagcaggtgcctgtgcctgcccccaggagcatccacaagagcagccaggatggagacaccccagcccaggccagccccccagaggagaaggtgcctgctgagctggatgaggtgggctcctgggaggaggtgtccccagccacagctgctgtgaggaccaagaccctggacaaggccggcgtgctgcacaggaccaagacagctgacaagggcaagaggctgaggaagaagcactggagcgcctcctggacagtgctggagggcggcgtgctgaccttcttcaaggacagcaagaccagcgctgctgggggcctgcggcagcccagcaagttcagcaccccagagtacacagtggagctgcggggggccaccctgtcctgggcccccaaggacaagagcagcaggaagaatgtgctggagctgcggagcagagatggcagcgagtacctgatccagcatgattctgaggccatcatcagcacctggcacaaggccatcgcccagggcatccaggagctgtctgctgagctgcccccagaggagagcgagagcagccgggtggactttggcagcagcgagcggctgggctcctggcaggagaaggaggaggatgcccggcccaatgctgctgccccagccctgggccctgtgggcctggagagtgacctgagcaaggtgcgccacaagctgaggaagttcctgcagaggcggcccaccctgcagagcctgcgggagaagggctacatcaaggaccaggtgtttggctgtgccctggccgccctgtgtgagcgggagaggagccgggtgcccaggtttgtgcagcagtgcatccgggctgtggaggcccggggcctggacattgatggcctgtaccgcatcagcggcaacctggccaccatccagaagctgcgctacaaggtggaccatgatgagcggctggacctggatgatggccgctgggaggatgtgcacgtgatcactggagccctgaagctgttcttccgggagctgcctgagcccctcttccccttcagccacttccggcagttcatcgccgccatcaagctgcaggaccaggcccggcgcagccgctgtgtgcgggacctggtgcgcagcctgcctgcccccaaccacgacaccctgaggatgctgttccagcacctgtgcagggtcatcgagcacggggagcagaacaggatgtctgtgcagagcgtggccatcgtgtttggccccaccctgctgcggcctgaggtggaggagacctccatgcccatgaccatggtgttccagaaccaggtggtggagctgatcctgcagcagtgtgccgacatcttccccccccactag

SEQ ID NO: 296766 - DNA, 2589 bp, Artificial Sequence
  derived and/or modified sequence
atggccgccgacgtggtgggcgacgtgtacgtgctggtggagcacccctttgaatacacagggaaggacggacggcgcgtggctatacggccaaatgaaagatataggctgcttcgaaggtccaccgagcactggtggcatgtccggagagagcccggcggtcggccgttctacctgcccgctcagtacgtgagggaactacctgccttagggaatcctgcggctgcagcacccccggggccccatccatcccctgccgccccagagccacttgcatacgactataggtttgtctcggccgcagcaactgcgggcccagatggagcgcctgaggagtctggcggaaggacaagtagtctatgcgggccggcacaaaggggggccgcgacgcaaagaagcagcctggcacccggtctccctgcctgtctctatctgagacccgctgcgcccgttagaccagcccagtctctgaacgatttggcatgcgcagccgtgtcgccacccgcggggctgcttggatctagtggctcttttaaagcttgcagcgtggctggcagctgggtatgcccccgtccactggctagatctgactcagaaaatgtgtatgaagtgatccaagatctgcacgtccctccccgagaggagtctgccgagcaggtggatgaccccccagaaccagtctatgcgaatatcgagcgacagccccgcgcgactagccctggcgccgcggcagctccactgcctagccccgtgtgggaaacccatacagatgcgggcacaggtagaccctattactacaatccagacaccggagtgaccacttgggagtcccccttcgaagcagccgaaggcgccgcttcacctgccactagccccgcgagtgtcgacagccacgtctcgttagaaacagagtggggacagtattgggatgaggagtctagacgcgtattcttttacaacccgctgacgggtgaaaccgcatgggaagacgaggccgagaacgagcctgaagaggagctggagatgcagccaggtctgagtcccggatcccccggtgatccccgtccccccactcctgagacagattaccctgaatcactcacctcctatcccgaagaagactacagtccagtgggtagctttggagagcccggaccgacttcaccgctgacgactcctccgggttggtcgtgccacgtcagccaagataagcagatgctatatacaaaccactttacccaggagcaagtgcctgtgcctgctccgcgaagcattcataagtcctctcaggatggtgacactccagcccaggccagcccacctgaggaaaaggttcctgctgaactggatgaagtggggagctgggaggaagtttcgccagctacagccgcagtgagaacaaaaaccttagataaagctggagtgctgcatcgtaccaagactgccgacaaaggtaagcgactgaggaagaaacattggagcgccagctggactgtcctggagggcggcgtgctgaccttctttaaagattccaagacctcagccgctggcggcctgagacagcctagcaagttctcaactcccgaatataccgtggagttgagaggggcgaccttgtcgtgggcccctaaggataagtcctcaagaaagaacgtgcttgagttgaggtctagagatggctccgagtatctcatccagcacgacagcgaagctattatcagtacttggcacaaggcaattgcccaggggattcaggagctgagtgcagaattgcctccagaagaaagcgaaagttcccgggttgatttcgggtccagcgaaaggcttggctcttggcaggagaaagaagaggatgctcgcccaaacgccgcagccccagccctgggccctgtgggcctggaatctgatttgtctaaagtgcgccataagctgcgtaagtttctacagaggaggccaactctgcagagccttcgcgagaaaggctatattaaagatcaggtgttcggctgtgcactagctgccctgtgcgaacgagaaaggagccgcgtcccacgatttgtgcagcaatgcatcagggcggtggaggcacgcggcctggacatcgacggactgtaccggatcagcgggaatctcgccactatccagaagctaaggtacaaggtcgatcacgacgagagactagacctcgatgacgggaggtgggaggatgttcacgttattactggagcattaaaacttttttttcgggagttgcctgaaccgttgttccctttctctcactttcgccaatttattgcagctattaaactccaggaccaggcacgccggtccagatgcgtgagagacttggtcagatctctacctgccccaaaccatgacacactgcggatgcttttccagcatctttgcagagtgatcgagcacggagagcaaaacaggatgtctgtgcagtcagtagccatcgtctttggaccaactctcttgaggccagaggtcgaagagaccagtatgcctatgacaatggttttccagaatcaggtcgttgaactgatcctgcagcagtgcgctgacatatttccacctcactag

SEQ ID NO: 296767 - DNA, 2589 bp, Artificial Sequence
  derived and/or modified sequence
atggcagcagacgtcgtgggagatgtttacgtgctagtggaacaccccttcgagtacacgggtaaggacgggagacgcgtggccattcgccctaacgaaagatatcggttgctgcggagatctaccgagcactggtggcatgtcaggagagaaccgggaggccgacctttctacctccctgctcagtatgtgagggagctccccgctctcggtaaccctgccgctgctgcaccaccaggcccacatccttcccccgctgccccagaacccctggcctatgattacagattcgtctctgctgccgcaactgccggtccggacggtgctccagaagagagcgggggacgaactagctccctgtgcggccctgcacagcgtggcgctgcaacccagcgaagttctctggccccaggtctgccagcttgcttatatctgcggcctgcagctcccgtacggcctgcacagagcctcaatgatttggcctgcgcagcggtatctccccctgccggacttctgggctcgtccggctctttcaaagcctgcagcgttgccggttcttgggtctgccctagaccactggccaggagtgattcagagaatgtatatgaagtcatccaggacctccatgtcccaccacgcgaggagtcagctgaacaggtggatgacccgccagaaccagtgtacgctaatatcgagaggcagcctagggctacaagccccggagctgcggctgctcctctgcccagccccgtgtgggagacgcatacagacgcaggcaccggtcgcccttattattacaacccggacaccggagttaccacttgggagagtccgtttgaagcggctgaaggcgcagcctctcctgcgacgtcgcccgcatcagtcgatagtcacgtgtccctggagaccgaatggggccagtactgggatgaagaaagcaggcgggtgtttttctataaccccctgacaggtgagaccgcctgggaagacgaagcggagaatgagccggaggaggaactggagatgcaacctgggctctctccgggttctcccggagaccctaggccacccacaccagagaccgattaccctgaatcattaacctcttaccccgaagaggactattctcctgtggggtctttcggcgaaccaggccctaccagcccactcaccaccccccctggttggtcttgccacgtgtcgcaagacaagcagatgctttataccaatcatttcacacaggagcaggtgccagttcccgctccacgcagtattcacaaaagttctcaggacggcgatacccctgcccaggcctctccccctgaagagaaagtaccagcagaactagatgaagtaggctcctgggaggaggtgtcgcctgccaccgccgcagtgaggacaaaaactctcgacaaggcaggggtgctgcatagaactaagaccgcagataaaggaaaacgtcttcgcaagaagcattggtccgcttcatggaccgtgctagaagggggagtcttgacattcttcaaagatagcaaaacgtccgccgcagggggactgcgccaaccttcaaagttctcgacccctgaatacaccgtggaattgagaggggctaccctgagctgggccccaaaagataagtcgtcccgcaagaacgtcctagagctgcgtagccgcgacggaagcgaatacttgatccagcatgactcggaggccatcatcagtacctggcataaggcgattgcccaggggatccaggaactgagtgcagagctgcccccagaggagtctgaatcgtctagggtcgactttggatcaagcgaacgcttgggatcttggcaggaaaaggaggaggacgccagaccaaatgctgcagcccctgccctggggccagtaggtctcgaatcggacttgtcaaaggtcaggcataaactgagaaagtttcttcagcgacgaccaaccctgcagtccctgcgagaaaaaggatacatcaaagatcaggtgttcgggtgcgccctggccgcactctgtgagcgggagcggagtcgggtcccaaggtttgtgcagcaatgcattcgcgcagtggaagcgagagggctcgatatcgacggtctttaccgtatctcgggcaacctggcgaccatccagaaactcagatacaaagtagatcacgatgaaaggctggatctggatgacggaagatgggaggacgtccacgtcattacaggtgccctgaaactgtttttccgcgagcttcccgagcccctgttccctttttctcactttcgccagtttattgcggctattaaactgcaggatcaggcccgtcgcagtcgatgtgtgcgtgacctagtcagatctttgccagcacccaatcatgacacactgcggatgcttttccagcacctgtgtagggtgatcgagcacggcgagcaaaacaggatgagcgtgcagagcgtggccattgtgtttggccctacactcctgaggcctgaggtcgaggagacctctatgccaatgactatggtatttcagaatcaggtcgtggagttgatcctgcaacaatgtgctgacattttccctccccactag

SEQ ID NO: 296768 - DNA, 2589 bp, Artificial Sequence
  derived and/or modified sequence
atggcggcggacgtggtgggggacgtgtacgtgctggtggagcaccccttcgagtacaccggcaaggacgggcgccgcgtggccatccggccgaatgagcgctaccggctgctgcggcgcagcaccgagcactggtggcacgtgcggcgtgagcccggcggccgccccttctacctgcctgcgcagtacgtgcgcgagctgcccgcgctgggcaaccctgccgccgccgcgccgccaggtcctcacccgagccccgcggcccctgagccgctcgcctacgactaccggtttgtgagcgcggcggcgaccgcgggccccgacggcgcccccgaggagtccggaggccgaaccagctccctgtgcggccctgcgcaacgcggcgccgcgacccagcgcagcagcctggcgcccggcctgccagcctgcctgtacctgcggcccgcggcgcccgtgcggcccgcgcagtccctgaacgacctggcctgcgccgccgtctcgcctcccgccggcctcctaggaagcagcggcagcttcaaggcctgcagcgtggcgggctcctgggtgtgcccgcggcctctggcgcgcagcgactcagagaacgtctacgaggtcatccaggacttgcacgtcccgccgcgggaggagagcgcagagcaggtggacgacccaccggagcccgtgtacgcgaacatagagaggcagccccgggccacttcaccgggcgccgctgcagccccccttcccagcccggtgtgggagacgcacacggacgcgggcaccgggcgcccctactactacaacccagacacgggagttaccacctgggagtcgccctttgaggctgccgagggtgccgccagcccagccacctcccctgcctcggtggacagccacgtgagccttgagaccgagtggggccagtactgggatgaggagagccgcagggtgttcttctacaacccgctgacgggcgagacggcctgggaggacgaggccgagaacgagcccgaggaggagttggagatgcagccgggcctgagccctggcagcccaggggacccgcggccccccactcccgagacggactaccccgagtcgctgaccagttaccccgaggaggactattctcccgtgggctctttcggtgagcccggccctacctctcccttgaccacaccccccggctggtcttgtcatgtcagccaggacaagcagatgctctacaccaaccacttcactcaggagcaggtccctgtccctgcccctcgaagcatccataaatccagccaggatggtgacaccccagcccaggccagccctccagaggagaaggtcccagcagagctggatgaggttgggagctgggaggaagtctctcctgccacagctgctgtgaggaccaagaccttggacaaggcaggggtgctccatcgcaccaagacggcagacaagggaaagcggctccggaagaagcactggagtgcctcctggactgtgctggagggtggcgtcctgacattcttcaaggactcaaagacctcggctgcaggcggcctgaggcagccttccaagttttccacccctgagtacacagtggagctgaggggggccactctctcctgggcccccaaagacaaatccagtaggaagaatgtgctggagctacggagccgagatggctctgagtacctgatccagcacgactcggaggccatcatcagcacctggcataaggccattgctcagggcatccaggagctgtccgcagagctgcccccagaggagagcgagagcagcagagtggacttcgggtcgagcgagcgcttgggaagctggcaggagaaagaggaggacgcgcgaccgaatgcagccgcgcccgccctgggccccgtgggcctggagagcgacttgagcaaggtccggcacaagctccgcaagttcctccagaggcggcccacactgcagtcgctgcgggagaagggctacatcaaagaccaggtgttcggctgcgcgctggccgcgctgtgtgagcgcgagaggagccgggtgccacgcttcgtgcagcagtgcatccgcgccgtcgaggcccgcgggctggacatcgacgggctgtaccgcatcagtggaaacctggccaccatccagaagctacgctataaggtggaccacgatgagcgccttgacctggatgacgggcgctgggaggacgtccacgttatcaccggagccctgaagctcttctttcgggagctgcccgagcccctcttccccttctcgcacttccgccagttcattgcggccatcaagttgcaggaccaggcccggcgcagccgctgtgtgcgtgacttggtgcgctcgctgcccgctcccaaccacgacactctgcggatgctcttccagcacctctgccgggtgatcgagcacggcgagcagaaccgcatgtcggtgcagagcgtggccattgtgttcgggcccacgctgctgcggcccgaggtggaagagaccagcatgcccatgaccatggtgttccagaaccaggtggtggagctcatcctgcagcagtgcgcggacatcttcccgccgcactga

SEQ ID NO: 296769 - protein, 1635 aa, Artificial Sequence
  derived and/or modified sequence
MTSAQCPALACVMSPLRFWGPWPLLMWQLLWLLVKEAQPLEWVKDPLQLTSNPLGPPEPWSSHSSHFPRESPHAPTLPADPWDFDHLGPSASSEMPAPPQESTENLVPFLDTWDSAGELPLEPEQFLASQQDLKDKLSPQERLPVSPKKLKKDPAQRWSLAEIIGIIRQLSTPQSQKQTLQNEYSSTDTPYPGSLPPELRVKSDEPPGPSEQVGPSQFHLEPETQNPETLEDIQSSSLQQEAPAQLPQLLEEEPSSMQQEAPALPPESSMESLTLPNHEVSVQPPGEDQAYYHLPNITVKPADVEVTITSEPTNETESSQAQQETPIQFPEEVEPSATQQEAPIEPPVPPMEHELSISEQQQPVQPSESPREVESSPTQQETPGQPPEHHEVTVSPPGHHQTHHLASPSVSVKPPDVQLTIAAEPSAEVGTSLVHQEATTRLSGSGNDVEPPAIQHGGPPLLPESSEEAGPLAVQQETSFQSPEPINNENPSPTQQEAAAEHPQTAEEGESSLTHQEAPAQTPEFPNVVVAQPPEHSHLTQATVQPLDLGFTITPESKTEVELSPTMKETPTQPPKKVVPQLRVYQGVTNPTPGQDQAQHPVSPSVTVQLLDLGLTITPEPTTEVGHSTPPKRTIVSPKHPEVTLPHPDQVQTQHSHLTRATVQPLDLGFTITPKSMTEVEPSTALMTTAPPPGHPEVTLPPSDKGQAQHSHLTQATVQPLDLELTITTKPTTEVKPSPTTEETSTQPPDLGLAIIPEPTTETGHSTALEKTTAPRPDRVQTLHRSLTEVTGPPTELEPAQDSLVQSESYTQNKALTAPEEHKASTSTNICELCTCGDEMLSCIDLNPEQRLRQVPVPEPNTHNGTFTILNFQGNYISYIDGNVWKAYSWTEKLILRENNLTELHKDSFEGLLSLQYLDLSCNKIQSIERHTFEPLPFLKFINLSCNVITELSFGTFQAWHGMQFLHKLILNHNPLTTVEDPYLFKLPALKYLDMGTTLVPLTTLKNILMMTVELEKLILPSHMACCLCQFKNSIEAVCKTVKLHCNSACLTNTTHCPEEASVGNPEGAFMKVLQARKNYTSTELIVEPEEPSDSSGINLSGFGSEQLDTNDESDFISTLRYILPYFSAVNLDVKSLLLPLIKLPTTGNSLAKIQTVGQNRQRVKRVLMGPRSIQKRHFKEVGRQSIRREQGAQASVENAAEEKRLGSPAPREVEQPHTQQGPEKLAGNAVYTKPSFTQEHKAAVSVLKPFSKGAPSTSSPAKALPQVRDRWKDLTHAISTLESAKARVTNTKTSKPIVHARKKYRFHKTRSHVTHRTPKVKKSPKVRKKSYLSRLMLANRLPFSAAKSLINSPSQGAFSSLGDLSPQENPFLEVSAPSEHFIEKNNTKHTTARNAFEENDFMENTNMPEGTISENTNYNHPPEADSAGTAFNLGPTVKQTETKWEYNNVGTDLSPEPKSFNYPLLSSPGDQFEIQLTQQLQSLIPNNNVRRLIAHVIRTLKMDCSGTHVQVTCAKLISRTGHLMKLLSGQQEVKASKIEWDTDQWKIENYINESTEAQSEQKEKSLELKKEVPGYGYTDKLILALIVTGILTILIILFCLIVICCHRRSLQEDEEGFSRDSEAPTEEEESEALP

SEQ ID NO: 296770 - protein, 674 aa, Artificial Sequence
  derived and/or modified sequence
MQFYTLKIILNHNPLTTVEDPYLFKLPALKYLDMGTTLVPLTTLKNILMMTVELEKLILPSHMACCLCQFKNSIEAVCKTVKLHCNSACLTNTTHCPEEASVGNPEGAFMKVLQARKNYTSTELIVEPEEPSDSSGINLSGFGSEQLDTNDESDFISTLRYILPYFSAVNLDVKSLLLPLIKLPTTGNSLAKIQTVGQNRQRVKRVLMGPRSIQKRHFKEVGRQSIRREQGAQASVENAAEEKRLGSPAPREVEQPHTQQGPEKLAGNAVYTKPSFTQEHKAAVSVLKPFSKGAPSTSSPAKALPQVRDRWKDLTHAISTLESAKARVTNTKTSKPIVHARKKYRFHKTRSHVTHRTPKVKKSPKVRKKSYLSRLMLANRLPFSAAKSLINSPSQGAFSSLGDLSPQENPFLEVSAPSEHFIEKNNTKHTTARNAFEENDFMENTNMPEGTISENTNYNHPPEADSAGTAFNLGPTVKQTETKWEYNNVGTDLSPEPKSFNYPLLSSPGDQFEIQLTQQLQSLIPNNNVRRLIAHVIRTLKMDCSGAHVQVTCAKLISRTGHLMKLLSGQQEVKASKIEWDTDQWKIENYINESTEAQSEQKEKSLELKKEVPGYGYTDKLILALIVTGILTILIILFCLIVICCHRRSLQEDEEGFSRDSEAPTEEEESEALP

SEQ ID NO: 296771 - protein, 1635 aa, Artificial Sequence
  derived and/or modified sequence
MTSAQCPALACVMSPLRFWGPWPLLMWQLLWLLVKEAQPLEWVKDPLQLTSNPLGPPEPWSSHSSHFPRESPHAPTLPADPWDFDHLGPSASSEMPAPPQESTENLVPFLDTWDSAGELPLEPEQFLASQQDLKDKLSPQERLPVSPKKLKKDPAQRWSLAEIIGIIRQLSTPQSQKQTLQNEYSSTDTPYPGSLPPELRVKSDEPPGPSEQVGPSQFHLEPETQNPETLEDIQSSSLQQEAPAQLPQLLEEEPSSMQQEAPALPPESSMESLTLPNHEVSVQPPGEDQAYYHLPNITVKPADVEVTITSEPTNETESSQAQQETPIQFPEEVEPSATQQEAPIEPPVPPMEHELSISEQQQPVQPSESPREVESSPTQQETPGQPPEHHEVTVSPPGHHQTHHLASPSVSVKPPDVQLTIAAEPSAEVGTSLVHQEATTRLSGSGNDVEPPAIQHGGPPLLPESSEEAGPLAVQQETSFQSPEPINNENPSPTQQEAAAEHPQTAEEGESSLTHQEAPAQTPEFPNVVVAQPPEHSHLTQATVQPLDLGFTITPESKTEVELSPTMKETPTQPPKKVVPQLRVYQGVTNPTPGQDQAQHPVSPSVTVQLLDLGLTITPEPTTEVGHSTPPKRTIVSPKHPEVTLPHPDQVQTQHSHLTRATVQPLDLGFTITPKSMTEVEPSTALMTTAPPPGHPEVTLPPSDKGQAQHSHLTQATVQPLDLELTITTKPTTEVKPSPTTEETSTQPPDLGLAIIPEPTTETGHSTALEKTTAPRPDRVQTLHRSLTEVTGPPTELEPAQDSLVQSESYTQNKALTAPEEHKASTSTNICELCTCGDEMLSCIDLNPEQRLRQVPVPEPNTHNGTFTILNFQGNYISYIDGNVWKAYSWTEKLILRENNLTELHKDSFEGLLSLQYLDLSCNKIQSIERHTFEPLPFLKFINLSCNVITELSFGTFQAWHGMQFLHKLILNHNPLTTVEDPYLFKLPALKYLDMGTTLVPLTTLKNILMMTVELEKLILPSHMACCLCQFKNSIEAVCKTVKLHCNSACLTNTTHCPEEASVGNPEGAFMKVLQARKNYTSTELIVEPEEPSDSSGINLSGFGSEQLDTNDESDFISTLRYILPYFSAVNLDVKSLLLPLIKLPTTGNSLAKIQTVGQNRQRVKRVLMGPRSIQKRHFKEVGRQSIRREQGAQASVENAAEEKRLGSPAPREVEQPHTQQGPEKLAGNAVYTKPSFTQEHKAAVSVLKPFSKGAPSTSSPAKALPQVRDRWKDLTHAISTLESAKARVTNTKTSKPIVHARKKYRFHKTRSHVTHRTPKVKKSPKVRKKSYLSRLMLANRLPFSAAKSLINSPSQGAFSSLGDLSPQENPFLEVSAPSEHFIEKNNTKHTTARNAFEENDFMENTNMPEGTISENTNYNHPPEADSAGTAFNLGPTVKQTETKWEYNNVGTDLSPEPKSFNYPLLSSPGDQFEIQLTQQLQSLIPNNNVRRLIAHVIRTLKMDCSGAHVQVTCAKLISRTGHLMKLLSGQQEVKASKIEWDTDQWKIENYINESTEAQSEQKEKSLELKKEVPGYGYTDKLILALIVTGILTILIILFCLIVICCHRRSLQEDEEGFSRDSEAPTEEEESEALP

SEQ ID NO: 296772 - protein, 674 aa, Artificial Sequence
  derived and/or modified sequence
MQFYTLKIILNHNPLTTVEDPYLFKLPALKYLDMGTTLVPLTTLKNILMMTVELEKLILPSHMACCLCQFKNSIEAVCKTVKLHCNSACLTNTIHCPEEASVGNPEGAFMKVLQARKNYTSTELIVEPEEPSDSSGINLSGFGSEQLDTNDESDFISTLRYILPYFSAVNLDVKSLLLPLIKLPTTGNSLAKIQTVGQNRQRVKRVLMGPRSIQKRHFKEVGRQSIRREQGAQASVENAAEEKRLGSPAPREVEQPHTQQGPEKLAGNAVYTKPSFTQEHKAAVSVLKPFSKGAPSTSSPAKALPQVRDRWKDLTHAISILESAKARVTNTKTSKPIVHARKKYRFHKTRSHVTHRTPKVKKSPKVRKKSYLSRLMLANRLPFSAAKSLINSPSQGAFSSLGDLSPQENPFLEVSAPSEHFIEKNNTKHTTARNAFEENDFMENTNMPEGTISENTNYNHPPEADSAGTAFNLGPTVKQTETKWEYNNVGTDPSPEPKSFNYPLLSSPGDQFEIQLTQQLQSLIPNNNVRRLIAHVIRTLKMDCSGAHVQVTCAKLISRTGHLMKLLSGQQEVKASKIEWDTDQWKIENYINESTEAQSEQKEKSLELKKEVPGYGYTDKLILALIVTGILTILIILFCLIVICCHRRSLQEDEEGFSRDSEAPTEEEESEALP

SEQ ID NO: 296773 - protein, 1635 aa, Artificial Sequence
  derived and/or modified sequence
MTSAQCPALACVMSPLRFWGPWPLLMWQLLWLLVKEAQPLEWVKDPLQLTSNPLGPPEPWSSHSSHFPRESPHAPTLPADPWDFDHLGPSASSEMPAPPQESTENLVPFLDTWDSAGELPLEPEQFLASQQDLKDKLSPQERLPVSPKKLKKDPAQRWSLAEIIGIIRQLSTPQSQKQTLQNEYSSTDTPYPGSLPPELRVKSDEPPGPSEQVGPSQFHLEPETQNPETLEDIQSSSLQQEAPAQLPQLLEEEPSSMQQEAPALPPESSMESLTLPNHEVSVQPPGEDQAYYHLPNITVKPADVEVTITSEPTNETESSQAQQETPIQFPEEVEPSATQQEAPIEPPVPPMEHELSISEQQQPVQPSESPREVESSPTQQETPGQPPEHHEVTVSPPGHHQTHHLASPSVSVKPPDVQLTIAAEPSAEVGTSLVHQEATTRLSGSGNDVEPPAIQHGGPPLLPESSEEAGPLAVQQETSFQSPEPINNENPSPTQQEAAAEHPQTAEEGESSLTHQEAPAQTPEFPNVVVAQPPEHSHLTQATVQPLDLGFTITPESKTEVELSPTMKETPTQPPKKVVPQLRVYQGVTNPTPGQDQAQHPVSPSVTVQLLDLGLTITPEPTTEVGHSTPPKRTIVSPKHPEVTLPHPDQVQTQHSHLTRATVQPLDLGFTITPKSMTEVEPSTALMTTAPPPGHPEVTLPPSDKGQAQHSHLTQATVQPLDLELTITTKPTTEVKPSPTTEETSTQPPDLGLAIIPEPTTETGHSTALEKTTAPRPDRVQTLHRSLTEVTGPPTELEPAQDSLVQSESYTQNKALTAPEEHKASTSTNICELCTCGDEMLSCIDLNPEQRLRQVPVPEPNTHNGTFTILNFQGNYISYIDGNVWKAYSWTEKLILRENNLTELHKDSFEGLLSLQYLDLSCNKIQSIERHTFEPLPFLKFINLSCNVITELSFGTFQAWHGMQFLHKLILNHNPLTTVEDPYLFKLPALKYLDMGTTLVPLTTLKNILMMTVELEKLILPSHMACCLCQFKNSIEAVCKTVKLHCNSACLTNTIHCPEEASVGNPEGAFMKVLQARKNYTSTELIVEPEEPSDSSGINLSGFGSEQLDTNDESDFISTLRYILPYFSAVNLDVKSLLLPLIKLPTTGNSLAKIQTVGQNRQRVKRVLMGPRSIQKRHFKEVGRQSIRREQGAQASVENAAEEKRLGSPAPREVEQPHTQQGPEKLAGNAVYTKPSFTQEHKAAVSVLKPFSKGAPSTSSPAKALPQVRDRWKDLTHAISILESAKARVTNTKTSKPIVHARKKYRFHKTRSHVTHRTPKVKKSPKVRKKSYLSRLMLANRLPFSAAKSLINSPSQGAFSSLGDLSPQENPFLEVSAPSEHFIEKNNTKHTTARNAFEENDFMENTNMPEGTISENTNYNHPPEADSAGTAFNLGPTVKQTETKWEYNNVGTDPSPEPKSFNYPLLSSPGDQFEIQLTQQLQSLIPNNNVRRLIAHVIRTLKMDCSGAHVQVTCAKLISRTGHLMKLLSGQQEVKASKIEWDTDQWKIENYINESTEAQSEQKEKSLELKKEVPGYGYTDKLILALIVTGILTILIILFCLIVICCHRRSLQEDEEGFSRDSEAPTEEEESEALP

SEQ ID NO: 296774 - DNA, 4908 bp, Artificial Sequence
  derived and/or modified sequence
atgaccagcgcccagtgccccgccctggcctgcgtgatgagccccctgagattctggggcccctggcccctgctgatgtggcagctgctgtggctgctggtgaaggaggcccagcccctggagtgggtgaaggaccccctgcagctgaccagcaaccccctgggcccccccgagccctggagcagccacagcagccacttccccagagagagcccccacgcccccaccctgcccgccgacccctgggacttcgaccacctgggccccagcgccagcagcgagatgcccgcccccccccaggagagcaccgagaacctggtgcccttcctggacacctgggacagcgccggcgagctgcccctggagcccgagcagttcctggccagccagcaggacctgaaggacaagctgagcccccaggagagactgcccgtgagccccaagaagctgaagaaggaccccgcccagagatggagcctggccgagatcatcggcatcatcagacagctgagcaccccccagagccagaagcagaccctgcagaacgagtacagcagcaccgacaccccctaccccggcagcctgccccccgagctgagagtgaagagcgacgagccccccggccccagcgagcaggtgggccccagccagttccacctggagcccgagacccagaaccccgagaccctggaggacatccagagcagcagcctgcagcaggaggcccccgcccagctgccccagctgctggaggaggagcccagcagcatgcagcaggaggcccccgccctgccccccgagagcagcatggagagcctgaccctgcccaaccacgaggtgagcgtgcagccccccggcgaggaccaggcctactaccacctgcccaacatcaccgtgaagcccgccgacgtggaggtgaccatcaccagcgagcccaccaacgagaccgagagcagccaggcccagcaggagacccccatccagttccccgaggaggtggagcccagcgccacccagcaggaggcccccatcgagccccccgtgccccccatggagcacgagctgagcatcagcgagcagcagcagcccgtgcagcccagcgagagccccagagaggtggagagcagccccacccagcaggagacccccggccagccccccgagcaccacgaggtgaccgtgagcccccccggccaccaccagacccaccacctggccagccccagcgtgagcgtgaagccccccgacgtgcagctgaccatcgccgccgagcccagcgccgaggtgggcaccagcctggtgcaccaggaggccaccaccagactgagcggcagcggcaacgacgtggagccccccgccatccagcacggcggcccccccctgctgcccgagagcagcgaggaggccggccccctggccgtgcagcaggagaccagcttccagagccccgagcccatcaacaacgagaaccccagccccacccagcaggaggccgccgccgagcacccccagaccgccgaggagggcgagagcagcctgacccaccaggaggcccccgcccagacccccgagttccccaacgtggtggtggcccagccccccgagcacagccacctgacccaggccaccgtgcagcccctggacctgggcttcaccatcacccccgagagcaagaccgaggtggagctgagccccaccatgaaggagacccccacccagccccccaagaaggtggtgccccagctgagagtgtaccagggcgtgaccaaccccacccccggccaggaccaggcccagcaccccgtgagccccagcgtgaccgtgcagctgctggacctgggcctgaccatcacccccgagcccaccaccgaggtgggccacagcaccccccccaagagaaccatcgtgagccccaagcaccccgaggtgaccctgccccaccccgaccaggtgcagacccagcacagccacctgaccagagccaccgtgcagcccctggacctgggcttcaccatcacccccaagagcatgaccgaggtggagcccagcaccgccctgatgaccaccgcccccccccccggccaccccgaggtgaccctgccccccagcgacaagggccaggcccagcacagccacctgacccaggccaccgtgcagcccctggacctggagctgaccatcaccaccaagcccaccaccgaggtgaagcccagccccaccaccgaggagaccagcacccagccccccgacctgggcctggccatcatccccgagcccaccaccgagaccggccacagcaccgccctggagaagaccaccgcccccagacccgacagagtgcagaccctgcacagaagcctgaccgaggtgaccggcccccccaccgagctggagcccgcccaggacagcctggtgcagagcgagagctacacccagaacaaggccctgaccgcccccgaggagcacaaggccagcaccagcaccaacatctgcgagctgtgcacctgcggcgacgagatgctgagctgcatcgacctgaaccccgagcagagactgagacaggtgcccgtgcccgagcccaacacccacaacggcaccttcaccatcctgaacttccagggcaactacatcagctacatcgacggcaacgtgtggaaggcctacagctggaccgagaagctgatcctgagagagaacaacctgaccgagctgcacaaggacagcttcgagggcctgctgagcctgcagtacctggacctgagctgcaacaagatccagagcatcgagagacacaccttcgagcccctgcccttcctgaagttcatcaacctgagctgcaacgtgatcaccgagctgagcttcggcaccttccaggcctggcacggcatgcagttcctgcacaagctgatcctgaaccacaaccccctgaccaccgtggaggacccctacctgttcaagctgcccgccctgaagtacctggacatgggcaccaccctggtgcccctgaccaccctgaagaacatcctgatgatgaccgtggagctggagaagctgatcctgcccagccacatggcctgctgcctgtgccagttcaagaacagcatcgaggccgtgtgcaagaccgtgaagctgcactgcaacagcgcctgcctgaccaacaccacccactgccccgaggaggccagcgtgggcaaccccgagggcgccttcatgaaggtgctgcaggccagaaagaactacaccagcaccgagctgatcgtggagcccgaggagcccagcgacagcagcggcatcaacctgagcggcttcggcagcgagcagctggacaccaacgacgagagcgacttcatcagcaccctgagatacatcctgccctacttcagcgccgtgaacctggacgtgaagagcctgctgctgcccctgatcaagctgcccaccaccggcaacagcctggccaagatccagaccgtgggccagaacagacagagagtgaagagagtgctgatgggccccagaagcatccagaagagacacttcaaggaggtgggcagacagagcatcagaagagagcagggcgcccaggccagcgtggagaacgccgccgaggagaagagactgggcagccccgcccccagagaggtggagcagccccacacccagcagggccccgagaagctggccggcaacgccgtgtacaccaagcccagcttcacccaggagcacaaggccgccgtgagcgtgctgaagcccttcagcaagggcgcccccagcaccagcagccccgccaaggccctgccccaggtgagagacagatggaaggacctgacccacgccatcagcaccctggagagcgccaaggccagagtgaccaacaccaagaccagcaagcccatcgtgcacgccagaaagaagtacagattccacaagaccagaagccacgtgacccacagaacccccaaggtgaagaagagccccaaggtgagaaagaagagctacctgagcagactgatgctggccaacagactgcccttcagcgccgccaagagcctgatcaacagccccagccagggcgccttcagcagcctgggcgacctgagcccccaggagaaccccttcctggaggtgagcgcccccagcgagcacttcatcgagaagaacaacaccaagcacaccaccgccagaaacgccttcgaggagaacgacttcatggagaacaccaacatgcccgagggcaccatcagcgagaacaccaactacaaccacccccccgaggccgacagcgccggcaccgccttcaacctgggccccaccgtgaagcagaccgagaccaagtgggagtacaacaacgtgggcaccgacctgagccccgagcccaagagcttcaactaccccctgctgagcagccccggcgaccagttcgagatccagctgacccagcagctgcagagcctgatccccaacaacaacgtgagaagactgatcgcccacgtgatcagaaccctgaagatggactgcagcggcacccacgtgcaggtgacctgcgccaagctgatcagcagaaccggccacctgatgaagctgctgagcggccagcaggaggtgaaggccagcaagatcgagtgggacaccgaccagtggaagatcgagaactacatcaacgagagcaccgaggcccagagcgagcagaaggagaagagcctggagctgaagaaggaggtgcccggctacggctacaccgacaagctgatcctggccctgatcgtgaccggcatcctgaccatcctgatcatcctgttctgcctgatcgtgatctgctgccacagaagaagcctgcaggaggacgaggagggcttcagcagagacagcgaggcccccaccgaggaggaggagagcgaggccctgccctag

SEQ ID NO: 296775 - DNA, 2025 bp, Artificial Sequence
  derived and/or modified sequence
atgcagttctacaccctgaagatcatcctgaaccacaaccccctgaccaccgtggaggacccctacctgttcaagctgcccgccctgaagtacctggacatgggcaccaccctggtgcccctgaccaccctgaagaacatcctgatgatgaccgtggagctggagaagctgatcctgcccagccacatggcctgctgcctgtgccagttcaagaacagcatcgaggccgtgtgcaagaccgtgaagctgcactgcaacagcgcctgcctgaccaacaccacccactgccccgaggaggccagcgtgggcaaccccgagggcgccttcatgaaggtgctgcaggccagaaagaactacaccagcaccgagctgatcgtggagcccgaggagcccagcgacagcagcggcatcaacctgagcggcttcggcagcgagcagctggacaccaacgacgagagcgacttcatcagcaccctgagatacatcctgccctacttcagcgccgtgaacctggacgtgaagagcctgctgctgcccctgatcaagctgcccaccaccggcaacagcctggccaagatccagaccgtgggccagaacagacagagagtgaagagagtgctgatgggccccagaagcatccagaagagacacttcaaggaggtgggcagacagagcatcagaagagagcagggcgcccaggccagcgtggagaacgccgccgaggagaagagactgggcagccccgcccccagagaggtggagcagccccacacccagcagggccccgagaagctggccggcaacgccgtgtacaccaagcccagcttcacccaggagcacaaggccgccgtgagcgtgctgaagcccttcagcaagggcgcccccagcaccagcagccccgccaaggccctgccccaggtgagagacagatggaaggacctgacccacgccatcagcaccctggagagcgccaaggccagagtgaccaacaccaagaccagcaagcccatcgtgcacgccagaaagaagtacagattccacaagaccagaagccacgtgacccacagaacccccaaggtgaagaagagccccaaggtgagaaagaagagctacctgagcagactgatgctggccaacagactgcccttcagcgccgccaagagcctgatcaacagccccagccagggcgccttcagcagcctgggcgacctgagcccccaggagaaccccttcctggaggtgagcgcccccagcgagcacttcatcgagaagaacaacaccaagcacaccaccgccagaaacgccttcgaggagaacgacttcatggagaacaccaacatgcccgagggcaccatcagcgagaacaccaactacaaccacccccccgaggccgacagcgccggcaccgccttcaacctgggccccaccgtgaagcagaccgagaccaagtgggagtacaacaacgtgggcaccgacctgagccccgagcccaagagcttcaactaccccctgctgagcagccccggcgaccagttcgagatccagctgacccagcagctgcagagcctgatccccaacaacaacgtgagaagactgatcgcccacgtgatcagaaccctgaagatggactgcagcggcgcccacgtgcaggtgacctgcgccaagctgatcagcagaaccggccacctgatgaagctgctgagcggccagcaggaggtgaaggccagcaagatcgagtgggacaccgaccagtggaagatcgagaactacatcaacgagagcaccgaggcccagagcgagcagaaggagaagagcctggagctgaagaaggaggtgcccggctacggctacaccgacaagctgatcctggccctgatcgtgaccggcatcctgaccatcctgatcatcctgttctgcctgatcgtgatctgctgccacagaagaagcctgcaggaggacgaggagggcttcagcagagacagcgaggcccccaccgaggaggaggagagcgaggccctgccctag

SEQ ID NO: 296776 - DNA, 4908 bp, Artificial Sequence
  derived and/or modified sequence
atgaccagcgcccagtgccccgccctggcctgcgtgatgagccccctgagattctggggcccctggcccctgctgatgtggcagctgctgtggctgctggtgaaggaggcccagcccctggagtgggtgaaggaccccctgcagctgaccagcaaccccctgggcccccccgagccctggagcagccacagcagccacttccccagagagagcccccacgcccccaccctgcccgccgacccctgggacttcgaccacctgggccccagcgccagcagcgagatgcccgcccccccccaggagagcaccgagaacctggtgcccttcctggacacctgggacagcgccggcgagctgcccctggagcccgagcagttcctggccagccagcaggacctgaaggacaagctgagcccccaggagagactgcccgtgagccccaagaagctgaagaaggaccccgcccagagatggagcctggccgagatcatcggcatcatcagacagctgagcaccccccagagccagaagcagaccctgcagaacgagtacagcagcaccgacaccccctaccccggcagcctgccccccgagctgagagtgaagagcgacgagccccccggccccagcgagcaggtgggccccagccagttccacctggagcccgagacccagaaccccgagaccctggaggacatccagagcagcagcctgcagcaggaggcccccgcccagctgccccagctgctggaggaggagcccagcagcatgcagcaggaggcccccgccctgccccccgagagcagcatggagagcctgaccctgcccaaccacgaggtgagcgtgcagccccccggcgaggaccaggcctactaccacctgcccaacatcaccgtgaagcccgccgacgtggaggtgaccatcaccagcgagcccaccaacgagaccgagagcagccaggcccagcaggagacccccatccagttccccgaggaggtggagcccagcgccacccagcaggaggcccccatcgagccccccgtgccccccatggagcacgagctgagcatcagcgagcagcagcagcccgtgcagcccagcgagagccccagagaggtggagagcagccccacccagcaggagacccccggccagccccccgagcaccacgaggtgaccgtgagcccccccggccaccaccagacccaccacctggccagccccagcgtgagcgtgaagccccccgacgtgcagctgaccatcgccgccgagcccagcgccgaggtgggcaccagcctggtgcaccaggaggccaccaccagactgagcggcagcggcaacgacgtggagccccccgccatccagcacggcggcccccccctgctgcccgagagcagcgaggaggccggccccctggccgtgcagcaggagaccagcttccagagccccgagcccatcaacaacgagaaccccagccccacccagcaggaggccgccgccgagcacccccagaccgccgaggagggcgagagcagcctgacccaccaggaggcccccgcccagacccccgagttccccaacgtggtggtggcccagccccccgagcacagccacctgacccaggccaccgtgcagcccctggacctgggcttcaccatcacccccgagagcaagaccgaggtggagctgagccccaccatgaaggagacccccacccagccccccaagaaggtggtgccccagctgagagtgtaccagggcgtgaccaaccccacccccggccaggaccaggcccagcaccccgtgagccccagcgtgaccgtgcagctgctggacctgggcctgaccatcacccccgagcccaccaccgaggtgggccacagcaccccccccaagagaaccatcgtgagccccaagcaccccgaggtgaccctgccccaccccgaccaggtgcagacccagcacagccacctgaccagagccaccgtgcagcccctggacctgggcttcaccatcacccccaagagcatgaccgaggtggagcccagcaccgccctgatgaccaccgcccccccccccggccaccccgaggtgaccctgccccccagcgacaagggccaggcccagcacagccacctgacccaggccaccgtgcagcccctggacctggagctgaccatcaccaccaagcccaccaccgaggtgaagcccagccccaccaccgaggagaccagcacccagccccccgacctgggcctggccatcatccccgagcccaccaccgagaccggccacagcaccgccctggagaagaccaccgcccccagacccgacagagtgcagaccctgcacagaagcctgaccgaggtgaccggcccccccaccgagctggagcccgcccaggacagcctggtgcagagcgagagctacacccagaacaaggccctgaccgcccccgaggagcacaaggccagcaccagcaccaacatctgcgagctgtgcacctgcggcgacgagatgctgagctgcatcgacctgaaccccgagcagagactgagacaggtgcccgtgcccgagcccaacacccacaacggcaccttcaccatcctgaacttccagggcaactacatcagctacatcgacggcaacgtgtggaaggcctacagctggaccgagaagctgatcctgagagagaacaacctgaccgagctgcacaaggacagcttcgagggcctgctgagcctgcagtacctggacctgagctgcaacaagatccagagcatcgagagacacaccttcgagcccctgcccttcctgaagttcatcaacctgagctgcaacgtgatcaccgagctgagcttcggcaccttccaggcctggcacggcatgcagttcctgcacaagctgatcctgaaccacaaccccctgaccaccgtggaggacccctacctgttcaagctgcccgccctgaagtacctggacatgggcaccaccctggtgcccctgaccaccctgaagaacatcctgatgatgaccgtggagctggagaagctgatcctgcccagccacatggcctgctgcctgtgccagttcaagaacagcatcgaggccgtgtgcaagaccgtgaagctgcactgcaacagcgcctgcctgaccaacaccacccactgccccgaggaggccagcgtgggcaaccccgagggcgccttcatgaaggtgctgcaggccagaaagaactacaccagcaccgagctgatcgtggagcccgaggagcccagcgacagcagcggcatcaacctgagcggcttcggcagcgagcagctggacaccaacgacgagagcgacttcatcagcaccctgagatacatcctgccctacttcagcgccgtgaacctggacgtgaagagcctgctgctgcccctgatcaagctgcccaccaccggcaacagcctggccaagatccagaccgtgggccagaacagacagagagtgaagagagtgctgatgggccccagaagcatccagaagagacacttcaaggaggtgggcagacagagcatcagaagagagcagggcgcccaggccagcgtggagaacgccgccgaggagaagagactgggcagccccgcccccagagaggtggagcagccccacacccagcagggccccgagaagctggccggcaacgccgtgtacaccaagcccagcttcacccaggagcacaaggccgccgtgagcgtgctgaagcccttcagcaagggcgcccccagcaccagcagccccgccaaggccctgccccaggtgagagacagatggaaggacctgacccacgccatcagcaccctggagagcgccaaggccagagtgaccaacaccaagaccagcaagcccatcgtgcacgccagaaagaagtacagattccacaagaccagaagccacgtgacccacagaacccccaaggtgaagaagagccccaaggtgagaaagaagagctacctgagcagactgatgctggccaacagactgcccttcagcgccgccaagagcctgatcaacagccccagccagggcgccttcagcagcctgggcgacctgagcccccaggagaaccccttcctggaggtgagcgcccccagcgagcacttcatcgagaagaacaacaccaagcacaccaccgccagaaacgccttcgaggagaacgacttcatggagaacaccaacatgcccgagggcaccatcagcgagaacaccaactacaaccacccccccgaggccgacagcgccggcaccgccttcaacctgggccccaccgtgaagcagaccgagaccaagtgggagtacaacaacgtgggcaccgacctgagccccgagcccaagagcttcaactaccccctgctgagcagccccggcgaccagttcgagatccagctgacccagcagctgcagagcctgatccccaacaacaacgtgagaagactgatcgcccacgtgatcagaaccctgaagatggactgcagcggcgcccacgtgcaggtgacctgcgccaagctgatcagcagaaccggccacctgatgaagctgctgagcggccagcaggaggtgaaggccagcaagatcgagtgggacaccgaccagtggaagatcgagaactacatcaacgagagcaccgaggcccagagcgagcagaaggagaagagcctggagctgaagaaggaggtgcccggctacggctacaccgacaagctgatcctggccctgatcgtgaccggcatcctgaccatcctgatcatcctgttctgcctgatcgtgatctgctgccacagaagaagcctgcaggaggacgaggagggcttcagcagagacagcgaggcccccaccgaggaggaggagagcgaggccctgccctag

SEQ ID NO: 296777 - DNA, 2025 bp, Artificial Sequence
  derived and/or modified sequence
atgcagttctacaccctgaagatcatcctgaaccacaaccccctgaccaccgtggaggacccctacctgttcaagctgcccgccctgaagtacctggacatgggcaccaccctggtgcccctgaccaccctgaagaacatcctgatgatgaccgtggagctggagaagctgatcctgcccagccacatggcctgctgcctgtgccagttcaagaacagcatcgaggccgtgtgcaagaccgtgaagctgcactgcaacagcgcctgcctgaccaacaccatccactgccccgaggaggccagcgtgggcaaccccgagggcgccttcatgaaggtgctgcaggccagaaagaactacaccagcaccgagctgatcgtggagcccgaggagcccagcgacagcagcggcatcaacctgagcggcttcggcagcgagcagctggacaccaacgacgagagcgacttcatcagcaccctgagatacatcctgccctacttcagcgccgtgaacctggacgtgaagagcctgctgctgcccctgatcaagctgcccaccaccggcaacagcctggccaagatccagaccgtgggccagaacagacagagagtgaagagagtgctgatgggccccagaagcatccagaagagacacttcaaggaggtgggcagacagagcatcagaagagagcagggcgcccaggccagcgtggagaacgccgccgaggagaagagactgggcagccccgcccccagagaggtggagcagccccacacccagcagggccccgagaagctggccggcaacgccgtgtacaccaagcccagcttcacccaggagcacaaggccgccgtgagcgtgctgaagcccttcagcaagggcgcccccagcaccagcagccccgccaaggccctgccccaggtgagagacagatggaaggacctgacccacgccatcagcatcctggagagcgccaaggccagagtgaccaacaccaagaccagcaagcccatcgtgcacgccagaaagaagtacagattccacaagaccagaagccacgtgacccacagaacccccaaggtgaagaagagccccaaggtgagaaagaagagctacctgagcagactgatgctggccaacagactgcccttcagcgccgccaagagcctgatcaacagccccagccagggcgccttcagcagcctgggcgacctgagcccccaggagaaccccttcctggaggtgagcgcccccagcgagcacttcatcgagaagaacaacaccaagcacaccaccgccagaaacgccttcgaggagaacgacttcatggagaacaccaacatgcccgagggcaccatcagcgagaacaccaactacaaccacccccccgaggccgacagcgccggcaccgccttcaacctgggccccaccgtgaagcagaccgagaccaagtgggagtacaacaacgtgggcaccgaccccagccccgagcccaagagcttcaactaccccctgctgagcagccccggcgaccagttcgagatccagctgacccagcagctgcagagcctgatccccaacaacaacgtgagaagactgatcgcccacgtgatcagaaccctgaagatggactgcagcggcgcccacgtgcaggtgacctgcgccaagctgatcagcagaaccggccacctgatgaagctgctgagcggccagcaggaggtgaaggccagcaagatcgagtgggacaccgaccagtggaagatcgagaactacatcaacgagagcaccgaggcccagagcgagcagaaggagaagagcctggagctgaagaaggaggtgcccggctacggctacaccgacaagctgatcctggccctgatcgtgaccggcatcctgaccatcctgatcatcctgttctgcctgatcgtgatctgctgccacagaagaagcctgcaggaggacgaggagggcttcagcagagacagcgaggcccccaccgaggaggaggagagcgaggccctgccctag

SEQ ID NO: 296778 - DNA, 4908 bp, Artificial Sequence
  derived and/or modified sequence
atgaccagcgcccagtgccccgccctggcctgcgtgatgagccccctgagattctggggcccctggcccctgctgatgtggcagctgctgtggctgctggtgaaggaggcccagcccctggagtgggtgaaggaccccctgcagctgaccagcaaccccctgggcccccccgagccctggagcagccacagcagccacttccccagagagagcccccacgcccccaccctgcccgccgacccctgggacttcgaccacctgggccccagcgccagcagcgagatgcccgcccccccccaggagagcaccgagaacctggtgcccttcctggacacctgggacagcgccggcgagctgcccctggagcccgagcagttcctggccagccagcaggacctgaaggacaagctgagcccccaggagagactgcccgtgagccccaagaagctgaagaaggaccccgcccagagatggagcctggccgagatcatcggcatcatcagacagctgagcaccccccagagccagaagcagaccctgcagaacgagtacagcagcaccgacaccccctaccccggcagcctgccccccgagctgagagtgaagagcgacgagccccccggccccagcgagcaggtgggccccagccagttccacctggagcccgagacccagaaccccgagaccctggaggacatccagagcagcagcctgcagcaggaggcccccgcccagctgccccagctgctggaggaggagcccagcagcatgcagcaggaggcccccgccctgccccccgagagcagcatggagagcctgaccctgcccaaccacgaggtgagcgtgcagccccccggcgaggaccaggcctactaccacctgcccaacatcaccgtgaagcccgccgacgtggaggtgaccatcaccagcgagcccaccaacgagaccgagagcagccaggcccagcaggagacccccatccagttccccgaggaggtggagcccagcgccacccagcaggaggcccccatcgagccccccgtgccccccatggagcacgagctgagcatcagcgagcagcagcagcccgtgcagcccagcgagagccccagagaggtggagagcagccccacccagcaggagacccccggccagccccccgagcaccacgaggtgaccgtgagcccccccggccaccaccagacccaccacctggccagccccagcgtgagcgtgaagccccccgacgtgcagctgaccatcgccgccgagcccagcgccgaggtgggcaccagcctggtgcaccaggaggccaccaccagactgagcggcagcggcaacgacgtggagccccccgccatccagcacggcggcccccccctgctgcccgagagcagcgaggaggccggccccctggccgtgcagcaggagaccagcttccagagccccgagcccatcaacaacgagaaccccagccccacccagcaggaggccgccgccgagcacccccagaccgccgaggagggcgagagcagcctgacccaccaggaggcccccgcccagacccccgagttccccaacgtggtggtggcccagccccccgagcacagccacctgacccaggccaccgtgcagcccctggacctgggcttcaccatcacccccgagagcaagaccgaggtggagctgagccccaccatgaaggagacccccacccagccccccaagaaggtggtgccccagctgagagtgtaccagggcgtgaccaaccccacccccggccaggaccaggcccagcaccccgtgagccccagcgtgaccgtgcagctgctggacctgggcctgaccatcacccccgagcccaccaccgaggtgggccacagcaccccccccaagagaaccatcgtgagccccaagcaccccgaggtgaccctgccccaccccgaccaggtgcagacccagcacagccacctgaccagagccaccgtgcagcccctggacctgggcttcaccatcacccccaagagcatgaccgaggtggagcccagcaccgccctgatgaccaccgcccccccccccggccaccccgaggtgaccctgccccccagcgacaagggccaggcccagcacagccacctgacccaggccaccgtgcagcccctggacctggagctgaccatcaccaccaagcccaccaccgaggtgaagcccagccccaccaccgaggagaccagcacccagccccccgacctgggcctggccatcatccccgagcccaccaccgagaccggccacagcaccgccctggagaagaccaccgcccccagacccgacagagtgcagaccctgcacagaagcctgaccgaggtgaccggcccccccaccgagctggagcccgcccaggacagcctggtgcagagcgagagctacacccagaacaaggccctgaccgcccccgaggagcacaaggccagcaccagcaccaacatctgcgagctgtgcacctgcggcgacgagatgctgagctgcatcgacctgaaccccgagcagagactgagacaggtgcccgtgcccgagcccaacacccacaacggcaccttcaccatcctgaacttccagggcaactacatcagctacatcgacggcaacgtgtggaaggcctacagctggaccgagaagctgatcctgagagagaacaacctgaccgagctgcacaaggacagcttcgagggcctgctgagcctgcagtacctggacctgagctgcaacaagatccagagcatcgagagacacaccttcgagcccctgcccttcctgaagttcatcaacctgagctgcaacgtgatcaccgagctgagcttcggcaccttccaggcctggcacggcatgcagttcctgcacaagctgatcctgaaccacaaccccctgaccaccgtggaggacccctacctgttcaagctgcccgccctgaagtacctggacatgggcaccaccctggtgcccctgaccaccctgaagaacatcctgatgatgaccgtggagctggagaagctgatcctgcccagccacatggcctgctgcctgtgccagttcaagaacagcatcgaggccgtgtgcaagaccgtgaagctgcactgcaacagcgcctgcctgaccaacaccatccactgccccgaggaggccagcgtgggcaaccccgagggcgccttcatgaaggtgctgcaggccagaaagaactacaccagcaccgagctgatcgtggagcccgaggagcccagcgacagcagcggcatcaacctgagcggcttcggcagcgagcagctggacaccaacgacgagagcgacttcatcagcaccctgagatacatcctgccctacttcagcgccgtgaacctggacgtgaagagcctgctgctgcccctgatcaagctgcccaccaccggcaacagcctggccaagatccagaccgtgggccagaacagacagagagtgaagagagtgctgatgggccccagaagcatccagaagagacacttcaaggaggtgggcagacagagcatcagaagagagcagggcgcccaggccagcgtggagaacgccgccgaggagaagagactgggcagccccgcccccagagaggtggagcagccccacacccagcagggccccgagaagctggccggcaacgccgtgtacaccaagcccagcttcacccaggagcacaaggccgccgtgagcgtgctgaagcccttcagcaagggcgcccccagcaccagcagccccgccaaggccctgccccaggtgagagacagatggaaggacctgacccacgccatcagcatcctggagagcgccaaggccagagtgaccaacaccaagaccagcaagcccatcgtgcacgccagaaagaagtacagattccacaagaccagaagccacgtgacccacagaacccccaaggtgaagaagagccccaaggtgagaaagaagagctacctgagcagactgatgctggccaacagactgcccttcagcgccgccaagagcctgatcaacagccccagccagggcgccttcagcagcctgggcgacctgagcccccaggagaaccccttcctggaggtgagcgcccccagcgagcacttcatcgagaagaacaacaccaagcacaccaccgccagaaacgccttcgaggagaacgacttcatggagaacaccaacatgcccgagggcaccatcagcgagaacaccaactacaaccacccccccgaggccgacagcgccggcaccgccttcaacctgggccccaccgtgaagcagaccgagaccaagtgggagtacaacaacgtgggcaccgaccccagccccgagcccaagagcttcaactaccccctgctgagcagccccggcgaccagttcgagatccagctgacccagcagctgcagagcctgatccccaacaacaacgtgagaagactgatcgcccacgtgatcagaaccctgaagatggactgcagcggcgcccacgtgcaggtgacctgcgccaagctgatcagcagaaccggccacctgatgaagctgctgagcggccagcaggaggtgaaggccagcaagatcgagtgggacaccgaccagtggaagatcgagaactacatcaacgagagcaccgaggcccagagcgagcagaaggagaagagcctggagctgaagaaggaggtgcccggctacggctacaccgacaagctgatcctggccctgatcgtgaccggcatcctgaccatcctgatcatcctgttctgcctgatcgtgatctgctgccacagaagaagcctgcaggaggacgaggagggcttcagcagagacagcgaggcccccaccgaggaggaggagagcgaggccctgccctag

SEQ ID NO: 296779 - DNA, 4908 bp, Artificial Sequence
  derived and/or modified sequence
atgacctctgcccagtgtcccgcactggcgtgtgtgatgtcccccctacgattctggggcccctggccattgctaatgtggcagctcctctggttattggtgaaggaggcacaaccgttggaatgggtgaaggatcctctccagctcacaagcaaccccttaggaccccccgaaccttggagctcacattcttctcactttccgcgcgagagccctcacgcacccacccttccagccgacccatgggacttcgatcatctgggtccctcagcatcatcagagatgccagcacctccacaagaaagcacagaaaacctggttcccttcctcgatacttgggatagtgccggagaactgccattagagcccgagcagtttcttgcgagtcaacaggatcttaaagacaagttgtctcctcaagaacgccttccagtcagccctaagaaacttaaaaaggatcctgcacagaggtggtctctggctgaaattatcgggatcatccggcagttgtccacccctcagagtcagaaacagacgcttcaaaatgaatattcttctaccgatacaccctatccagggagcttgccacccgaactgcgggtgaaatctgacgaacccccgggcccatctgaacaggtcggtccttctcagttccacctggagccagaaactcagaacccagaaaccctggaggacattcagagctcctccctgcagcaggaggctcccgcgcagctcccccaactgctggaggaagaaccctcatctatgcagcaggaagctcccgcactgccaccagaatcctctatggagagtctgacgttacctaaccacgaagtgtccgtgcagccgccgggtgaggaccaggcgtactaccatctgcccaacatcaccgtcaagcccgcggacgtggaggtcaccatcacgagtgaacccacgaatgaaacggaatcaagccaagctcagcaggagacacctatacaattccctgaagaagtggagccaagtgccacccagcaagaggcgcccatcgagccccccgtgccaccgatggaacatgaactaagtatctctgagcaacagcagcctgtgcagccgtccgaaagtccccgggaagtggagtcatctccaactcagcaggaaacccccggccagccgccagaacatcacgaggttaccgtgagtccaccgggccaccatcaaactcatcacttggcctccccttctgtgtcagtcaagcccccagacgttcaactcaccatagccgcagagccgtctgctgaggtgggcacaagtctcgtccaccaggaggccacgacgcggctctctggtagcggaaacgatgtggagcctcctgcaattcaacacggaggaccaccactgctgccagaatcaagtgaggaagcaggacctttggctgtgcaacaggagacatccttccagtctccagagcctatcaacaatgagaacccaagcccgacccagcaggaagccgctgccgagcacccacagaccgcggaagagggcgagtcttcccttacgcaccaggaagctcctgctcaaaccccggaatttccgaacgtcgtcgtcgcacagcccccggaacattctcatctcactcaggccacggtccagccactggacctcggcttcacaattaccccagaaagtaagacagaagttgagctcagtcccacaatgaaagaaactcccactcagcccccaaagaaggttgtgcctcagctgagggtctatcagggcgttactaatcccacaccggggcaggatcaggcccagcatcccgtgtctccctcagtcaccgttcagctacttgatctgggtttgactatcacacccgagcctaccaccgaggtgggacacagtactccacccaagaggaccatagtgtccccaaagcaccccgaggtcactctgccccatcccgaccaagtgcagacccagcacagccacttgaccagagccaccgtgcagccactcgatttgggtttcactatcactcctaaaagcatgacagaagttgaaccctccactgcactaatgacaactgctccccctcctgggcatccagaggttaccctgccgccaagtgataaggggcaagcacagcactcccacctcacacaggctacggtccagccactcgacctggagctgaccatcactactaagcctaccacagaggtaaaaccttcacctacaacagaagaaaccagcacacagccaccagacctaggcctggctattatccctgagccaaccacagaaacgggccattctaccgccctcgagaagaccactgcccctagacccgaccgagtacagacccttcacagaagcctgacagaagtcacgggaccccctaccgaattagaacccgcccaagacagtctggttcagtctgaatcttatacccagaataaggccttgaccgcaccagaagagcacaaagcaagcacaagcacaaacatctgcgaactctgtacttgcggagacgagatgctttcctgtatagacctcaatccagagcaaaggctcagacaggtgcccgtgcccgaacccaacacgcacaatggcactttcacaattttgaacttccaaggcaattacatctcctacatcgatggtaatgtgtggaaggcttacagctggacggagaaactgattctgagagagaataatctgaccgagttgcacaaggacagttttgaggggctcctttccctacaatacctggatttgagctgcaataagattcagtctattgaacgtcatacatttgaacctttgccatttctcaagtttattaatctgagctgtaacgtgatcaccgagctgagctttgggacattccaggcttggcacggcatgcaatttttgcacaaactcatcctcaatcataaccctttgactactgtggaggatccatacctgttcaagttgcctgcactgaagtacttagacatgggcaccacactcgttccactaacaactttgaaaaacatcctgatgatgacagttgaacttgaaaagctcattcttcccagccatatggcgtgctgcctgtgtcagtttaaaaacagcatcgaagccgtttgtaagacggtgaaactgcattgcaactcagcatgtctcaccaacacaacacactgtccagaggaggcttccgtgggcaatcccgagggcgcattcatgaaggttctccaggcaagaaagaactacacatcgacagagctgatcgtggaaccggaagaacccagtgattctagcggaattaatctgtctggctttggcagtgaacaactggacactaatgatgagagcgacttcatttccacccttcgatatattctaccatattttagtgcggttaacctggatgtgaagagcctcctcctgccgctcattaagctgccgaccactggtaactcccttgccaaaatccaaaccgtaggacagaatcgccagcgggtcaaaagggtcttgatgggtccacgctcgatccagaaaagacacttcaaagaagtgggtagacagagcatcaggagagagcagggcgctcaggcttccgtcgaaaacgcagcagaagaaaagaggctgggatctcctgcacccagggaagtggaacagcctcacacacagcaaggacccgaaaagctggctggcaatgctgtgtataccaaaccgtcttttacccaggagcataaggccgctgtgagcgtcctgaagcctttctcaaagggcgcccccagcacctcctctccggcaaaggcactgccccaagtgcgggatcgctggaaggatctaactcatgcaatctcaaccctggaaagtgctaaggcccgggtcactaatactaaaacttctaagccgatagttcacgcaagaaaaaagtacaggtttcataaaactcgatcgcacgtcacccaccggacccccaaagtgaaaaagtctcctaaagtgcgtaagaaaagttacctttctagactgatgctggccaacagactcccattcagtgctgcaaaatctttgatcaattcaccttctcagggcgcattctcttcattgggtgacctctcacctcaggagaatcctttcctcgaggtctctgcccccagcgaacactttatcgaaaaaaataacaccaagcacacaactgcccgcaacgccttcgaagaaaatgattttatggaaaacactaatatgcccgagggcacaatcagcgaaaacaccaactataaccacccacctgaggcggacagcgccggaactgcctttaatcttggccctacagtcaaacagaccgagacaaagtgggaatacaataatgtcggtaccgatctctcacccgaaccaaagtcttttaactaccctttattgtcgagcccgggggatcagtttgagatccagcttacacaacagctccagtcactgatccctaataacaacgtaaggaggcttatcgcccacgtaattagaactctgaaaatggactgctccggtacccacgtacaggtgacatgcgcaaaactaattagtcgcacaggacacttaatgaagctcttgtcggggcagcaggaagtcaaagcctccaagatagaatgggacacagatcagtggaagatcgagaactacatcaacgaatcaactgaagcccagtcagaacagaaggagaagagcctcgagctgaagaaggaagttcccggctatggttacacagataagctcatcctggccttgattgtcaccggcatactgactatactaatcatcctgttctgccttattgtgatctgttgtcataggcgttcactacaagaggatgaggaagggttctctcgcgacagcgaagctccaaccgaagaggaagagtcggaggccctgccctag

SEQ ID NO: 296780 - DNA, 2025 bp, Artificial Sequence
  derived and/or modified sequence
atgcagttctataccctgaagatcatcttgaatcataatccactcaccaccgtcgaggacccatatctttttaagctgccagcactaaaataccttgatatgggcactactctcgtacctctgacgaccctgaaaaatatattaatgatgaccgttgagctcgagaagctgatactgccctcccatatggcatgctgtctgtgccagtttaaaaactcaatagaggccgtgtgtaaaacagtgaagctccattgcaatagtgcctgtctcacaaacactacacactgcccagaggaagcgagcgttggcaatcctgagggggcctttatgaaggtgctgcaagctcggaagaactatactagcacagagctgatcgtggagccagaagagccaagcgactcgagcgggataaatttaagcggattcggctcagagcagttagacacgaacgatgagagcgattttatatctaccttgagatacatccttccgtacttttccgcagtgaatctcgatgtgaagagtcttctgcttcctctgatcaagctacctacgacaggcaacagcctcgctaaaattcaaaccgtaggccaaaaccgacaacgggtgaagcgggtgctgatggggccgcggtccattcagaaacggcacttcaaagaagtgggacgccaatccataagacgggagcaaggcgcacaggcctccgtggaaaacgctgccgaggagaaacgcctcggatcaccagctccacgggaggtcgaacaaccccatacgcaacagggccctgaaaaattggctggcaatgccgtgtatactaagccctcatttacgcaggaacacaaagccgctgtgagcgtgcttaagcctttttcaaagggtgccccgagcactagctcaccagcgaaggccttgcctcaagtgcgtgaccgctggaaagacttaacccacgctatttctactctggaatccgcaaaagcaagggtcacaaacaccaaaacaagtaaacccatagtgcatgcacggaaaaaatataggttccacaaaaccagatcacacgtaacacatcgtactccgaaggtcaagaaatcgcccaaagttcggaagaagtcctacctcagtcggctcatgttggccaaccgcctgccctttagcgcggcaaagagtctgattaattccccttctcagggagccttttctagcctcggggacctgtcgccccaggagaacccttttctagaggtttcagccccttcagagcattttattgagaagaacaatactaaacacactacggctcgcaatgctttcgaggaaaacgacttcatggagaacaccaacatgccggagggtacaattagcgaaaacacaaattacaaccatcctcctgaagcagattcagccggcactgcctttaatctgggccccaccgttaagcagaccgaaaccaaatgggagtacaacaacgtcggcacagacctatcccccgagcctaagtccttcaattatccgctcctaagttctccaggtgatcagttcgaaatccagctgacccagcagctgcagagcttaatccctaacaataatgtaagaagattgattgctcacgtcatacgtactttgaagatggactgctcaggcgcccacgtgcaggtgacttgcgcaaaactgatatctagaaccggccatttgatgaaattgttgtcaggccagcaggaggtcaaagcctccaagatcgaatgggacactgaccagtggaagattgaaaattacattaacgaaagcaccgaggctcagagcgagcagaaagaaaaaagcctagaactgaaaaaagaagtcccaggttacggttacactgacaagctgatcctagccctgattgtaacggggattttgacgatccttatcattttattctgccttatagttatatgttgccaccgcagatctcttcaggaggacgaagaagggttctcgagggactctgaggcccctacagaagaggaggagtcagaagctttaccttag

SEQ ID NO: 296781 - DNA, 4908 bp, Artificial Sequence
  derived and/or modified sequence
atgacgagtgcccagtgccctgctctcgcctgcgtgatgtcacccctccgtttttggggcccctggcctcttttgatgtggcagttactttggcttctagttaaggaagcgcaaccactggagtgggttaaggaccccctccagctaacctccaatccactgggccccccagaaccatggtcatctcatagcagccactttccccgtgaatccccccacgcccctacactccccgccgacccatgggattttgatcatctcggcccttccgcctcctcggagatgcctgcccctccccaggagtccacagaaaaccttgtccccttcctggacacctgggacagcgcaggtgagcttcctctagaaccggaacaatttctggcatcgcagcaggatttaaaggacaagctttctccacaggaaagactgccagtgagccctaaaaagctcaaaaaggatcctgcacaacgctggtccttagccgagattatcggaattatccgccagctctccaccccccaatctcagaagcagactctccaaaatgagtactcttctaccgacacaccataccccggttctctgcctccggagctgcgtgtcaaaagcgacgaacctccgggtccttctgagcaggtcggaccgtcccagttccacttggaacctgaaacccagaatcctgaaactcttgaagacatccagtcaagctccttgcagcaggaagcaccggcacagcttccacagctcctcgaagaggaaccgagctccatgcagcaggaggcaccagctctcccccccgaatccagcatggagtccctgacactgcctaatcacgaggtctccgtgcagccccctggagaagaccaagcctattatcacctgccaaacatcacagtcaagcccgcagacgtggaggtgacaatcacgtccgagccaactaatgaaaccgaaagttcacaggctcagcaggaaacaccaatccagtttcctgaagaagttgagccgtcagcaacgcaacaagaagctcccattgagcctccagtgccaccaatggagcatgaattgagtatatctgagcaacaacagccagttcagccatcagagtcaccaagagaagtcgaatcttcacctacccagcaggagacaccgggccagccccccgagcaccatgaggtgaccgtcagtcctcccggacatcatcagacacatcacctggccagcccatccgttagtgtcaagcctcccgatgtgcagctaacaattgccgcggagccctcagcagaagtggggaccagccttgtccaccaagaagctaccacaagattgtcgggctcagggaacgatgtggaacctcctgccattcagcacggtggcccgcctttgctccctgaatcaagcgaagaagcagggccattggctgtgcagcaagagacctccttccagtcaccagagccaattaacaacgagaaccccagcccaactcagcaggaggccgcagccgagcacccacaaactgcagaagagggagaatccagcctgactcaccaggaagcccccgcccagactcctgagtttcccaacgttgtggtcgctcagcccccggagcatagtcacctaacccaagctaccgtccagccgctcgatctgggattcaccattacgcccgagtccaagaccgaggtagagctcagccccaccatgaaagagacccccacccaaccacccaagaaggtcgtgccacagcttcgagtgtatcaaggggtgacgaatcccaccccaggacaagaccaagcacagcaccctgtttctccctccgttacagttcagctcctagatctggggttgaccattactcccgaacctaccactgaagtgggccatagtaccccaccaaaacgtaccatcgtcagtcctaaacaccccgaggtaacattacctcatccagatcaggtgcaaacgcagcactctcacctgactcgcgcaacggttcaaccattagacctcgggttcaccattacacctaagtctatgaccgaggtagagcccagcaccgcgctaatgactactgcacctccccccggccaccccgaagtgacgctgccaccgagtgacaagggtcaggcacagcatagccatctcacccaggcgactgttcagcccctggacctcgagctcactattactacaaaaccgacaaccgaggtaaagccgagcccaaccacagaagaaacttctacgcagccccctgacttaggactggcaattataccggaaccgactaccgaaacaggccactccacagcccttgagaagacaacggcccctcgaccagatagagtccaaactctgcaccggtccttgactgaggttacaggcccccctaccgagctcgagcccgcacaggattcactagtccagtccgaatcttacacccagaataaagccctgacagcccccgaagagcacaaggcatccaccagcactaatatttgcgagttgtgtacctgtggagatgaaatgctgagttgtatcgacctgaatccagaacagagactcagacaggttcctgtgccggaacccaacacccataacggcaccttcacgatactgaacttccagggaaattacatttcttacattgacggcaatgtgtggaaggcctacagctggactgagaaactcatcctccgggagaacaaccttaccgagctgcacaaggattccttcgagggactgctgagcctgcagtatttggaccttagttgtaacaagattcagagcatcgagcgtcacacctttgaacccctgcctttcctgaaattcatcaacctgtcttgcaatgttatcacagaactatccttcggcacattccaggcctggcatggcatgcagtttctgcacaaactgatcttaaatcacaatcctctgacaacagtcgaggatccatacttatttaagctaccagctttaaagtatctggacatggggacaactttggtgccactcaccaccctcaagaatatacttatgatgacagtggagctcgagaagcttattttaccttctcacatggcttgttgcctttgtcaattcaagaattccatagaggccgtgtgcaagaccgtgaagctgcactgcaacagcgcctgcctgaccaacaccacacattgtcctgaggaggcctccgtaggtaatccggagggtgccttcatgaaagttcttcaggcaagaaaaaactatacctctacggaactgatcgtggagcccgaagagccatcggatagctccgggattaatctctccggattcggctcggagcagctcgacaccaacgacgagtctgatttcatttcgacccttagatatatcctcccctatttttcagcagtgaacctcgacgtaaaatccttactgttgcctttgataaagcttcccaccaccggcaacagtctggcgaaaatccagacagtcggtcagaaccgccagcgcgtcaagcgggttctgatgggaccgcgatcaattcagaagagacattttaaggaagttgggcggcaatcaattcggcgggagcaaggcgcgcaggccagtgtggaaaacgccgctgaggaaaagaggctgggaagccccgctccccgtgaggtggaacaacctcacacccaacaaggtcccgaaaaactggctgggaacgccgtgtatacaaaaccatcgtttacccaggaacataaggccgcagtgtctgtcctgaaaccattttctaagggagccccaagcactagttcacccgctaaggcactacctcaggtaagagatagatggaaagatctcactcacgcaatcagcacgttggagtcagctaaggcaagagttaccaatactaaaacttccaagcctattgtacacgctcgaaagaagtatagattccataagacacggagccacgtaactcaccggactcccaaggtgaagaagtctccaaaagtacggaagaagagctacctaagtagattgatgttagcaaacaggttgcctttttccgcggccaaatcactcattaatagtccttcacagggagccttttcaagccttggtgacctgagtccccaagagaatcccttcctggaggtcagcgcccctagcgaacattttattgaaaagaacaacaccaagcacacaacggccagaaatgcgtttgaggagaacgacttcatggaaaacaccaacatgccagagggaaccatctccgagaatacaaactacaaccacccccctgaagccgatagcgccggaacagcttttaacctgggaccaacagtcaagcaaaccgagacaaagtgggaatacaataacgttggtaccgacctttctcctgaacccaaatccttcaactaccctctcctgtccagccccggggaccagttcgagatccaactgactcagcagctgcagtccctcatccctaacaataatgtccggcgtctgatcgcgcatgtgatccgtacactcaaaatggactgtagcggcgcccatgtgcaagtgacttgtgccaagcttatttcacggacgggacatctgatgaagctgctgagtgggcaacaagaggtcaaagccagcaagatcgagtgggacacggatcagtggaaaatcgagaactacattaatgagagtacagaggctcagtccgaacagaaagaaaagtccctcgagctaaaaaaagaagtgcccggatacggctacacagacaaactaatactggccctgatcgtgaccggcatattgactattctcataattctcttctgcctgattgttatctgctgccatcggagaagtttgcaagaggacgaagaaggtttctcccgggactccgaagctcctactgaggaagaggaatccgaagcactgccctag

SEQ ID NO: 296782 - DNA, 2025 bp, Artificial Sequence
  derived and/or modified sequence
atgcagttctacactttgaaaatcatcctcaaccataaccctcttaccactgttgaggacccctatcttttcaagttgcccgcgctcaagtacctcgatatgggaacaactctggtccccctaactaccctgaaaaacatccttatgatgactgtcgagctggagaaacttatcttaccttcacatatggcttgctgtctctgtcagtttaagaatagcatcgaagcggtctgcaagaccgtcaagctgcactgcaactccgcctgcttgacaaacactattcactgtcctgaggaggcgagcgtgggcaatcccgagggagcctttatgaaagtgctacaggccagaaagaactacacatcaactgagcttattgtggagccagaggaaccttctgactcttctggaattaacctttccggatttggctcagagcagctagacacaaatgatgagagcgatttcataagcacactccggtacattctgccttatttctcagcagtgaacctggacgtcaagtccctgcttcttccactcataaagcttcccaccacaggaaattcactcgccaagatccagacagtcggacaaaatagacagagagtgaagcgagtgctgatgggcccacggagtatccagaagcgccacttcaaggaagtcggccgccagagtatccggcgagagcagggcgcacaggctagcgtcgagaacgccgcggaggaaaagagattggggtctccagctccccgcgaagtcgaacagccccacacccagcagggtccagagaaacttgccggtaatgcggtctatacaaagccctctttcactcaggaacacaaagccgcagtgagcgtcctgaaaccattcagtaaaggtgcaccgtctactagctctcccgccaaggctctgccacaggtgcgagacagatggaaagatctaacgcacgctatatccatcctggagtcagccaaagcacgggtaaccaacaccaaaacatctaagcccattgtgcacgctcgtaaaaaataccgcttccacaagacacggagtcatgtgacgcatcgcactcccaaggtgaaaaaatcccccaaggtgcggaagaaaagttacctcagtcgcctaatgctcgccaatcgtctcccattctctgccgcgaaatccctgatcaatagtccctcgcagggagctttttctagtctgggagatctgtccccacaagagaatccgttcctggaggtatctgctccctcagaacacttcatcgaaaagaacaataccaaacacactacagctcgcaatgcgttcgaggagaacgacttcatggagaacaccaatatgcccgagggcactatcagcgagaacaccaattataatcacccccccgaggctgacagtgccggcactgcctttaacctcggtcctaccgttaaacagacggagactaaatgggaatataataacgtcggaacagatccttcacctgagccaaaaagttttaactaccccttgctgagctcaccgggggatcagttcgaaatccagttgacccagcaactccagagcctgatccccaataataatgtccgccgcctgattgcccacgttattagaactctcaagatggactgtagcggcgcgcacgtccaagttacatgtgctaaactcatctcacgtacaggccacctgatgaagttactatccggtcagcaagaggttaaggcctctaaaatagagtgggatacggaccagtggaaaatcgaaaactacataaacgaatctaccgaggcacagtcagagcagaaggagaagtcactcgagctgaagaaagaggtgcctggatatgggtacacagataaactgattctcgccctgattgtaaccggcattttgactatccttatcattctgttctgcctgatcgttatctgctgtcatcgtcggtcgttgcaggaggatgaagaaggattctccagggactctgaagctcctacggaagaggaggaaagcgaggctttgccttag

SEQ ID NO: 296783 - DNA, 4908 bp, Artificial Sequence
  derived and/or modified sequence
atgacatctgcacagtgccctgctctggcctgtgttatgtcccccctacggttctggggaccttggccactgctcatgtggcagctgctatggctgttagtaaaagaggcccagcccctggagtgggtgaaagaccccctgcagctaacgtcaaatccccttggtccaccagagccttggtccagccactcttcacacttcccaagggaatcccctcacgcccctaccctgcctgctgatccctgggatttcgatcatctgggccccagtgctagttccgaaatgcccgcccccccccaggagtctactgagaatcttgtcccattcttggatacttgggattctgctggggagctgcccctcgaacctgagcagtttctcgccagtcagcaggatttgaaagacaagttgtccccccaagaaaggctgccagtgtctcccaagaagctgaagaaggatcccgcccaacggtggagcctcgccgagataattggaataataaggcaattaagcacaccacaatcccaaaagcagacactccagaacgagtactcatccacggatacaccgtaccctggaagtttgccccccgagctccgtgtcaagtcagatgagcctccaggtccgtccgagcaggtcggcccgagccaattccacctggagcccgaaacacagaatccagaaacactcgaagacatccagtccagcagtctgcaacaggaagcaccagctcagttgcctcagttgctggaggaggagccttcttctatgcagcaggaggctccagcactccctcctgaaagctcaatggaaagtttgaccctacccaatcacgaggtaagtgtgcagccacccggggaggatcaggcttattaccatctgcccaacatcacagttaagcccgccgacgtggaagttacaatcacgtccgagcccaccaacgagacggagagcagccaggcccaacaagaaacaccaattcagttccccgaggaagtcgaaccctcggccacccaacaagaggccccaattgaacctcctgtgccaccaatggaacacgagctctcaatctcagagcagcagcagcctgttcagccaagcgagtctcctcgcgaagtagagtcaagtccaacccagcaggagactccaggacaacccccagaacatcatgaagtcaccgtgagcccgcccggacaccatcagactcaccatcttgccagcccatctgtttcagtgaagcctcctgacgtgcagcttacgattgccgccgagccgtcagcagaggtagggacaagcttagtccaccaagaggctactacgcgtctctcaggtagcggaaatgacgtagagcccccagctatacagcacggcggaccgccgcttctgcccgagtccagtgaagaagccgggccactagccgtccagcaggagacttctttccagtcacccgaacctattaataatgaaaatccctcgccaacacagcaagaggccgcagccgaacatccacagaccgctgaagaaggcgaatctagcctgacacatcaggaggcccctgcacaaactcccgagtttccaaatgtcgtggtagcgcaaccaccagaacacagccacctaacacaggccaccgtgcagcccctcgacctaggctttaccattactccagagagtaaaacagaagtggagctctcgccaactatgaaggagaccccaacacaacccccaaaaaaggtggtccctcaattgcgggtctaccagggcgtgactaaccccactcctggccaggaccaggcacaacaccccgtctctcccagtgtgacggtgcaactgttggacttggggctgacgataacaccagagccaacaactgaggtcgggcactctacaccgcctaaacgcacaatcgtgagtcctaagcatcccgaggttacgctccctcaccccgaccaagtgcaaacacagcacagtcatctcacgagggccaccgtgcaaccccttgatttgggattcactatcacccctaagtcaatgactgaggtagagccttcaaccgccctcatgactacggccccacctccaggccaccccgaagtgaccctgccaccatccgacaaggggcaggcacagcatagccacttgacacaagctaccgttcaacctctcgacctggagttgaccattacaacgaagcctacaaccgaggtgaagccttcgccgaccactgaagagacgagcacccagccacctgacctcgggttagcaatcatccctgaacctactaccgagaccgggcactcaaccgcacttgaaaaaaccacagctcccaggcctgaccgcgtccaaactcttcatcgcagcctgactgaggttaccggacctccgaccgagctcgagcccgctcaggactcattggtgcagagcgagagttacacacagaacaaggccctgactgctccagaggaacacaaggctagcacatcaacgaacatttgcgaattatgcacctgtggcgatgaaatgttgagttgtattgatctgaatccagagcagaggctcagacaagtccctgttcccgagcctaatacccacaatggcacctttaccatcctcaactttcaaggtaattacattagctatatagacggaaacgtttggaaggcttatagttggaccgagaagttgatcttaagggagaataacctgacggaattgcacaaggactcattcgagggactgctgtccttacagtacttagatctgagctgtaacaagattcagtctatcgagcgccatacttttgagccactgcccttcctcaagtttataaacctatcctgcaacgtgatcaccgagctctcatttggcaccttccaggcatggcatggcatgcaattcctgcacaagctgattctcaaccataacccactgacaaccgtcgaggacccctatctcttcaagctgcctgccttaaaatatttggatatgggaacgacactagttccattaaccacactgaagaacatcctgatgatgaccgtggaactcgaaaagctgatactccctagccatatggcatgttgtttgtgccagttcaaaaatagcatcgaagccgtatgcaagactgtgaaactgcattgtaatagcgcctgtttgaccaataccatccattgccccgaagaagcttccgtggggaaccccgaaggtgcttttatgaaggttctccaggctcggaagaattacacgtccactgagttgattgtggagccagaagaaccatctgacagctctgggatcaacttgtctggcttcggatccgagcagctggataccaatgacgagtccgacttcattagcacattaagatacattcttccatatttttctgccgtaaacctcgacgttaagtccctactgttgcctttaattaagttgccaaccacaggtaactccttggcaaaaattcagactgtgggccagaaccgccagcgtgtcaagcgggtgctcatgggaccccgctccatccagaagcgccactttaaggaggtgggcagacaatcaatcaggagggaacaaggggcacaggcctcggtagaaaatgctgctgaagaaaagaggctcgggtcccccgctcctcgtgaagtagaacagcctcacacacagcaaggcccggaaaaactggccggaaacgcagtctatactaagccttcatttacccaggagcacaaagctgcagtcagcgtgctcaagcccttcagcaagggtgccccatctacgtctagccctgcaaaagcgctgccccaggtgcgagaccgatggaaggatctgacacacgccattagcatcctagagtcggccaaggcgcgggttacaaatacaaaaacgtcaaagcctatcgtgcatgcacgcaaaaagtatcggttccacaagaccagatctcacgtaactcacaggacccctaaagtgaagaaatcccctaaggtgagaaagaaatcctacttgtcccggctcatgttagccaaccggctgccattttccgctgctaagagtctgattaattccccatcgcagggagcgttcagttcactcggtgatctgagtccccaggagaatccattcttagaagtatccgcaccttccgaacacttcatcgaaaaaaataacacaaaacacaccacagcgaggaatgcttttgaagaaaacgatttcatggaaaacaccaatatgcctgagggcaccataagcgaaaatacaaactacaatcaccctcctgaagcagattcagcgggaaccgcctttaacctcggccctaccgtgaaacagaccgaaaccaagtgggagtataataatgtgggaacagacccttcacctgagcccaaatcatttaattaccctctcctgtcctcaccaggagaccagttcgagatccagttgacccagcagttgcaatcgctgatcccaaataacaacgttaggcggctcatcgcacatgtgatccggacgctcaagatggactgctctggcgctcatgtacaggtcacttgtgctaaattgatctcacgcactgggcacctcatgaaactcctgtctggccagcaggaggtcaaggcatctaagattgagtgggacactgatcaatggaagatagagaactacatcaatgagagtaccgaagcgcagagcgagcagaaagaaaaatctcttgagcttaagaaggaggtcccagggtatgggtacactgataaattaatccttgcattgattgtcaccggcatcctgacaattctgatcattctgttctgcctgattgttatctgttgccatcgccgatccctgcaggaggatgaggaggggttcagccgggactcggaggcccctactgaggaggaggagtctgaagccttaccttag

SEQ ID NO: 296784 - DNA, 4908 bp, Artificial Sequence
  derived and/or modified sequence
atgaccagcgcccagtgcccagccctggcctgtgtgatgagccccctgcgcttctggggcccctggcccctgctgatgtggcagctgctgtggctgctggtgaaggaggcccagcccctggagtgggtgaaggaccccctgcagctgaccagcaaccccctgggccccccagagccctggagcagccacagcagccacttcccccgggagagcccccacgcccccaccctgcctgctgacccctgggactttgaccacctgggccccagcgccagcagcgagatgcctgccccaccccaggagagcacagagaacctggtgcccttcctggacacctgggacagcgctggggagctgcccctggagcctgagcagttcctggccagccagcaggacctgaaggacaagctgagcccccaggagcggctgcctgtgagccccaagaagctgaagaaggaccctgcccagcgctggagcctggccgagatcatcggcatcatccggcagctgagcaccccccagagccagaagcagaccctgcagaatgagtacagcagcacagacaccccctacccaggcagcctgcccccagagctgcgggtgaagagtgatgagcccccaggccccagcgagcaggtgggccccagccagttccacctggagcctgagacccagaaccctgagaccctggaggacatccagagcagcagcctgcagcaggaggccccagcccagctgccccagctgctggaggaggagcccagctccatgcagcaggaggccccagccctgcccccagagagctccatggagagcctgaccctgcccaaccacgaggtgtctgtgcagcccccaggagaggaccaggcctactaccacctgcccaacatcaccgtgaagccagcagatgtggaggtgaccatcaccagcgagcccaccaatgaaacagagagcagccaggcccagcaggagacccccatccagtttcctgaggaggtggagcccagcgccacccagcaggaggcccccatcgagccccctgtgccccccatggagcacgagctgagcatcagcgagcagcagcagcctgtgcagcccagcgagagcccccgggaggtggagagcagccccacccagcaggagaccccaggccagcccccagagcaccacgaggtgacagtgagccccccaggccaccaccagacccaccacctggccagccccagcgtgtctgtgaagcccccagatgtgcagctgaccatcgctgctgagcccagcgctgaggtgggcaccagcctggtgcaccaggaggccaccacccggctgagcggcagcggaaatgatgtggagcccccagccatccagcacggcggcccccccctgctgcctgagagcagcgaggaggccggccccctggccgtgcagcaggagaccagcttccagagccctgagcccatcaacaatgaaaaccccagccccacccagcaggaggccgctgctgagcacccccagacagctgaggagggggagagcagcctgacccaccaggaggccccagcccagaccccagagttccccaacgtggtggtggcccagcccccagagcacagccacctgacccaggccaccgtgcagcccctggacctgggcttcaccatcaccccagagagcaagacagaggtggagctgagccccaccatgaaggagacccccacccagccccccaagaaggtggtgccccagctgcgggtgtaccagggcgtgaccaaccccaccccaggccaggaccaggcccagcaccctgtgagccccagcgtgacagtgcagctgctggacctgggcctgaccatcaccccagagcccaccacagaggtgggccacagcaccccacccaagaggaccatcgtgagccccaagcaccctgaggtgaccctgccccacccagaccaggtgcagacccagcacagccacctgacccgggccaccgtgcagcccctggacctgggcttcaccatcacccccaagtccatgacagaggtggagcccagcacagccctgatgaccacagcccctcctcctggccaccctgaggtgaccctgcccccaagtgacaagggccaggcccagcacagccacctgacccaggccaccgtgcagcccctggacctggagctgaccatcaccaccaagcccaccacagaggtgaagcccagccccaccacagaggagaccagcacccagcccccagacctgggcctggccatcatccctgagcccaccacagaaacaggccacagcacagccctggagaagaccacagcccccaggccagacagagtgcagaccctgcacaggagcctgacagaggtgactggaccacccacagagctggagcccgcccaggacagcctggtgcagagcgagagctacacccagaacaaggccctgacagcccctgaggagcacaaggccagcaccagcaccaacatctgtgagctgtgcacctgtggagatgagatgctgagctgcatcgacctgaaccctgagcagaggctgcggcaggtgcctgtgcctgagcccaacacccacaacggcaccttcaccatcctgaacttccagggcaactacatctcctacattgatggaaatgtgtggaaggcctacagctggacagagaagctgatcctgcgggagaacaacctgacagagctgcacaaggacagctttgagggcctgctgagcctgcagtacctggacctgagctgcaacaagatccagagcattgaaagacacacctttgagcccctgcccttcctgaagttcatcaacctgagctgcaacgtcatcacagagctgagctttggcaccttccaggcctggcacggcatgcagttcctgcacaagctgatcctgaaccacaaccccctgaccaccgtggaggacccctacctgttcaagctgcctgccctgaagtacctggacatgggcaccaccctggtgcccctgaccaccctgaagaacatcctgatgatgacagtggagctggagaagctgatcctgcccagccacatggcctgctgcctgtgccagttcaagaacagcattgaagctgtgtgcaagacagtgaagctgcactgcaacagcgcctgcctgaccaacaccacccactgcccagaggaggcctctgtgggcaaccctgagggcgccttcatgaaggtgctgcaggccaggaagaactacaccagcacagagctgattgtggagcctgaggagcccagcgacagcagcggcatcaacctgagcggctttggaagtgagcagctggacaccaatgatgaaagtgacttcatcagcaccctgcgctacatcctgccctacttctctgctgtgaacctggatgtgaagagcctgctgctgcccctcatcaagctgcccaccactggaaacagcctggccaagatccagacagtgggccagaaccggcagagggtgaagagggtgctgatgggccccaggagcatccagaagaggcacttcaaggaggtgggccggcagagcatccggcgggagcagggcgcccaggcctctgtggagaatgctgctgaggagaagaggctgggcagccctgccccccgggaggtggagcagccccacacccagcagggccctgagaagctggccggaaatgctgtgtacaccaagcccagcttcacccaggagcacaaggctgctgtgtctgtgctgaagcccttcagcaaaggagcccccagcaccagcagccctgccaaggccctgccccaggtgcgggaccgctggaaggacctgacccacgccatcagcaccctggagagcgccaaggcccgggtgaccaacaccaagaccagcaagcccatcgtgcacgccaggaagaagtaccgcttccacaagaccaggagccacgtgacccacaggacccccaaggtgaagaagagccccaaggtgaggaagaagagctacctgagccggctgatgctggccaaccggctgcccttctctgctgccaagagcctcatcaacagccccagccagggcgccttcagcagcctgggggacctgagcccccaggagaaccccttcctggaggtgtctgcccccagcgagcacttcatcgagaagaacaacaccaagcacaccacagccagaaatgcctttgaagaaaatgacttcatggagaacaccaacatgcctgagggcaccatcagcgagaacaccaactacaaccaccccccagaggccgacagcgctggaacagccttcaacctgggccccaccgtgaagcagacagagaccaagtgggagtacaacaacgtgggcacagacctgagccctgagcccaagagcttcaactaccccctgctgagcagccctggggaccagtttgagatccagctgacccagcagctgcagagcctcatccccaacaacaacgtgagaagactcatcgcccacgtgatccgcaccctgaagatggactgcagcggcacccacgtgcaggtgacctgtgccaagctgatcagcaggacaggccacctgatgaagctgctgagcggccagcaggaggtgaaggccagcaagattgagtgggacacagaccagtggaagattgagaactacatcaatgaaagcacagaggcccagagcgagcagaaggagaagagcctggagctgaagaaggaggtgcccggctacggctacacagacaagctgatcctggccctgattgtgacaggcatcctgaccatcctgatcatcctcttctgcctgattgtcatctgctgccaccggcgcagcctgcaggaggatgaggagggcttcagccgggacagcgaggcccccacagaggaggaggagagcgaggccctgccctag

SEQ ID NO: 296785 - DNA, 2025 bp, Artificial Sequence
  derived and/or modified sequence
atgcagttctacaccctgaagatcatcctgaaccacaaccccctgaccaccgtggaggacccctacctgttcaagctgcctgccctgaagtacctggacatgggcaccaccctggtgcccctgaccaccctgaagaacatcctgatgatgacagtggagctggagaagctgatcctgcccagccacatggcctgctgcctgtgccagttcaagaacagcattgaggccgtgtgcaagacagtgaagctgcactgcaacagcgcctgcctgaccaacaccacccactgcccagaggaggcctctgtgggcaaccctgagggcgccttcatgaaggtgctgcaggccaggaagaactacaccagcacagagctgattgtggagcctgaggagcccagcgacagcagcggcatcaacctgagcggcttcggcagcgagcagctggacaccaatgatgaaagtgacttcatcagcaccctgcgctacatcctgccctacttctctgctgtgaacctggatgtgaagagcctgctgctgcccctcatcaagctgcccaccaccggcaacagcctggccaagatccagacagtgggccagaaccggcagagggtgaagagggtgctgatgggccccaggagcatccagaagaggcacttcaaggaggtgggccggcagagcatcagaagagagcagggcgcccaggcctctgtggagaatgctgctgaggagaagaggctgggcagccctgccccccgggaggtggagcagccccacacccagcagggccctgagaagctggccggaaatgctgtgtacaccaagcccagcttcacccaggagcacaaggctgctgtgtctgtgctgaagcccttcagcaagggggcccccagcaccagcagccctgccaaggccctgccccaggtgcgggaccgctggaaggacctgacccacgccatcagcaccctggagagcgccaaggcccgggtgaccaacaccaagaccagcaagcccatcgtgcacgccaggaagaagtaccgcttccacaagaccaggagccacgtgacccacaggacccccaaggtgaagaagagccccaaggtgaggaagaagagctacctgagccggctgatgctggccaaccggctgcccttctctgctgccaagagcctcatcaacagccccagccagggcgccttcagcagcctgggggacctgagcccccaggagaaccccttcctggaggtgtctgcccccagcgagcacttcatcgagaagaacaacaccaagcacaccacagccagaaatgcctttgaggagaatgacttcatggagaacaccaacatgcctgagggcaccatcagcgagaacaccaactacaaccaccccccagaggccgacagcgctggaacagccttcaacctgggccccaccgtgaagcagacagagaccaagtgggagtacaacaacgtgggcacagacctgagccctgagcccaagagcttcaactaccccctgctgagcagccctggggaccagtttgagatccagctgacccagcagctgcagagcctcatccccaacaacaacgtgcggcggctgattgcccacgtgatccgcaccctgaagatggactgcagcggggcccacgtgcaggtgacctgtgccaagctgatcagcaggacaggccacctgatgaagctgctgagcggccagcaggaggtgaaggccagcaagattgagtgggacacagaccagtggaagattgagaactacatcaatgaaagcacagaggcccagagcgagcagaaggagaagagcctggagctgaagaaggaggtgcccggctacggctacacagacaagctgatcctggccctgattgtgacaggcatcctgaccatcctgatcatcctcttctgcctgattgtcatctgctgccacagaagaagcctgcaggaggatgaggagggcttcagccgggacagcgaggcccccacagaggaggaggagagcgaggccctgccctag

SEQ ID NO: 296786 - DNA, 4908 bp, Artificial Sequence
  derived and/or modified sequence
atgaccagcgcccagtgcccagccctggcctgtgtgatgagccccctgcgcttctggggcccctggcccctgctgatgtggcagctgctgtggctgctggtgaaggaggcccagcccctggagtgggtgaaggaccccctgcagctgaccagcaaccccctgggccccccagagccctggagcagccacagcagccacttcccccgggagagcccccacgcccccaccctgcctgctgacccctgggactttgaccacctgggccccagcgccagcagcgagatgcctgccccaccccaggagagcacagagaacctggtgcccttcctggacacctgggacagcgctggggagctgcccctggagcctgagcagttcctggccagccagcaggacctgaaggacaagctgagcccccaggagcggctgcctgtgagccccaagaagctgaagaaggaccctgcccagcgctggagcctggccgagatcatcggcatcatccggcagctgagcaccccccagagccagaagcagaccctgcagaatgagtacagcagcacagacaccccctacccaggcagcctgcccccagagctgcgggtgaagagtgatgagcccccaggccccagcgagcaggtgggccccagccagttccacctggagcctgagacccagaaccctgagaccctggaggacatccagagcagcagcctgcagcaggaggccccagcccagctgccccagctgctggaggaggagcccagctccatgcagcaggaggccccagccctgcccccagagagctccatggagagcctgaccctgcccaaccacgaggtgtctgtgcagcccccaggagaggaccaggcctactaccacctgcccaacatcaccgtgaagccagcagatgtggaggtgaccatcaccagcgagcccaccaatgaaacagagagcagccaggcccagcaggagacccccatccagtttcctgaggaggtggagcccagcgccacccagcaggaggcccccatcgagccccctgtgccccccatggagcacgagctgagcatcagcgagcagcagcagcctgtgcagcccagcgagagcccccgggaggtggagagcagccccacccagcaggagaccccaggccagcccccagagcaccacgaggtgacagtgagccccccaggccaccaccagacccaccacctggccagccccagcgtgtctgtgaagcccccagatgtgcagctgaccatcgctgctgagcccagcgctgaggtgggcaccagcctggtgcaccaggaggccaccacccggctgagcggcagcggaaatgatgtggagcccccagccatccagcacggcggcccccccctgctgcctgagagcagcgaggaggccggccccctggccgtgcagcaggagaccagcttccagagccctgagcccatcaacaatgaaaaccccagccccacccagcaggaggccgctgctgagcacccccagacagctgaggagggggagagcagcctgacccaccaggaggccccagcccagaccccagagttccccaacgtggtggtggcccagcccccagagcacagccacctgacccaggccaccgtgcagcccctggacctgggcttcaccatcaccccagagagcaagacagaggtggagctgagccccaccatgaaggagacccccacccagccccccaagaaggtggtgccccagctgcgggtgtaccagggcgtgaccaaccccaccccaggccaggaccaggcccagcaccctgtgagccccagcgtgacagtgcagctgctggacctgggcctgaccatcaccccagagcccaccacagaggtgggccacagcaccccacccaagaggaccatcgtgagccccaagcaccctgaggtgaccctgccccacccagaccaggtgcagacccagcacagccacctgacccgggccaccgtgcagcccctggacctgggcttcaccatcacccccaagtccatgacagaggtggagcccagcacagccctgatgaccacagcccctcctcctggccaccctgaggtgaccctgcccccaagtgacaagggccaggcccagcacagccacctgacccaggccaccgtgcagcccctggacctggagctgaccatcaccaccaagcccaccacagaggtgaagcccagccccaccacagaggagaccagcacccagcccccagacctgggcctggccatcatccctgagcccaccacagaaacaggccacagcacagccctggagaagaccacagcccccaggccagacagagtgcagaccctgcacaggagcctgacagaggtgactggaccacccacagagctggagcccgcccaggacagcctggtgcagagcgagagctacacccagaacaaggccctgacagcccctgaggagcacaaggccagcaccagcaccaacatctgtgagctgtgcacctgtggagatgagatgctgagctgcatcgacctgaaccctgagcagaggctgcggcaggtgcctgtgcctgagcccaacacccacaacggcaccttcaccatcctgaacttccagggcaactacatctcctacattgatggaaatgtgtggaaggcctacagctggacagagaagctgatcctgcgggagaacaacctgacagagctgcacaaggacagctttgagggcctgctgagcctgcagtacctggacctgagctgcaacaagatccagagcattgaaagacacacctttgagcccctgcccttcctgaagttcatcaacctgagctgcaacgtcatcacagagctgagctttggcaccttccaggcctggcacggcatgcagttcctgcacaagctgatcctgaaccacaaccccctgaccaccgtggaggacccctacctgttcaagctgcctgccctgaagtacctggacatgggcaccaccctggtgcccctgaccaccctgaagaacatcctgatgatgacagtggagctggagaagctgatcctgcccagccacatggcctgctgcctgtgccagttcaagaacagcattgaagctgtgtgcaagacagtgaagctgcactgcaacagcgcctgcctgaccaacaccacccactgcccagaggaggcctctgtgggcaaccctgagggcgccttcatgaaggtgctgcaggccaggaagaactacaccagcacagagctgattgtggagcctgaggagcccagcgacagcagcggcatcaacctgagcggctttggaagtgagcagctggacaccaatgatgaaagtgacttcatcagcaccctgcgctacatcctgccctacttctctgctgtgaacctggatgtgaagagcctgctgctgcccctcatcaagctgcccaccactggaaacagcctggccaagatccagacagtgggccagaaccggcagagggtgaagagggtgctgatgggccccaggagcatccagaagaggcacttcaaggaggtgggccggcagagcatccggcgggagcagggcgcccaggcctctgtggagaatgctgctgaggagaagaggctgggcagccctgccccccgggaggtggagcagccccacacccagcagggccctgagaagctggccggaaatgctgtgtacaccaagcccagcttcacccaggagcacaaggctgctgtgtctgtgctgaagcccttcagcaaaggagcccccagcaccagcagccctgccaaggccctgccccaggtgcgggaccgctggaaggacctgacccacgccatcagcaccctggagagcgccaaggcccgggtgaccaacaccaagaccagcaagcccatcgtgcacgccaggaagaagtaccgcttccacaagaccaggagccacgtgacccacaggacccccaaggtgaagaagagccccaaggtgaggaagaagagctacctgagccggctgatgctggccaaccggctgcccttctctgctgccaagagcctcatcaacagccccagccagggcgccttcagcagcctgggggacctgagcccccaggagaaccccttcctggaggtgtctgcccccagcgagcacttcatcgagaagaacaacaccaagcacaccacagccagaaatgcctttgaagaaaatgacttcatggagaacaccaacatgcctgagggcaccatcagcgagaacaccaactacaaccaccccccagaggccgacagcgctggaacagccttcaacctgggccccaccgtgaagcagacagagaccaagtgggagtacaacaacgtgggcacagacctgagccctgagcccaagagcttcaactaccccctgctgagcagccctggggaccagtttgagatccagctgacccagcagctgcagagcctcatccccaacaacaacgtgagaagactcatcgcccacgtgatccgcaccctgaagatggactgcagcggggcccacgtgcaggtgacctgtgccaagctgatcagcaggacaggccacctgatgaagctgctgagcggccagcaggaggtgaaggccagcaagattgagtgggacacagaccagtggaagattgagaactacatcaatgaaagcacagaggcccagagcgagcagaaggagaagagcctggagctgaagaaggaggtgcccggctacggctacacagacaagctgatcctggccctgattgtgacaggcatcctgaccatcctgatcatcctcttctgcctgattgtcatctgctgccaccggcgcagcctgcaggaggatgaggagggcttcagccgggacagcgaggcccccacagaggaggaggagagcgaggccctgccctag

SEQ ID NO: 296787 - DNA, 2025 bp, Artificial Sequence
  derived and/or modified sequence
atgcagttctacaccctgaagatcatcctgaaccacaaccccctgaccaccgtggaggacccctacctgttcaagctgcctgccctgaagtacctggacatgggcaccaccctggtgcccctgaccaccctgaagaacatcctgatgatgacagtggagctggagaagctgatcctgcccagccacatggcctgctgcctgtgccagttcaagaacagcattgaggccgtgtgcaagacagtgaagctgcactgcaacagcgcctgcctgaccaacaccatccactgcccagaggaggcctctgtgggcaaccctgagggcgccttcatgaaggtgctgcaggccaggaagaactacaccagcacagagctgattgtggagcctgaggagcccagcgacagcagcggcatcaacctgagcggcttcggcagcgagcagctggacaccaatgatgaaagtgacttcatcagcaccctgcgctacatcctgccctacttctctgctgtgaacctggatgtgaagagcctgctgctgcccctcatcaagctgcccaccaccggcaacagcctggccaagatccagacagtgggccagaaccggcagagggtgaagagggtgctgatgggccccaggagcatccagaagaggcacttcaaggaggtgggccggcagagcatcagaagagagcagggcgcccaggcctctgtggagaatgctgctgaggagaagaggctgggcagccctgccccccgggaggtggagcagccccacacccagcagggccctgagaagctggccggaaatgctgtgtacaccaagcccagcttcacccaggagcacaaggctgctgtgtctgtgctgaagcccttcagcaagggggcccccagcaccagcagccctgccaaggccctgccccaggtgcgggaccgctggaaggacctgacccacgccatcagcatcctggagagcgccaaggcccgggtgaccaacaccaagaccagcaagcccatcgtgcacgccaggaagaagtaccgcttccacaagaccaggagccacgtgacccacaggacccccaaggtgaagaagagccccaaggtgaggaagaagagctacctgagccggctgatgctggccaaccggctgcccttctctgctgccaagagcctcatcaacagccccagccagggcgccttcagcagcctgggggacctgagcccccaggagaaccccttcctggaggtgtctgcccccagcgagcacttcatcgagaagaacaacaccaagcacaccacagccagaaatgcctttgaggagaatgacttcatggagaacaccaacatgcctgagggcaccatcagcgagaacaccaactacaaccaccccccagaggccgacagcgctggaacagccttcaacctgggccccaccgtgaagcagacagagaccaagtgggagtacaacaacgtgggcacagaccccagccctgagcccaagagcttcaactaccccctgctgagcagccctggggaccagtttgagatccagctgacccagcagctgcagagcctcatccccaacaacaacgtgcggcggctgattgcccacgtgatccgcaccctgaagatggactgcagcggggcccacgtgcaggtgacctgtgccaagctgatcagcaggacaggccacctgatgaagctgctgagcggccagcaggaggtgaaggccagcaagattgagtgggacacagaccagtggaagattgagaactacatcaatgaaagcacagaggcccagagcgagcagaaggagaagagcctggagctgaagaaggaggtgcccggctacggctacacagacaagctgatcctggccctgattgtgacaggcatcctgaccatcctgatcatcctcttctgcctgattgtcatctgctgccacagaagaagcctgcaggaggatgaggagggcttcagccgggacagcgaggcccccacagaggaggaggagagcgaggccctgccctag

SEQ ID NO: 296788 - DNA, 4908 bp, Artificial Sequence
  derived and/or modified sequence
atgaccagcgcccagtgcccagccctggcctgtgtgatgagccccctgcgcttctggggcccctggcccctgctgatgtggcagctgctgtggctgctggtgaaggaggcccagcccctggagtgggtgaaggaccccctgcagctgaccagcaaccccctgggccccccagagccctggagcagccacagcagccacttcccccgggagagcccccacgcccccaccctgcctgctgacccctgggactttgaccacctgggccccagcgccagcagcgagatgcctgccccaccccaggagagcacagagaacctggtgcccttcctggacacctgggacagcgctggggagctgcccctggagcctgagcagttcctggccagccagcaggacctgaaggacaagctgagcccccaggagcggctgcctgtgagccccaagaagctgaagaaggaccctgcccagcgctggagcctggccgagatcatcggcatcatccggcagctgagcaccccccagagccagaagcagaccctgcagaatgagtacagcagcacagacaccccctacccaggcagcctgcccccagagctgcgggtgaagagtgatgagcccccaggccccagcgagcaggtgggccccagccagttccacctggagcctgagacccagaaccctgagaccctggaggacatccagagcagcagcctgcagcaggaggccccagcccagctgccccagctgctggaggaggagcccagctccatgcagcaggaggccccagccctgcccccagagagctccatggagagcctgaccctgcccaaccacgaggtgtctgtgcagcccccaggagaggaccaggcctactaccacctgcccaacatcaccgtgaagccagcagatgtggaggtgaccatcaccagcgagcccaccaatgaaacagagagcagccaggcccagcaggagacccccatccagtttcctgaggaggtggagcccagcgccacccagcaggaggcccccatcgagccccctgtgccccccatggagcacgagctgagcatcagcgagcagcagcagcctgtgcagcccagcgagagcccccgggaggtggagagcagccccacccagcaggagaccccaggccagcccccagagcaccacgaggtgacagtgagccccccaggccaccaccagacccaccacctggccagccccagcgtgtctgtgaagcccccagatgtgcagctgaccatcgctgctgagcccagcgctgaggtgggcaccagcctggtgcaccaggaggccaccacccggctgagcggcagcggaaatgatgtggagcccccagccatccagcacggcggcccccccctgctgcctgagagcagcgaggaggccggccccctggccgtgcagcaggagaccagcttccagagccctgagcccatcaacaatgaaaaccccagccccacccagcaggaggccgctgctgagcacccccagacagctgaggagggggagagcagcctgacccaccaggaggccccagcccagaccccagagttccccaacgtggtggtggcccagcccccagagcacagccacctgacccaggccaccgtgcagcccctggacctgggcttcaccatcaccccagagagcaagacagaggtggagctgagccccaccatgaaggagacccccacccagccccccaagaaggtggtgccccagctgcgggtgtaccagggcgtgaccaaccccaccccaggccaggaccaggcccagcaccctgtgagccccagcgtgacagtgcagctgctggacctgggcctgaccatcaccccagagcccaccacagaggtgggccacagcaccccacccaagaggaccatcgtgagccccaagcaccctgaggtgaccctgccccacccagaccaggtgcagacccagcacagccacctgacccgggccaccgtgcagcccctggacctgggcttcaccatcacccccaagtccatgacagaggtggagcccagcacagccctgatgaccacagcccctcctcctggccaccctgaggtgaccctgcccccaagtgacaagggccaggcccagcacagccacctgacccaggccaccgtgcagcccctggacctggagctgaccatcaccaccaagcccaccacagaggtgaagcccagccccaccacagaggagaccagcacccagcccccagacctgggcctggccatcatccctgagcccaccacagaaacaggccacagcacagccctggagaagaccacagcccccaggccagacagagtgcagaccctgcacaggagcctgacagaggtgactggaccacccacagagctggagcccgcccaggacagcctggtgcagagcgagagctacacccagaacaaggccctgacagcccctgaggagcacaaggccagcaccagcaccaacatctgtgagctgtgcacctgtggagatgagatgctgagctgcatcgacctgaaccctgagcagaggctgcggcaggtgcctgtgcctgagcccaacacccacaacggcaccttcaccatcctgaacttccagggcaactacatctcctacattgatggaaatgtgtggaaggcctacagctggacagagaagctgatcctgcgggagaacaacctgacagagctgcacaaggacagctttgagggcctgctgagcctgcagtacctggacctgagctgcaacaagatccagagcattgaaagacacacctttgagcccctgcccttcctgaagttcatcaacctgagctgcaacgtcatcacagagctgagctttggcaccttccaggcctggcacggcatgcagttcctgcacaagctgatcctgaaccacaaccccctgaccaccgtggaggacccctacctgttcaagctgcctgccctgaagtacctggacatgggcaccaccctggtgcccctgaccaccctgaagaacatcctgatgatgacagtggagctggagaagctgatcctgcccagccacatggcctgctgcctgtgccagttcaagaacagcattgaagctgtgtgcaagacagtgaagctgcactgcaacagcgcctgcctgaccaacaccatccactgcccagaggaggcctctgtgggcaaccctgagggcgccttcatgaaggtgctgcaggccaggaagaactacaccagcacagagctgattgtggagcctgaggagcccagcgacagcagcggcatcaacctgagcggctttggaagtgagcagctggacaccaatgatgaaagtgacttcatcagcaccctgcgctacatcctgccctacttctctgctgtgaacctggatgtgaagagcctgctgctgcccctcatcaagctgcccaccactggaaacagcctggccaagatccagacagtgggccagaaccggcagagggtgaagagggtgctgatgggccccaggagcatccagaagaggcacttcaaggaggtgggccggcagagcatccggcgggagcagggcgcccaggcctctgtggagaatgctgctgaggagaagaggctgggcagccctgccccccgggaggtggagcagccccacacccagcagggccctgagaagctggccggaaatgctgtgtacaccaagcccagcttcacccaggagcacaaggctgctgtgtctgtgctgaagcccttcagcaaaggagcccccagcaccagcagccctgccaaggccctgccccaggtgcgggaccgctggaaggacctgacccacgccatcagcatcctggagagcgccaaggcccgggtgaccaacaccaagaccagcaagcccatcgtgcacgccaggaagaagtaccgcttccacaagaccaggagccacgtgacccacaggacccccaaggtgaagaagagccccaaggtgaggaagaagagctacctgagccggctgatgctggccaaccggctgcccttctctgctgccaagagcctcatcaacagccccagccagggcgccttcagcagcctgggggacctgagcccccaggagaaccccttcctggaggtgtctgcccccagcgagcacttcatcgagaagaacaacaccaagcacaccacagccagaaatgcctttgaagaaaatgacttcatggagaacaccaacatgcctgagggcaccatcagcgagaacaccaactacaaccaccccccagaggccgacagcgctggaacagccttcaacctgggccccaccgtgaagcagacagagaccaagtgggagtacaacaacgtgggcacagaccccagccctgagcccaagagcttcaactaccccctgctgagcagccctggggaccagtttgagatccagctgacccagcagctgcagagcctcatccccaacaacaacgtgagaagactcatcgcccacgtgatccgcaccctgaagatggactgcagcggggcccacgtgcaggtgacctgtgccaagctgatcagcaggacaggccacctgatgaagctgctgagcggccagcaggaggtgaaggccagcaagattgagtgggacacagaccagtggaagattgagaactacatcaatgaaagcacagaggcccagagcgagcagaaggagaagagcctggagctgaagaaggaggtgcccggctacggctacacagacaagctgatcctggccctgattgtgacaggcatcctgaccatcctgatcatcctcttctgcctgattgtcatctgctgccaccggcgcagcctgcaggaggatgaggagggcttcagccgggacagcgaggcccccacagaggaggaggagagcgaggccctgccctag

SEQ ID NO: 296789 - DNA, 4908 bp, Artificial Sequence
  derived and/or modified sequence
atgaccagcgcccagtgccccgccctggcctgcgtgatgagccccctgagattttggggcccatggcccctgttgatgtggcagctactatggctgctggtaaaggaggctcagccactggaatgggtgaaggatcctcttcagctgacctctaacccattaggaccgcccgaaccgtggagctctcacagcagccactttcctagagagtccccgcacgctcctacattgcccgctgacccttgggattttgatcatctcgggccatccgcttcaagcgaaatgccagcccctccccaagaatccacagagaatctggtacccttcctagacacctgggatagcgcaggagagcttcctttagagcccgagcagttcttagcctctcagcaggacctaaaggacaagctctccccccaggaaaggctgcccgtctctcccaagaagttaaaaaaggatccggctcagagatggtccctcgcagaaatcatcgggataattagacagctctcaactccacagagccagaaacagaccctgcagaacgagtactcatccacagacacgccctaccccggctccctgccccccgaactgagggtaaagtccgacgagccacccggcccttctgaacaggtcggcccatcacagttccacctggagcccgaaactcaaaacccggaaacccttgaagatatacagtcatcgtccttgcagcaggaggcacctgctcagctgccccaactgctcgaagaggagccctcctccatgcagcaggaggctcccgccctcccccctgaatcttccatggaatctctaactttgcccaaccatgaggtgtcggtccagccccccggggaggatcaagcttattaccaccttccgaacattacagtcaagcccgctgatgtagaggtaacaatcacaagtgaacccacaaatgagactgagtcctctcaagcacagcaagagactcccattcaatttcctgaggaggtggagccttctgccacgcagcaggaggcccccatagaaccccctgtgcccccaatggaacatgaactctcgatatctgaacaacagcagccagtgcagccgagcgaatcaccacgggaagtggagagctcccctactcaacaagagacaccaggtcagccacccgagcaccatgaggtcacggtatcccctcccggccatcatcagacccatcacctggcctcgcctagtgtgtctgtgaagccacctgacgtgcagttaactatcgccgcggagccaagtgcagaggttggtacgagcctcgtccatcaggaagccacaactaggctgtctggttccggaaatgacgtggagccgcctgccattcaacacgggggaccacctcttctccccgaaagttcggaggaagctggtcctctcgccgttcaacaggagaccagtttccagagtcccgagcccattaacaatgagaatccatcaccaactcagcaggaggctgctgccgaacaccctcagactgctgaagaaggtgagtccagcttgacacatcaggaggccccagcgcagactcccgaattccccaacgtggtcgtcgctcaaccgcccgagcatagtcacctgacacaagccacagtgcagccgttggacttaggctttacaataactccagagtctaaaactgaagttgaactaagcccaactatgaaggaaacgccaacccaaccgcccaaaaaggttgttcctcagctacgcgtgtaccaaggggtcacaaacccaactcctggtcaggatcaggcccagcacccagtatcaccaagcgtaactgtgcagctccttgaccttggtttaaccataacccctgagcccactactgaggtgggccattcaacaccacccaaaaggactatcgtatctccgaagcaccctgaagtgaccctaccacatccggaccaggtgcagacacagcattctcatctcacacgtgccaccgtccagccactcgatctcggctttacaatcaccccaaagtctatgaccgaagtggaacctagtaccgccctgatgactacagccccacctcctggtcatccggaggtgaccctgccaccttccgataagggccaagcccagcattcacatctgacacaggccacggtgcagccgctggacttggagttaacaattaccacaaaacccaccacagaagtcaagccttctccaactaccgaagaaactagcacacagccaccagatctgggtctggctatcatcccagaacccaccacagagaccggccactctaccgccctcgagaaaaccactgctccgcggccggacagagttcagacactccatcggtcactcaccgaggtcactggccctccaactgagctggagccagcccaagactctctagtccaatcagagagttatactcagaataaggcactgacagccccagaagaacataaagcaagtacgagcaccaacatttgtgagttgtgcacatgcggcgacgaaatgttgagctgtatcgatctgaacccagagcaaaggttacgacaagttcctgtgcccgagcccaatacgcacaacggtacattcaccatcctgaacttccagggcaactatatatcttatatagacggcaacgtgtggaaagcctactcttggactgagaagctcatcctacgagagaacaacctaactgagctacacaaggatagttttgagggcttactgtcgttgcaatacctggatttgtcctgcaataagattcagtcaatagaacgacatacctttgaacctctgccttttcttaaattcatcaacctctcatgcaacgtgataactgagctgtcctttgggacatttcaggcatggcatggcatgcagttcctccacaagctcattctgaatcataaccctctgacaacggtcgaggatccctacctgttcaaacttccagccctaaaatacttagacatgggtaccacgttggtaccgttaaccacactcaaaaacatccttatgatgaccgtggaacttgaaaagctgatcctccctagtcatatggcctgttgtctgtgtcagttcaagaatagcatcgaggccgtttgtaaaacggtaaagctgcactgcaatagcgcttgcctgactaatacaacccactgccccgaggaggcctccgtggggaaccccgagggagctttcatgaaggttctgcaggccagaaagaattatactagtactgagctcatcgtagagcccgaagagcctagtgacagcagtggaattaatctgtccggctttggaagtgagcagctggataccaacgacgagagtgacttcatctctaccctgcgttacatcttgccatattttagcgccgtgaacctagatgtaaagtccttattgctccccctgataaagctgccaacgacagggaactccctcgccaagattcagaccgtggggcagaatcggcagcgagtgaagagagtattgatgggtccacggtcaatccagaagcgacactttaaggaggtaggtcgtcagtccatcaggagagaacagggggcacaggcctccgttgagaatgcggctgaagagaaaagactgggcagccccgccccaagagaggtggagcaacctcatactcaacaagggccagagaagcttgcagggaatgctgtgtatacgaagccgagcttcacacaggagcacaaagctgccgtctcagtcctcaagcccttttccaagggggcaccgagtacctcctctccggccaaagctcttcctcaggtgcgggatcggtggaaggacctgacacatgccatcagtaccctcgaaagcgccaaggcccgcgtcactaatactaaaacatccaagcccatcgtccatgcaaggaagaagtatcgattccacaaaacacggtctcacgttacccatcgcacacccaaggtcaaaaagtcaccgaaggtgaggaagaagtcctacctgtctcggctgatgctcgcaaatagactccccttttccgcagctaagtctctgatcaatagtcctagtcagggggcattcagctccctgggagaccttagtccacaggaaaaccccttccttgaggtgagcgcaccatccgaacattttatcgaaaaaaataacaccaagcacactaccgcaagaaatgctttcgaagaaaacgacttcatggagaatactaatatgccagaaggcactatcagtgaaaatactaattataaccatcctccggaggctgactcagcagggaccgcgttcaatttgggcccgacagtgaaacaaacagagaccaagtgggagtacaacaatgtcggtacagacctaagtccggagccaaagtcattcaattaccctcttttaagtagtcccggagaccagtttgaaattcagctcactcagcagttgcagagtttgatccctaataacaacgtgcgcaggctcatcgcccacgttatccgaacactcaagatggattgcagtggcacccacgtacaagtgacctgtgcaaagcttattagtcgcaccggacatctgatgaagttactctccggacaacaggaggttaaggctagcaagattgaatgggacactgatcagtggaagattgagaactatatcaatgaaagcaccgaggcccaatctgagcaaaaggagaaatccctggaactcaaaaaggaagtccccgggtacggatacacggataagctcattctggcgctgatcgtgacgggcatactgacaatcctgatcattcttttttgtctgattgtgatatgttgccaccggcgctctctgcaggaggatgaagaagggtttagtagagacagcgaagcccccacagaggaagaagaaagtgaggcattgccatag

SEQ ID NO: 296790 - DNA, 2025 bp, Artificial Sequence
  derived and/or modified sequence
atgcagttctacaccctgaagatcatcctgaaccacaaccccctgacgactgtggaagatccttacttattcaaattaccggccctgaaataccttgacatggggactaccctggtcccactgacaaccctgaaaaatatccttatgatgacggttgaactcgagaagctcattcttccatcccatatggcctgctgcttgtgtcagttcaaaaacagcattgaggccgtttgcaagacagtcaaattgcattgtaactccgcctgtcttacgaacactacacattgcccagaggaggccagtgtgggcaatccagaaggagcattcatgaaggtgctgcaggcccgaaaaaattataccagcactgagctaatcgtggagccagaagagccgtcggattcgtcgggcatcaaccttagcggcttcgggagtgaacaattagatacaaacgacgagagtgacttcatctcaacgttgcgatacatcttgccatacttctccgccgttaatctagacgtcaagagtctcctgctgcctctcatcaagctccctaccactggaaattcactggctaaaattcaaaccgtgggtcagaatcgacagcgcgtcaaacgggtgctcatgggccctcggtccatccagaagagacatttcaaggaggttggacggcagagtattaggcgcgagcaaggagcacaggcctcagtcgaaaacgccgctgaagaaaagcgtcttggaagtcccgctccaagggaggtggaacagccacatacacaacaggggcccgagaaacttgccggcaacgctgtgtacactaaaccctcctttacccaggaacataaggcagcagtgagcgtgcttaagcctttctccaagggcgcccccagcacatcttctccggcaaaggccttaccacaagtgagggaccgatggaaggacctgacacacgccatctctactttggagtcagccaaggcccgggttaccaacaccaagacatctaaacccatagtgcacgcacggaagaagtaccgcttccataaaactagaagccacgtcacacatcgaactcctaaggtaaagaaaagccccaaagtcagaaagaagtcctaccttagccggctgatgctcgccaatcgccttccattcagcgctgctaagagccttattaactccccctcacaaggagctttttcctctttaggtgacttgagcccacaggagaatcctttcctggaagtgagcgctccaagtgaacactttatcgagaagaataacactaagcatacgactgctcggaacgctttcgaggagaatgatttcatggaaaacaccaacatgcctgagggaaccatcagcgaaaacaccaactacaaccaccccccagaggccgatagcgctggcaccgccttcaatctcggccctacagtaaagcagaccgagacaaaatgggagtacaataacgtgggcactgacttatctcccgagcctaagtcttttaattatccacttctatcttcaccgggcgaccagttcgaaattcagctcacacaacagctgcagagcttaattccaaacaataacgtgcggaggttgatcgctcacgtgatcagaaccctgaagatggattgttccggagcacacgtccaggtgacatgcgcaaaacttatcagccggacaggtcaccttatgaaactgctcagcgggcagcaggaggtgaaggcctcaaaaatagagtgggataccgaccagtggaaaattgagaactatatcaatgagagcaccgaagcccagtctgagcagaaggagaaatcattggaattgaaaaaggaggtgcctggttacggctacaccgataagttaatactggccctgattgtcacggggatattaaccattttgattatcttattctgccttattgtcatctgctgccataggcgatcgttgcaggaggatgaggaaggcttctcccgagattcagaggctccaactgaggaggaggagagcgaggcactgccatag

SEQ ID NO: 296791 - DNA, 4908 bp, Artificial Sequence
  derived and/or modified sequence
atgaccagcgcccagtgccccgccctggcctgcgtgatgagccccttaaggttttgggggccctggcctctgttaatgtggcaattattgtggctcctggttaaagaagctcagccactggagtgggttaaagatccccttcagctcacatcgaaccctttgggcccgccggagccctggtcttctcactccagccacttccctagggagagtccccatgcccctaccctaccagctgatccatgggacttcgatcatctcggcccaagcgcctcttcagaaatgccagctcccccccaggagagtaccgaaaaccttgtaccattcctggatacttgggattcggcaggcgaacttcctctggaaccagagcaattcttggcctcacagcaggacttgaaagacaagttgtccccacaggaacgccttcctgtctctccaaagaaattgaagaaggatcccgcccaacgatggtcacttgcggaaataattggcattattcgacagttgtcaacccctcagagccagaagcagactctacagaatgagtatagctccaccgatactccctatccaggaagtctgcctcccgagctcagagtaaagtctgatgagccccccggaccctctgaacaggtaggaccaagccaatttcatctagaacccgagacacagaatcccgagaccctggaagacattcagtcctcctcattacagcaggaggcacccgcacagttgccacagctgctggaagaggagcctagttctatgcagcaagaagcccccgccctgccgccagagtctagcatggagtcactgaccctgcccaaccacgaggtaagcgtacagcctcccggagaggatcaagcgtactaccatctgcctaacattacagtcaagcctgcagacgtggaagttactatcacatccgaacccactaacgaaaccgaatcttcgcaagcccagcaagagactcccattcaatttcctgaggaagtcgagccttcagcaacgcagcaggaagcccccattgagcctccagtgccacctatggagcacgagctgagtataagtgagcagcagcagcctgtgcaaccttcggaaagtcctagagaggttgaatcatcacccactcagcaggagacgcctggtcagcctcccgaacaccacgaagtgacagtgtctcctcctggccatcaccagacacatcacctggcctctccatccgtctccgttaaaccgcccgatgtgcagctgaccatcgctgctgagccatccgccgaagtgggaacttcattggtacaccaagaggccactactcggctctctggatctggtaacgatgtcgaaccacccgccatccaacacggcggcccacccttgttgcctgagagttccgaggaggcaggacctttagctgttcagcaagagacttcctttcagtccccggagcccatcaacaacgaaaacccttctcccactcagcaggaagcggcggccgagcatccccaaacagccgaggaaggcgaatcaagccttacacaccaggaggctcccgctcagaccccagagttcccgaacgtcgtcgtggctcagccccctgaacactctcacctcacacaggctactgttcagcctctggacctaggattcaccattacgccggagtctaagactgaagtagagctcagccccacgatgaaggaaacccctacacaacccccaaagaaggtggttcctcagctgcgagtgtaccagggggtcactaatcccacacctgggcaggaccaagcacaacatcctgtgtcaccaagtgtcaccgtgcagctcctggatctgggactgacgattaccccagagcctacaactgaagtgggccacagcactccaccaaaacgaactatcgtctctccaaaacatccggaggtgacccttccgcacccagaccaagtccagactcaacactcccacctgacacgggcaacagtccagcccctggacctggggttcaccatcaccccaaaatccatgaccgaggtggaacccagcacagcacttatgactactgccccaccccctggacaccccgaagtgactctgccaccctcagataagggccaagcgcagcactcccacctgacgcaggcaaccgtccagcccctggacctggagctgaccattaccaccaagcccactacagaagtgaagccctcccctacaaccgaagagaccagcacccaacctcctgatcttggactagccatcattccagaacctaccacagagacggggcactccacagcacttgaaaagaccactgctcctcgacctgatagagtgcagactttgcaccgttctttaacagaggtaactggcccccccaccgaactcgaacccgctcaagactccctcgttcagagtgagtcttatacacagaacaaagccctaactgctcctgaggagcataaagcctctacttccacgaacatttgtgagctgtgtacctgtggagacgagatgctgtcttgcatagatcttaacccagagcaacgactgcgtcaggtaccagttcccgaacccaatacgcacaatgggacattcacgattctgaattttcaaggaaattatatttcatacattgatggaaatgtctggaaagcctattcgtggaccgagaaactcattttgagggaaaataatctcacggaactgcataaagattccttcgaggggctgctttccctgcagtacctcgatttgtcgtgcaataaaatacagtctatcgagagacacacatttgaacctctgccgtttctgaaatttatcaacttgagttgtaacgtgattacagagctttcattcgggacatttcaggcgtggcacggcatgcaattcctccataaactgatcctgaaccacaacccacttaccaccgttgaggacccctacctttttaagttgcctgctctgaagtatctggacatgggcactacgctggttccactgaccactcttaaaaatatcctcatgatgacggttgagctcgagaagcttatcctgcctagccatatggcctgctgcctgtgccagtttaagaattctattgaggcagtgtgtaagaccgtaaagctccactgcaatagtgcatgtttgacgaataccacccattgtcccgaggaagcaagtgtgggtaatcctgagggcgcgttcatgaaagttttgcaggcgcggaaaaattatacctctacagaacttatcgtggagcctgaggaaccctccgattcctcaggcattaatttatccggcttcggatcagaacagctggacaccaacgatgaatcagactttatttccactcttcgctatatcctgccttacttcagcgccgttaatctagacgttaaatccctcctgttaccccttattaaactgccaacgacaggcaattccctagccaaaattcagacagttgggcaaaataggcagagggtgaagcgcgtgcttatggggcccaggtcgatccagaagagacattttaaagaagtcggccgacagagcatcaggcgcgagcagggtgcccaggcaagcgtagaaaacgccgcagaagaaaaacgcctggggtcaccagcgccacgggaggttgagcagccgcacacacagcaggggcccgaaaagttagctgggaacgccgtctatacaaagccatcctttacccaggagcataaggccgcggttagcgtgctcaagcctttttccaagggagccccatcaactagctcacctgccaaggctttaccacaggtgagagatcggtggaaggatctgactcacgccatctctactctcgaatcagccaaagcacgcgtcaccaacaccaaaacaagcaagcccattgtgcatgcccgcaagaagtatcggtttcacaagaccaggagtcacgtgacgcaccgcacacccaaagtgaaaaaatcaccaaaggtccgaaagaagtcttatttgtcccgcctgatgctggctaatcgccttcccttttctgccgcaaagtcccttattaattccccctctcagggtgcatttagctcactgggcgacctgtcacctcaggagaatcctttcctagaagtgtctgccccctcagagcacttcatcgagaaaaataatacaaaacacactacggctcgtaacgcattcgaggaaaacgacttcatggagaataccaatatgcccgaaggcacaatttcggaaaataccaattataatcacccgcctgaggcagattccgccggaacagcttttaaccttggacccacagtcaagcagaccgaaacaaagtgggaatataataatgtagggaccgatctgtcacccgaacccaagtccttcaattatcctctgctttcctctcccggcgatcagtttgagatccaactgacgcagcagttgcaatccctcatccctaataataacgtgcgtagactgattgctcacgtcatcagaacactgaagatggactgcagcggtgcgcacgtacaggtgacctgcgccaagctcatttcacgtacgggacacctaatgaagttactgtctggacaacaggaggtcaaggcatccaaaatagagtgggatacggaccagtggaagatcgaaaattatatcaacgagtcaaccgaggcccaatccgagcagaaggaaaagtctctcgaactgaagaaggaggttccaggatacggatacacagataaactgatactggcgctgattgtaacagggattctgaccatcttaatcatattattctgtctgattgtcatttgctgccaccgccgatccctgcaggaagacgaagaaggcttttcacgcgattcagaagcccccaccgaagaggaagagagcgaggccttgccttag

SEQ ID NO: 296792 - DNA, 2025 bp, Artificial Sequence
  derived and/or modified sequence
atgcagttctacaccctgaagatcatcctgaaccacaaccccctgaccactgtggaagacccttatctgttcaaactgccagccctgaaatatcttgacatgggaaccaccctggtgcctctcacgactttgaaaaacatacttatgatgactgttgaattggaaaaactcatcctgcctagccatatggcatgttgtctgtgccagtttaagaacagcatagaggccgtctgcaagacagtgaagctgcactgcaacagcgcctgtctcacaaacaccatccattgcccggaggaagcttccgtgggcaaccctgaaggcgcattcatgaaagtactccaggcgaggaaaaattatacaagcaccgagttgatcgttgaaccggaggagccatccgactcttcagggatcaacttaagcgggtttggcagtgaacagctcgatacaaacgatgaatctgactttatctcaacgctacggtacattttgccatacttcagcgccgtgaaccttgacgttaaaagcctgttactgccgctgatcaaactccccaccaccggcaacagcctcgcaaagattcagactgtcggccaaaaccgccagagggtgaaacgcgtcttaatgggaccacgctcaatccagaaaagacattttaaagaggtcgggcgccagtctatccggcgggagcagggcgcccaagcgagtgtggaaaatgcggcggaggagaagagactgggatctccggctccccgcgaggtggaacagccacacacccaacagggcccagagaagcttgcggggaacgccgtgtacaccaagcccagcttcacacaggagcataaggctgccgtctcggtgttaaagcccttcagcaagggagcaccatctacctcttcccccgcaaaggccctcccgcaggtacgtgacaggtggaaggatttaacccacgccattagcatacttgagtcagccaaggcccgggtgacaaacaccaagacctccaaaccaatcgtgcatgccaggaagaaatatcgtttccataagacgcggagccatgtgactcacaggactcccaaagtcaagaaatctccaaaggtgaggaagaaatcctatttgagccgcctgatgctcgcaaacagactccctttctccgcggccaaaagcctcataaattcccccagccagggcgccttctcttccctgggggacctctcgccacaggagaacccatttctggaggtgtctgctccaagcgaacatttcattgaaaaaaataacacaaagcacacgacagctaggaacgcattcgaagaaaatgattttatggagaacaccaacatgcccgagggcaccatctccgagaacacaaattacaatcatccaccggaagcagattcggctggcaccgccttcaatctgggaccaacggtgaaacagacagagacaaagtgggagtataacaatgtgggtaccgacccctccccagagccaaagtccttcaattaccctctactcagctccccgggggaccagttcgagattcaattgacgcagcaactgcaaagcctgattccaaacaataatgttcgcaggctcattgcccacgtaatccgtacgttgaagatggattgctccggggcccacgttcaagtgacatgtgccaaactcatatctcgaaccggacacctgatgaaactgctgtccgggcagcaagaggtgaaggctagcaagatagagtgggacaccgatcagtggaagatcgaaaactacattaacgagagtacggaggctcagagtgagcagaaggaaaaatcccttgagctgaagaaggaagttccagggtatggctatacggacaagctgatcctcgcgcttattgtaacagggatcttaactatccttattatcctcttctgcctgatcgtcatatgttgtcatcgccgaagcctgcaagaggatgaggaaggatttagccgcgactctgaagcccctactgaggaggaagaatccgaagccctgccttag

SEQ ID NO: 296793 - DNA, 4908 bp, Artificial Sequence
  derived and/or modified sequence
atgaccagcgcccagtgccccgccctggcctgcgtgatgagccccctacggttctggggcccatggcccctcctgatgtggcagctcttatggctgttggtgaaggaggcacaacccctcgagtgggtgaaagatccacttcagctgacttctaacccgctcggaccacccgaaccctggtccagccatagttctcactttccacgtgagtcaccgcatgcgcccaccctgccagctgacccttgggacttcgaccatttgggcccttccgcctcctccgaaatgcccgccccccctcaggagtctacagagaacctggtaccttttctggacacatgggactccgctggggagttacctttggaacctgagcagtttctcgcgagccagcaggacctgaaggacaagctaagtccccaggaacggcttccagtgtcacccaaaaaattgaagaaggaccccgcacagagatggagtctggccgaaataattggtattattaggcaactctccaccccacaatctcagaagcagaccctgcaaaatgagtatagctcaacagataccccatatcccggctccttgcccccagaactcagagttaaatcagacgagcctcccggaccgtctgaacaggttggtccatctcaattccatctggagcccgaaacccaaaacccagagaccttggaagacatccagagtagtagtcttcagcaggaggcccctgcccaacttccacaactgctcgaagaggagccttccagcatgcagcaggaggctccagccctgccccctgagagcagtatggagagcctgacactaccaaatcacgaggtgtccgtgcagccccccggcgaagaccaggcctattatcacctcccgaatattaccgtgaagcctgcggacgtggaggtcacaataacttcagagcccacaaatgagacagagagctcccaggcacagcaagaaactcctattcagtttccagaagaggtcgaacctagtgcaacccagcaggaggcacccattgagcccccggtacctccaatggaacacgaattgagcatcagcgaacaacagcaacctgttcagccctcagagtcacccagagaggtggagtcaagccccacacaacaggagacaccagggcagccccccgagcatcacgaagtcacagttagtcctcccggacatcatcaaacacaccacctcgccagtccaagcgtgtctgtgaagccccctgacgtgcaattgactatcgccgccgaaccatctgcagaggtcggtacatcactggtgcatcaggaggctacaaccaggctgtccggatcggggaacgacgttgagcccccagcaatccagcacggaggcccccccctcctccccgaatcttctgaggaggctgggcccctcgctgtacaacaggaaacctcatttcagagtcccgagcccattaataatgaaaacccttctccaacacaacaggaagccgccgccgaacacccacagaccgcagaggagggtgagagcagtttgacgcatcaggaagcgccagcccagacgcctgaattcccaaatgtggtggtagcccagcctcctgagcattctcatctgacgcaagccaccgttcagccactagaccttgggttcacgattacacccgaaagcaagacggaggtcgagctgtctcccactatgaaagagaccccgacccagccccctaagaaggtggttcctcagctccgggtttaccagggagtgaccaatcctaccccaggccaggatcaagcccagcacccggtgtcaccatccgtgacggttcagctgttagatctaggactgaccattactcccgaacccacgaccgaagttgggcactctacaccccccaagcggactattgtatcaccgaagcacccagaggtgactcttccacaccctgaccaggttcagacccagcattcacatctcacaagagccacagtgcagcccttagatcttggatttaccatcactcctaagtctatgaccgaggtcgagccatctacggccttgatgacaaccgcacccccgccaggtcatccggaagtaacactgccacccagtgacaagggtcaagcccagcatagccacctgacccaggctacggtgcagcctttggatctggaactgacgatcaccactaaacctacgacagaggtgaagccttcaccaacaacggaggagacctctactcagcctcctgacctgggcctggccatcatccctgagcccaccacagagaccggccactctactgcactcgagaaaacaacagcgccacgcccagatagggtccaaacactgcacagatccctgacagaggtcaccggccctcctaccgaactggagccagctcaggacagtctggtccagagcgagtcttacacccaaaacaaggccttgacggcgccagaggagcataaggcctccaccagtacaaacatctgcgaattgtgtacctgtggcgatgagatgttatcatgtattgacctgaatccggagcaacgtctgaggcaggtccccgttccagagccgaacacccacaatggaacctttaccatattgaactttcaaggaaactacatctcatatatcgacggcaacgtgtggaaggcctactcatggactgagaagctgatcctgcgcgaaaataatctgaccgagctccacaaggattcattcgagggcttgttgtccctccagtatctcgacctgtcctgtaacaagatccaaagcatcgagaggcacactttcgagcccctcccctttctgaaattcattaacctcagctgtaacgttatcactgaactgtcgtttgggacctttcaggcgtggcacggcatgcaattcctccacaaactgatcttgaatcataatcccctcactacggtagaggatccctacctctttaagcttcccgccttgaagtatctggacatgggtaccacattggtacctttaaccacacttaagaatatcctcatgatgaccgtggagctggaaaaactgattctgccttcccatatggcatgttgcctttgtcagtttaagaattcaatcgaagcagtttgtaagactgtcaagctgcactgtaacagcgcgtgtctgaccaacaccattcattgccccgaggaggcctcggtcggcaaccccgaaggagccttcatgaaggtattgcaggctcgcaaaaactacacatctaccgaactgattgtagagccagaagaaccaagcgacagcagcggcattaatctgtcaggattcggctccgagcaactcgacacgaacgacgagtccgatttcatttccactctgagatatatcctgccctatttctccgcagtgaatttagacgttaaaagtctgctcctgccactgatcaaattaccaaccaccgggaatagtttagctaagattcagactgttggacagaaccgacagcgcgtgaagcgggtgctgatggggcctcgctcaattcagaaaagacatttcaaagaggtgggacggcagtcaattcgacgcgaacagggcgcccaagccagcgtggaaaacgctgccgaagagaagcggcttgggtcccctgctccgcgcgaggtggagcagccgcatacacagcaagggcctgagaagctcgctggcaatgccgtgtacaccaaaccctccttcacccaggagcacaaagccgctgtgtctgtactgaagcccttttcaaaaggtgcccctagcaccagtagcccagccaaagcactgccacaggtgagggacaggtggaaggatctgacccatgctatctctattttggagtccgcaaaagccagagtcaccaatacaaagacctctaagcccattgtgcatgcaaggaaaaaataccggtttcataaaactagaagccacgtcacccacaggacacctaaagttaaaaagtccccgaaagtgagaaagaaatcttatttgagtagactgatgcttgccaatcgactcccgttttctgctgcaaagtctctcatcaacagcccatctcagggcgccttctccagtctgggagatcttagcccccaagaaaaccctttcctggaagtctctgcacccagcgaacactttatcgagaagaataacaccaaacacacgaccgcccgaaacgcattcgaggaaaacgatttcatggaaaatactaatatgccggagggtacgataagtgagaacacaaattacaatcatccgcctgaggctgatagtgccggaacagctttcaatctgggccctaccgtgaagcagaccgaaactaagtgggagtataataatgtgggcaccgacccatcaccagagcccaagtcgtttaactaccctctactctcgagcccgggtgaccagtttgagattcaactaacccagcaactgcagtcccttatccctaataataacgtcaggcgcctaatcgctcacgtgatacgaactttaaagatggattgctctggtgctcacgttcaagtcacatgcgcaaaacttattagccgcaccggacacctgatgaaactcttatctggacagcaggaggttaaggcgagcaagatcgaatgggacacggaccagtggaaaatagaaaactacatcaacgagtctaccgaagcacagtcggagcagaaggagaaatccctggagctgaagaaggaggtgcccggctacgggtatactgataaactgatcctggcattgatcgtgactggaattctcaccatcctcataattcttttttgcttaatcgtgatctgctgtcaccgacgaagccttcaagaagatgaggagggcttctcccgtgacagcgaggcccccaccgaggaagaggagtccgaagcattgccctag

SEQ ID NO: 296794 - DNA, 4908 bp, Artificial Sequence
  derived and/or modified sequence
atgacctcagcacagtgccctgccttggcttgtgttatgtctcctctccgtttctggggcccatggcccctactgatgtggcaactgctgtggctgttagttaaggaagctcagccccttgaatgggtgaaagacccccttcagttgaccagcaaccctctgggcccacctgaaccatggagctctcactcatcccactttccccgtgaatcaccacatgcacccaccctccccgctgatccatgggactttgaccatctgggcccttccgccagttccgaaatgcccgctccgcctcaagagtccacagaaaatttggtgccttttcttgacacctgggactccgccggtgagctacctctggagcctgaacagtttctagcttctcagcaagatctcaaggataaactaagcccccaggaacggctgcccgtgtcccctaaaaaacttaagaaggatccagctcagaggtggtctctggcagagatcatcggtataatcaggcagctgtccacgccccagtcacaaaagcagacgctgcagaacgaatacagttccaccgacaccccctatcccggatcgctacccccagagctgcgcgtcaaaagtgacgaacctcccggtccatccgagcaggtcggaccgagtcagttccacctggaaccggagacccagaatcccgaaactctggaggacatccagtccagctcccttcagcaggaggcacccgcacaactgccccagctgctggaggaggagccatcctcaatgcaacaggaggcgccagccttgcccccagagagctctatggagtctctgaccctgccaaaccacgaagtaagcgtccagccaccgggtgaggaccaagcttattaccaccttcccaatataactgtcaaaccagccgacgtagaggtgactattacctccgagcccacaaatgaaaccgaaagttcacaggcccagcaagagactcccatccaattcccagaggaggtcgagccctccgccacacagcaggaagcccctatcgaaccccctgtgccgcctatggaacacgaactgtccatcagcgaacagcagcagccggttcagccatcagaaagtccacgggaagtggagtcttcacccacacagcaggaaaccccaggccagccaccagaacatcatgaggtcaccgtgagcccacccggacaccatcaaacccaccatctggcctcccctagcgtcagcgtcaagccccctgatgtgcagctgacaatcgccgctgagccctcagccgaagtgggaacatccctggtgcatcaagaggccaccactagactgtctggcagtggaaatgatgtagaaccccctgctatccaacacggtgggcctccgctgctcccagagtccagcgaggaagccggtccccttgctgtgcagcaggagacctcatttcagagtcccgaacctatcaataacgaaaaccccagcccaacccaacaggaagccgcagctgagcacccgcaaacggccgaagaaggagaaagcagtttaactcaccaggaggcacccgctcagacacccgaattccctaatgtggtggttgcacagccccctgagcactctcacctcactcaagccacggtgcagcctttggacctgggatttaccattactcccgaatcaaaaactgaggtggagttgtccccaaccatgaaagagaccccaacacagcctcccaaaaaggtggtgccacagctgagagtctaccagggcgtaacaaaccccacaccaggacaggatcaagcgcagcacccagtttccccctctgtgaccgtgcagctgttagaccttggtttaactatcacccctgaacccaccactgaagtaggacattcgactccgcctaagcgaactatcgtttctcccaaacacccagaagtgactttacctcaccctgatcaggtgcagacccagcatagccacttgacaagggccaccgtgcagccactcgatctgggcttcacgatcacaccgaagagcatgacagaggtggagcccagtacagccttaatgacaacagctcctcctccaggccatccagaggttacgttgccgccatccgacaaaggccaggcacagcacagccatctgacacaggcaaccgtccagccacttgacctggagctaaccataacaaccaagcctaccacagaagtaaaaccgtctcctacaaccgaagagactagcactcagccaccggatctggggcttgccatcatcccggaacctaccactgagaccggtcatagtactgctctcgagaaaactactgcgcctaggcctgacagagtccaaaccttgcacaggtcactgactgaagtgaccggtccaccaacagagctggagcctgcccaggactctctggtgcagagtgaaagctacacacagaataaggcccttactgccccagaagagcataaggcaagcacatctacaaatatttgtgagttgtgcacttgcggcgacgagatgttatcttgtattgaccttaatccagagcaacggttgcggcaggtccctgtgccggaaccgaacactcacaacggcaccttcacaattctgaattttcagggcaactacatcagctatattgatggcaatgtgtggaaggcctatagctggacagaaaaactgatcctgagagaaaacaacctgacagagctgcataaagattcattcgaaggtcttctcagtctccagtacctggacctgagttgtaacaaaatccagtccattgaacgccacacatttgaaccactgcctttccttaagttcattaacctcagctgcaatgtgataactgagctgagcttcgggactttccaggcctggcacgggatgcaatttctgcataagttgatcctgaatcacaatcccttaaccactgtcgaggacccatatctgttcaagctaccagcgctaaaatatctggatatgggaactacgcttgtacccctgaccaccctcaagaatatcctcatgatgacagttgaactcgaaaaactcattttacccagccacatggcctgctgcctctgtcagttcaaaaactccatagaagctgtgtgcaagaccgtcaagctgcattgcaattctgcatgtctcacaaacacaacccattgccccgaagaggcctccgttgggaatccggagggcgcattcatgaaggttttgcaagcaagaaaaaactatacatccactgagcttatagtggagccggaggagccctccgactcatcagggatcaatttatctggttttggatcagagcagctggatactaatgacgagtctgacttcatttcaaccctccgatacatccttccctatttcagcgctgttaacctggacgtcaagagcctgctgctgccactgataaagctgccgacgactggcaactccctggctaagatccagactgtcggccagaacagacagcgggtcaagcgcgtgcttatgggacctcggtcaatacagaagcggcattttaaggaagtgggtcggcaatccatcagacgggagcagggggctcaggcttccgtggaaaatgcggcagaggaaaagcggctgggttccccagccccaagagaggtcgaacagccgcacacccaacagggacctgaaaaactcgccggaaacgccgtatacaccaaaccaagctttacccaggagcataaagccgctgtcagtgtcctgaagccttttagcaagggcgcaccctccacgtcatcaccagcaaaggcattgcctcaagttagagatagatggaaggatctgacccacgctatcagtaccctggaatccgccaaggctcgggtgactaataccaagaccagcaagccgattgttcacgcgaggaaaaaatacagattccacaagactcggtctcacgtcacccacagaactcccaaggtgaaaaaatcacctaaagtgaggaaaaagagctatctgtcccgacttatgttggccaatcgactaccattttccgcagctaaaagccttattaattccccaagccagggagccttcagttcactcggagatctgtctccccaggagaacccatttctggaagttagtgctcccagcgaacattttattgagaagaataacacaaagcataccacggcaaggaatgcctttgaagagaacgacttcatggaaaacactaacatgcctgaggggacgatctcagagaatactaattacaatcacccaccagaagcggatagtgctggcacagccttcaatttgggacccaccgtgaagcagactgagacgaagtgggaatacaataacgtagggaccgacctcagccctgagccgaagtcattcaactatcctcttctaagctctcccggtgaccagttcgaaattcagctcacccagcaacttcagtcgctgataccaaataataatgttagaagactgatcgcacatgtcattaggacattgaaaatggactgtagcggtactcacgtgcaagtgacttgcgcgaagctgatttccagaaccggtcacctgatgaagctgttgagcggacaacaggaagtgaaagcaagcaagatagagtgggatacagatcaatggaaaatcgaaaactatatcaacgagtccacagaagcacaaagtgagcagaaggagaagtccctagaacttaagaaggaagtacccggttatggctacactgataagctcattttggccctaattgtgactgggatcctgaccattcttatcatcttgttttgcctgatcgtgatctgttgccatcgtagaagccttcaagaggatgaggaggggttcagtcgagacagcgaggcaccaacggaagaggaagaatctgaggcgctcccatag

SEQ ID NO: 296795 - DNA, 2025 bp, Artificial Sequence
  derived and/or modified sequence
atgcagttctacaccctcaagattatactgaatcataatccactgacaaccgtcgaagacccatatcttttcaaactgcccgctctgaaatacctcgacatgggtaccacacttgtgcccctcacgactctcaagaatatactgatgatgacagtggagcttgaaaagctaatcctgccaagccatatggcatgctgtctgtgccaatttaagaatagcatcgaagccgtctgtaagaccgtgaaactacactgcaactcggcctgcctcacaaataccactcattgcccagaggaggcttccgttgggaacccggaaggcgctttcatgaaagtgttgcaggccagaaagaattacacctcgaccgagctcatcgtcgagcctgaagagccctcagacagcagcggcatcaatttgtcaggatttggatctgagcagttggacaccaacgatgagtccgacttcattagcactcttagatacattcttccctacttcagcgccgttaacctcgacgtaaaatctttgctgttgccactgatcaaacttcccacaactggaaattctctagcgaagattcagacagtaggccaaaataggcagagggtcaagcgggtcctgatgggtcccaggtcaattcagaaaaggcactttaaggaagtcggcagacagtccataagacgagaacaaggagcccaggcctccgtcgagaatgccgctgaggaaaagagactgggcagccctgcccctagagaggtggaacagccgcacactcaacaaggaccagaaaagctcgcaggcaacgccgtatataccaaacctagcttcacacaggaacacaaagcggcagtgagtgtgctcaaaccgttcagcaaaggagccccatccaccagcagtcctgctaaggctcttcctcaagttcgagaccgttggaaggacttgacgcacgccataagcacactggagtctgcaaaagcgagggtaacaaacacgaaaacctccaagccaatcgtgcacgctcggaaaaaatatagatttcataaaacccggagtcacgttactcataggactcccaaagttaaaaaatcacctaaagtgaggaagaagtcttacctatcccgactgatgctcgctaaccgcctgcccttctcagccgcaaagagtctcattaattccccgagccagggcgcattctccagcctgggcgatctgtccccacaagagaaccctttccttgaggtgtctgcacctagcgaacactttatcgagaaaaacaataccaaacataccacagcccgaaatgcctttgaagagaacgatttcatggaaaataccaatatgccagagggtaccatcagcgaaaacaccaattataaccaccccccagaggcagacagtgctgggaccgcatttaatctgggtccaactgtgaaacaaaccgagacaaaatgggaatataacaacgtcgggacggacctgtccccggagccaaaatccttcaactacccgcttctctcctctcccggtgaccagttcgaaatccagttaacccagcagcttcaatccctaatccctaataataacgtacggagactgatcgcccacgttattagaaccctcaaaatggactgttccggtgcccatgtgcaggtgacgtgcgctaaactcatctctagaaccggacacctgatgaagcttctgagcggacaacaggaggtgaaggcctccaaaatcgaatgggacaccgaccagtggaaaatcgaaaactacattaatgaatcaactgaggcgcagtctgagcaaaaagagaaatctctggagttaaagaaggaggtgcctggctacgggtatacagacaagctaatcctggccctaatcgtgaccggcatactgaccattctcatcatcttgttctgtctcatcgtgatatgctgccatcgcagatccctgcaagaagatgaggaagggttctcccgggatagcgaggcccctaccgaggaagaggagtctgaggctttaccatag

SEQ ID NO: 296796 - DNA, 4908 bp, Artificial Sequence
  derived and/or modified sequence
atgacgtccgcccagtgtcctgcactggcctgcgtgatgtctccactgcgattttggggaccatggcctttgctgatgtggcagctgctgtggcttttagtaaaagaagcgcagcccctggagtgggttaaagatcctctgcaactcacttcaaatcctctgggccctccggaaccttggtcgtctcactccagccattttcctagagagtcaccacatgctcccaccttacctgctgatccttgggatttcgaccacctcggtcccagcgcgtccagtgagatgccagcaccaccgcaggagagtactgagaatctggttccatttctggatacatgggacagcgcaggggaacttcccctggagcctgaacagtttctggctagtcaacaagacctgaaagataaactcagtccgcaggaaaggctaccggtaagccctaagaaactgaaaaaagaccctgcccagaggtggtctctggccgaaatcatcggcatcatcaggcagttgagtactcctcagagccagaaacagactttgcagaacgagtacagcagtacagatactccgtaccctggcagtctgccgcctgagctgcgtgtaaagtctgatgaacctccaggtccttctgagcaggttggtccctctcagttccacctggaaccggagactcagaatccagagacactcgaagacatacagtctagctccctgcagcaagaagctcctgctcagctgccacagttattggaggaggagcctagttcgatgcagcaggaagcccctgccttgccaccggagagttcgatggagtccttgaccttgcccaatcacgaggttagcgtgcaaccacccggagaggaccaggcctactatcacttgcctaacattaccgtgaagccggctgatgtggaagtcacaatcaccagtgagcctaccaatgagactgagtcttcacaagctcaacaggagacccctattcagtttccagaggaggtggaacccagcgctacacagcaggaggctcccatcgaaccgccagtgcccccaatggagcatgaactcagcatttctgagcagcagcagcccgtgcaacccagcgaaagcccaagagaagtggagtcctccccaacccaacaggaaacccccggtcagcctcccgagcaccatgaggtgacagtgagcccacctgggcatcatcagactcaccatctcgctagcccctccgtcagtgttaaaccgcctgacgtccagctgacaatagcagctgagcccagcgctgaggtgggaacttcccttgtgcaccaagaagcaacaacccgcctgagtgggtcaggaaatgatgttgagccacccgcaattcagcacgggggacctcctcttctgcccgaaagttctgaggaggccggtcccctcgccgtgcaacaggaaacttcgtttcagagtcccgagcccatcaacaacgagaaccccagtcctacacaacaggaggcagcagcagagcaccctcagaccgctgaagagggtgagtcgagcctcacacaccaggaggcccctgcacagactcctgagttccccaacgtggttgtggctcagccaccagagcatagccatctcacccaggcgacggtgcagcctctcgatctcggctttacaatcacgcctgaaagcaagacagaggtcgagttgagccctaccatgaaagaaacacccactcagcctccgaaaaaagtggttcctcaactacgggtgtatcaaggagtcacaaaccccacacctggacaggaccaggcacagcatcctgtgtcaccctcagtgactgtgcagctcctggatctgggtttgaccatcacgccagagcccacgacagaggtgggccatagtactcctcctaagcggactatcgtgtcccctaaacatccagaggttactttgccacacccggatcaggttcagacacaacattctcatctgactagagctacagtgcagccactggacctgggcttcacgatcacacctaagtctatgacagaagtcgagccttccactgccctgatgacaacagccccaccccctggtcaccccgaagtcacactgcccccaagcgacaaaggccaggcgcagcactctcacctcactcaggccacagtacagcctcttgatttggagctcaccatcaccacgaagcccacaactgaggtgaaaccctcccctaccacggaggagacgtctactcagcctccggacttgggcttggctataattccagagcccaccactgaaactggccactccacagccctcgagaagacaacagcccctcgccctgatcgagtccaaacgctccatcgctccctgactgaggttaccggccctcctacggagttggaacccgcacaggactcactggtacagtcagaaagttatacgcagaataaggcattaaccgctccagaggagcacaaggcatccactagtacgaatatttgtgaactctgcacatgtggggatgagatgttaagctgcattgatttaaacccggagcagaggctgcgccaggtccccgttccagagccaaatacacataacggcacctttaccatcctgaatttccaggggaattacatcagctatatagatgggaatgtttggaaggcctattcatggacagagaaactaatcctccgggagaataatctgaccgagttacacaaggactcattcgagggattattatcactccagtatttggacctgtcttgcaacaagatccagtctatagaaagacacactttcgagccgctgccattcttaaagtttatcaatctaagctgcaacgtaattactgaactgtcgttcggaaccttccaggcctggcatggcatgcagttcctgcacaagctcattcttaatcacaatccacttacaaccgtggaagacccatacttgttcaagctgcctgccctcaaatacttggatatgggtaccaccctggtgcctttgacaacactgaaaaacatcctcatgatgacggtcgagctggagaagctcatcttgcccagtcacatggcctgttgcctctgtcagtttaaaaatagtatcgaggctgtgtgtaagacagtgaagctgcactgcaacagcgcttgtttgaccaacacaacccactgcccagaagaagcaagtgtggggaacccggaaggtgcgtttatgaaggtccttcaggctcgcaagaactatacttctactgaactcattgttgagccagaagaaccttcagattcatctgggatcaatctgtctggctttggatcagagcagttggatacaaacgacgagtctgacttcatctcaaccttgcgttacattcttccctatttttcagctgttaacctagatgtgaaatcccttctgcttcctctcattaagctcccgacaaccgggaactcactcgcaaagatccagacagtgggtcaaaatcgccagagggtgaaaagggtgctgatgggccctaggtccatccagaagaggcatttcaaagaggtgggccgacagtctatcagaagagagcagggcgctcaggcaagcgttgagaatgccgcagaggagaaacgcctgggcagccccgctcctagagaagtggagcagccgcatacacagcaaggacccgagaaattggctggtaatgcagtgtacactaagccaagctttacgcaagagcacaaggccgctgtgtcagtgctgaagcctttcagcaagggcgcacctagcactagctctccagctaaagcccttcctcaagttcgggacaggtggaaagatctgacacatgcaatcagcacactggaaagtgcaaaagctagggtgactaatactaagaccagcaagccaattgtacatgcgagaaagaagtatcgatttcacaaaaccagatcccatgttacccaccgcacgcccaaagttaagaagtctccaaaagtccggaagaaatcatacctttcaagactcatgcttgcgaaccggctgccattctccgctgccaagtccctcatcaactcaccatctcagggggcattttcttcccttggtgatctgtctccccaggagaacccgttcttggaagtcagcgctccgtctgagcacttcatcgagaaaaataacaccaagcacactacagctcggaatgcatttgaggagaacgatttcatggagaataccaacatgcccgaaggtacaatcagtgaaaacactaattacaatcaccccccagaggccgatagtgctggaaccgcatttaacttgggtccaactgtaaagcagaccgagactaagtgggaatataacaatgtgggcaccgatttgtccccagagcctaagtcttttaactatccactgctgtctagtcctggtgaccagtttgagattcagctgacacagcagctgcaaagcttgataccaaacaataatgtcaggagactgatcgcacatgtaataagaacgttaaaaatggactgctcgggcgctcatgtccaagtgacctgtgctaagttgatctctcgtactgggcacttaatgaaactactatccggccagcaggaggtaaaagcttctaagattgagtgggatactgaccaatggaagatagaaaactacattaatgagtcaaccgaagcgcaaagtgagcaaaaagaaaaatccctcgagctcaagaaggaagtccccggatacgggtataccgacaaattgattctggcactaatcgttactggcatcctgaccattctaattatccttttctgccttattgttatttgctgccatcggagaagcctacaggaagatgaagaaggcttttctagggacagcgaggcacctactgaagaggaggaaagcgaggctctcccctag

SEQ ID NO: 296797 - DNA, 2025 bp, Artificial Sequence
  derived and/or modified sequence
atgcaattctatacactgaagatcatcctcaatcataaccccctgactaccgtggaggatccgtatctttttaaactgcctgccctgaaatacctggacatggggaccactctcgttcctcttacgacccttaagaacatcctcatgatgactgtcgagcttgagaaactgatcctgcccagccatatggcatgctgtctgtgtcagttcaagaactctattgaagccgtatgtaaaaccgtcaagcttcactgcaactctgcctgcctgacaaacactatccattgcccagaagaagcctctgttgggaatcctgaaggggcattcatgaaagtactgcaggctcgcaagaactatacaagcacggaattaattgtggaacccgaagagccttctgactcatccgggattaatctgtcaggttttggaagcgaacaactcgatacaaatgatgaatcagatttcattagtactctccgctatatcttaccctactttagcgctgtcaatctggatgtgaagtctctgctgctgcccctgatcaagttgcccaccaccggaaatagcctggccaaaatccaaacggtcggtcagaacagacagagggtcaagagagtcctcatgggccctagaagtattcagaagcgacactttaaagaggtgggccgtcagtccattcggagagagcagggtgcgcaagctagtgtcgaaaatgccgctgaggaaaaaagactgggctcccctgcaccccgagaggtggaacaaccccacacacaacagggtccagagaaattagcagggaacgctgtgtatacaaaaccctccttcactcaggaacataaggccgcagttagtgtcctaaaaccttttagcaagggtgcgccatccacaagctcacctgctaaagctctcccccaggtccgcgaccggtggaaagacctgactcacgctatcagcattctggaatcggctaaggctagagtgaccaataccaaaacaagcaagcccatagtgcatgcacggaaaaaataccgtttccataagacaaggagccatgtcacccatcgaactccgaaggttaaaaagtccccaaaggtacggaagaagtcatacttatccagactgatgttagccaatcgactccccttttccgcggctaaaagtttaatcaattccccctcccaaggagccttcagctccctaggagacctctcccctcaggagaatcccttcttggaggtttctgccccatcagaacacttcattgaaaaaaataacacaaaacatactactgccaggaacgccttcgaggagaatgatttcatggagaacaccaacatgcccgaaggcaccatttcagagaacaccaattataatcatccaccggaagcagactccgccggaactgcatttaacctgggaccaacggtaaaacagacagaaacaaaatgggagtataacaacgtaggcacggaccccagtcccgagccaaagtctttcaattatcctcttctgtcaagtcctggcgatcagttcgaaattcagttaacccaacagctccagagtcttattcccaataacaacgtgcgcaggctgatcgcacatgtgattcgcactctgaaaatggattgttccggtgcccatgtgcaagtaacgtgcgctaaactaatatcacgtacaggtcacctcatgaagctgttaagtggacaacaggaagtgaaggctagcaaaatcgagtgggatacagaccaatggaaaatcgagaattacatcaacgaatccacagaggcgcagagtgagcagaaagaaaagagcttagagctcaagaaggaagtccccggatacggatacaccgataagttgattttagcccttattgttacaggcatcttgaccattctaattattctgttctgtctgatcgtaatatgctgccacaggaggagcctgcaggaggacgaggaagggtttagccgtgattctgaggctccaactgaggaagaggaatccgaggctttaccctag

SEQ ID NO: 296798 - DNA, 4908 bp, Artificial Sequence
  derived and/or modified sequence
atgacgtctgctcagtgtccggctttggcctgtgtcatgtcaccgcttagattttggggcccatggcctcttttgatgtggcaactgctctggctcctggttaaagaggctcaacccctggaatgggttaaggatcctttgcagctgacttcaaaccccctgggtcctccagagccttggtcaagccactcatcacattttcctcgagagtctccccatgctccaacactgccagctgatccatgggactttgaccatctcggcccttctgcctcatccgagatgcccgcacctccgcaggaaagcacggagaacctggtgccgtttctggacacctgggattctgcaggggaacttccgctggagccagagcagtttctggcttcccagcaggacttgaaggataagctttctccacaggaacgtctacctgtctcacccaagaaactgaagaaggaccctgcacagcgttggtcccttgcagagattataggcattattaggcaactctctaccccacagagccagaagcaaacacttcagaacgagtacagtagcaccgataccccatacccgggaagtcttccacctgagctacgggttaagtccgatgagccccctggacccagcgagcaggtgggccctagccaatttcacctcgaaccagaaacacagaaccccgagactttagaagatattcaatccagcagcttacagcaggaagctcctgcccagctcccacaactgctggaagaagagcccagctcaatgcagcaggaggctccagcactcccccctgagagttcaatggagtcacttaccctcccaaaccatgaggtctcggtacaaccccctggggaagatcaagcttactatcacctgcccaacataacagtaaagcctgccgacgtggaggtgacaatcactagtgagccgactaacgagacagaatcttcccaagcccagcaggagacacccattcagttccctgaagaggtggagccttccgcaactcagcaggaggcaccgatagagccacctgtcccacctatggaacacgaactgtccatttcagagcaacagcagcctgtccaacccagcgagtcgccgagagaagttgagtccagtcccactcagcaggaaacaccaggtcagccacctgagcatcacgaggttacagtctccccaccgggacatcatcagacacatcaccttgcctctccaagcgttagtgttaagccacccgatgtgcagctgacaatcgccgcagaaccctctgccgaagttggtacaagtctggttcatcaagaggctacaacccgactctccggaagtggaaacgacgtcgagcccccagccattcagcacggaggacctcctttgctgcctgagtcatccgaggaggccggtccccttgctgtgcagcaagagacatccttccaaagtcctgaaccaatcaacaacgaaaatccctctcccactcagcaggaggcagcagcagagcaccctcagaccgccgaggagggagaatcttcattgactcatcaggaggccccagcccaaacaccagagttccctaacgtcgttgtagctcagcccccagagcatagccaccttactcaggccaccgtacagcctttggatctggggtttaccattacaccagaatccaagacagaagtggagctgtcccctaccatgaaagagactcctacgcagccaccaaagaaggtggtcccacagctgcgcgtgtatcagggggtcaccaatccaacccccggacaagaccaggcccagcatccagtgagtccttccgtcactgtacagttactcgacctcgggttgaccatcacacccgagcccaccaccgaggtggggcattcgactcctcccaaacgcacgattgtgtcccccaaacacccagaggtaacactgccacaccccgatcaagtccagacacagcactctcatctgacccgggcaactgtgcagccgcttgacctcggcttcacaattacgccaaagtcaatgacagaggttgagcctagcaccgccctcatgaccacagctcctccccctgggcatcccgaggtaacccttcccccaagcgataaagggcaggcccagcattcacacctcacccaggccacagtccaaccactggatcttgaactgacgatcacgaccaagcccacaaccgaagtgaagcctagccctactactgaagaaaccagtacccagccacctgacctggggctggcaatcattccggagcccacgaccgaaacggggcacagcaccgccttggaaaagacaacagcccctagacctgatagggtccagactttgcacaggagcctcaccgaagtaactgggcctcctacagaactggaaccagcgcaggacagccttgtgcagagcgagtcctacacacagaacaaagctctgaccgcacccgaggagcacaaggcctcaactagtacaaatatttgtgaattatgtacctgtggcgacgagatgctctcctgcattgatcttaacccagaacagcgtctgagacaggtgcctgttcccgagcctaatacgcacaatggcaccttcaccattctaaatttccaggggaattatatctcttacattgatggaaacgtctggaaagcttactcttggacagagaagctgatcttgcgcgaaaacaacctgactgaactccacaaggattcatttgagggcctgctgtctcttcaatatctcgacctcagctgcaataaaattcagtccattgagagacacacattcgaacctttgccttttcttaagtttatcaatctatcgtgcaatgttatcacagagttatccttcggcacatttcaggcttggcatggtatgcaatttttacacaagctgatcctgaaccataatccattgactacggtggaagatccttatcttttcaaactgccagccttgaagtatttagatatgggaactacattggtgcctctaacaaccttgaaaaatatcctcatgatgaccgtggagctggagaagctgattttgcccagccatatggcctgctgtctgtgccagttcaagaacagtatcgaagctgtgtgcaaaacagtcaagctgcactgcaactccgcttgcctcactaacaccattcactgccctgaagaggcttccgttggtaaccctgaaggagcttttatgaaggtcctgcaggctcgaaagaactacacctcaacagagctgattgtagagcctgaggagccctcggacagtagtggcatcaacttgagcggatttggctcagagcagctcgacacaaacgatgagtcagactttatctccactttgagatatatcctgccctacttctcagctgttaatctggacgtgaagtctctcctgctcccactgatcaagctgcccactaccggcaatagccttgctaaaattcagacagtaggccagaatagacaaagagtgaaacgggtgctcatgggaccacgctctatccagaagcgtcattttaaagaagtcggcaggcagtctattcgcagggagcagggcgctcaggcaagcgtggagaatgccgctgaggagaaaaggctgggttcaccagcccctcgcgaggttgagcaaccacacacgcagcagggacccgagaagcttgctggaaatgccgtttacactaagccttctttcacgcaggagcacaaggctgccgtgtcggtgctgaaacccttttccaagggggcaccatctacctctagcccagccaaagctctgcctcaggtccgcgaccgctggaaggatctaacgcatgccatttcgatcctcgaaagcgcaaaggcacgcgtgaccaacacaaaaactagcaagccgatcgtgcacgccagaaagaagtatcgctttcacaagacccggtcccatgtaacacataggacacccaaagtgaaaaagagccccaaggtccggaagaagtcatacctctcccgactgatgttagccaaccgacttccatttagcgccgctaaaagcctcatcaatagccctagccaaggggctttctcttcactcggagacctctctcctcaggagaacccatttctggaggtgtccgccccttccgagcactttattgagaaaaacaacactaagcacaccactgcccgtaacgcatttgaggaaaatgatttcatggaaaacaccaacatgcccgaagggaccatctcagagaataccaactataaccatccacccgaagccgacagtgcaggaactgcttttaacctggggcctacagtgaaacagacagaaactaagtgggaatacaataatgtcggcactgacccgtcgcctgagcccaaatcctttaattatcccctcctgtcttcccctggagaccagtttgagattcagctcacacaacagttgcagagtcttatccccaacaataatgtgcgtcggcttattgcccacgtgatcaggacactgaaaatggactgctcaggggctcatgtccaagtcacatgcgcaaagctgatttctaggacaggtcacctcatgaaactacttagtggtcagcaggaagtgaaagcgtcaaagatcgaatgggatacggatcaatggaagattgaaaactatattaacgagagtacagaggcacagtccgaacagaaagagaagtctctggagttgaagaaggaggtgcccggatatggctatacggataaactgatcttggctttaatagtgaccggcatcctaactattctgatcatcctcttctgcctgatcgttatctgttgccatcgtcggtcactccaggaagatgaggaaggtttttcaagggacagcgaggcacccactgaggaagaagagtcagaagctttaccctag

SEQ ID NO: 296799 - DNA, 4982 bp, Artificial Sequence
  derived and/or modified sequence
agaatgacttccgctcagtgcccggcactagcgtgtgtcatgtccccgctgcgtttctggggcccatggcccctccttatgtggcaactattgtggctactagtcaaggaggctcagcctctggagtgggtcaaggacccgctccagctgacctctaaccccctggggccgcctgagccctggtcttcccactcctcccatttcccacgggaatctccccatgcgcctactctcccagcagacccgtgggactttgatcacctggggccctctgcttcctcagagatgccagccccaccccaggaatcgactgaaaatttggttccattcctggacacctgggattcagctggagagctgcccctggagccagagcagttcttggcttcacagcaggatttaaaggacaagctgagtccacaggaaaggctccctgtttcgcccaagaagctgaagaaagatccagctcagcgttggagccttgctgagattattggaattatacgccaattatccacacctcagagtcagaaacagactttgcagaatgaatattccagtacagatacaccgtatcccggtagcctgcctccagaactccgggtgaagtcagatgagcctccagggccctctgagcaagttggaccttctcaattccatctagagcccgaaactcaaaatccagagacccttgaagacatccagtcctcttcactccagcaagaagccccagcacagcttccacagctccttgaggaagaaccttcttcaatgcagcaggaggccccagctctgcctccagagtcctctatggagagtctaactctaccgaatcatgaggtgtcagttcaacctccaggtgaggatcaagcttattatcacttgcccaacattacagttaaacctgcagatgtggaggttaccataacttcagagcctaccaatgagacagaatcttcccaagcccagcaggagaccccaattcagtttccagaggaggtggaaccttctgcaacccaacaggaggccccaattgagcctccagttcctcctatggagcatgaactttccatcagtgagcagcagcagccagttcagccttctgagtctcctagggaggtcgaatcttctccgacccagcaggagaccccaggtcagcctccagaacatcatgaagtcacagtttcacctccaggtcaccatcaaactcatcatttagcttcacccagtgtctctgtgaagcctccagacgtgcagctcaccatagcagcagagcctagtgcagaggtgggaacttctctagtccaccaggaggctacaactcggctctcagggtcaggtaatgatgtagaacctcccgccatccagcacgggggcccacctctgcttccagagtcatcagaagaagctggacctttagcagttcaacaggagacttcatttcaatctccggaacctattaataatgagaacccctctccaacccagcaggaggctgcagctgagcatccacagaccgctgaggagggtgagtcttccctaacccatcaggaggccccagctcagactccagagttccctaatgtagttgtagctcaacctccagagcattcacacctgactcaagccacagttcaacctttggatctggggtttaccatcactccagaatccaagacagaggttgaactttctccaaccatgaaggagaccccaactcagcctcctaagaaagttgtaccccaacttcgagtatatcaaggggtaacaaatccaacaccaggtcaggatcaagctcagcatccagtgtcacccagcgttacagttcaacttttggacctgggacttaccatcactccagaacctactacggaggttggacattctacacccccgaagaggactatagtttctccaaagcatcctgaggtgacacttccacatccagaccaggttcagactcagcattcacacctgactcgagccacagttcaacctttggacctggggtttaccatcactccaaaatccatgacagaggttgaaccttctacagccctgatgactacagctcctcctccaggacaccctgaggtgacacttccaccttcagacaagggtcaggctcagcattcacacctgactcaagccaccgttcaacctctggacctggagcttaccataactacaaaacctactacagaggttaaaccatctccaaccacggaggagacctcaactcagcctccagacctgggacttgccatcattccagaacccactacagagactggacattctacagccctggagaagactacagctcctcgtccagaccgggttcagactctgcatcgaagcctgactgaagtcacaggtccacctactgaactagaacctgctcaggattcactggtgcagtctgaaagttacacccaaaataaggctttaactgcaccagaggaacacaaggcctccacaagcaccaacatatgtgagctctgtacctgcggagatgagatgttgtcatgtattgatctcaacccagagcagaggctccgccaagtgcctgtgccagagcccaacacccacaatggcaccttcaccatcttaaatttccaaggaaactatatttcttacattgatggaaatgtatggaaagcatacagttggaccgagaaactaattctcagagaaaataacttgactgaattacacaaggattcatttgaaggcctgctatccctccagtatttagatttatcctgcaataaaatacagtctattgaaagacatacatttgaaccactaccatttttgaagtttataaatcttagttgcaatgtaattacagaactcagctttggaacatttcaggcctggcacggaatgcagtttttacataagttaattctcaatcacaatcctctgacaactgttgaagatccgtatctctttaaattgccagcattaaaatatctagacatgggaacaacgctagtcccacttacaacacttaagaacattctcatgatgactgttgaactggaaaaactgatcttacctagccatatggcctgctgcctctgccaatttaaaaacagcattgaggctgtctgcaagacagtcaagctgcattgcaacagtgcatgtctgacaaacaccacacattgtcctgaagaagcatcggtagggaatccagaaggagcgttcatgaaggtgttacaagcccggaagaactacacaagcactgagctgattgttgagccagaggagccctcagacagcagtggcatcaacttgtcaggctttgggagtgagcagctagacaccaatgacgagagtgattttatcagtacactacgttacatcttgccttatttctcagcggtaaacctagatgtgaaatcactgttactaccgttaattaaactgccaaccacaggaaacagcctggcaaagattcaaactgtaggccaaaaccggcagagagtgaagagagtcctcatgggcccaaggagcatccagaaaaggcacttcaaagaggtaggaaggcagagcatcaggagggaacagggtgcccaggcatctgtggagaacgctgccgaagaaaaaaggctcgggagtccagccccaagggaggtggaacagccccacacacagcaggggcctgagaagttagcgggaaacgccgtctacaccaagccttccttcacccaagagcataaggcagcagtctctgtgctgaaacccttctccaagggcgcgccttctacctccagccctgcaaaagccctaccacaggtgagagacagatggaaagacttaacccacgctatttccactttagaaagtgcaaaggctagagttacaaatacgaagacgtctaaaccaatcgtacatgccagaaaaaaataccgctttcacaaaactcgctcccacgtgacccacagaacacccaaagtcaaaaagagtccaaaggtcagaaagaaaagttatctgagtagactgatgctcgcaaacaggcttccattctctgcagcgaagagcctcataaattccccttcacaaggggctttttcatccttaggagacctgagtcctcaagaaaacccttttctggaagtatctgctccttcagaacattttatagaaaagaataatacaaaacacacaactgcaagaaatgcctttgaagaaaatgattttatggaaaacactaacatgccagaaggaaccatctctgaaaacacaaactacaatcatcctcctgaggcagattccgctgggactgcattcaacttagggccaactgttaaacaaactgagacaaaatgggaatacaacaacgtgggcactgacctgtcccccgagcccaaaagcttcaattacccattgctctcgtccccaggtgatcagtttgaaattcagctaacccagcagctacagtcccttatccccaacaacaatgtgagaaggctcattgctcatgttatccggaccttgaagatggactgctctgggacccatgtgcaagtgacctgtgccaagctcatctccaggacaggccacctgatgaagcttctcagtgggcagcaggaagtaaaggcatccaagatagaatgggatacggaccaatggaagattgagaactacattaatgagagcacagaagcccagagtgaacagaaagagaagtcgcttgagctcaaaaaagaagttccaggatatggctatactgacaaactcatcttggcattaattgttactggaatactaacgattttgattatacttttctgcctcattgtgatatgttgtcaccgaaggtcattacaagaagatgaagaaggattctcaagggacagcgaagccccaacggaggaggaggagagtgaagccctgccataggaggagaacacagcccacctcaggcctcctgcaaaaatacatagaataaacaacaacagttactaaataaa

SEQ ID NO: 296800 - DNA, 2096 bp, Artificial Sequence
  derived and/or modified sequence
atgcagttttacacattgaaaataattctcaatcacaatcctctgacaactgttgaagatccgtatctctttaaattgccagcattaaaatatctagacatgggaacaacgctagtcccacttacaacacttaagaacattctcatgatgactgttgaactggaaaaactgatcttacctagccatatggcctgctgcctctgccaatttaaaaacagcattgaggctgtctgcaagacagtcaagctgcattgcaacagtgcatgtctgacaaacaccacacattgtcctgaagaagcatcggtagggaatccagaaggagcgttcatgaaggtgttacaagcccggaagaactacacaagcactgagctgattgttgagccagaggagccctcagacagcagtggcatcaacttgtcaggctttgggagtgagcagctagacaccaatgacgagagtgattttatcagtacactacgttacatcttgccttatttctcagcggtaaacctagatgtgaaatcactgttactaccgttaattaaactgccaaccacaggaaacagcctggcaaagattcaaactgtaggccaaaaccggcagagagtgaagagagtcctcatgggcccaaggagcatccagaaaagacacttcaaagaggtaggaaggcagagcatcaggagggaacagggtgcccaggcatctgtggagaacgctgccgaagaaaaaaggctcgggagtccagccccaagggaggtggaacagccccacacacagcaggggcctgagaagttagcgggaaacgccgtctacaccaagccttccttcacccaagagcataaggcagcagtctctgtgctgaaacccttctccaagggcgcgccttctacctccagccctgcaaaagccctaccacaggtgagagacagatggaaagacttaacccacgctatttccactttagaaagtgcaaaggctagagttacaaatacgaagacgtctaaaccaatcgtacatgccagaaaaaaataccgctttcacaaaactcgctcccacgtgacccacagaacacccaaagtcaaaaagagtccaaaggtcagaaagaaaagttatctgagtagactgatgctcgcaaacaggcttccattctctgcagcgaagagcctcataaattccccttcacaaggggctttttcatccttaggagacctgagtcctcaagaaaacccttttctggaagtatctgctccttcagaacattttatagaaaagaataatacaaaacacacaactgcaagaaatgcctttgaagaaaatgattttatggaaaacactaacatgccagaaggaaccatctctgaaaacacaaactacaatcatcctcctgaggcagattccgctgggactgcattcaacttagggccaactgttaaacaaactgagacaaaatgggaatacaacaacgtgggcactgacctgtcccccgagcccaaaagcttcaattacccattgctctcgtccccaggtgatcagtttgaaattcagctaacccagcagctacagtcccttatccccaacaacaatgtgagaaggctcattgctcatgttatccggaccttgaagatggactgctctggggcccatgtgcaagtgacctgtgccaagctcatctccaggacaggccacctgatgaagcttctcagtgggcagcaggaagtaaaggcatccaagatagaatgggatacggaccaatggaagattgagaactacattaatgagagcacagaagcccagagtgaacagaaagagaagtcgcttgagctcaaaaaagaagttccaggatatggctatactgacaaactcatcttggcattaattgttactggaatactaacgattttgattatacttttctgcctcattgtgatatgttgtcaccgaaggtcattacaagaagatgaagaaggattctcaagggacagcgaagccccaacggaggaggaggagagtgaagccctgccataggaggagaacacagcccacctcaggcctcctgcaaaaatacatagaataaacaacaacagttactaaataaa

SEQ ID NO: 296801 - DNA, 4982 bp, Artificial Sequence
  derived and/or modified sequence
agaatgacttccgctcagtgcccggcactagcgtgtgtcatgtccccgctgcgtttctggggcccatggcccctccttatgtggcaactattgtggctactagtcaaggaggctcagcctctggagtgggtcaaggacccgctccagctgacctctaaccccctggggccgcctgagccctggtcttcccactcctcccatttcccacgggaatctccccatgcgcctactctcccagcagacccgtgggactttgatcacctggggccctctgcttcctcagagatgccagccccaccccaggaatcgactgaaaatttggttccattcctggacacctgggattcagctggagagctgcccctggagccagagcagttcttggcttcacagcaggatttaaaggacaagctgagtccacaggaaaggctccctgtttcgcccaagaagctgaagaaagatccagctcagcgttggagccttgctgagattattggaattatacgccaattatccacacctcagagtcagaaacagactttgcagaatgaatattccagtacagatacaccgtatcccggtagcctgcctccagaactccgggtgaagtcagatgagcctccagggccctctgagcaagttggaccttctcaattccatctagagcccgaaactcaaaatccagagacccttgaagacatccagtcctcttcactccagcaagaagccccagcacagcttccacagctccttgaggaagaaccttcttcaatgcagcaggaggccccagctctgcctccagagtcctctatggagagtctaactctaccgaatcatgaggtgtcagttcaacctccaggtgaggatcaagcttattatcacttgcccaacattacagttaaacctgcagatgtggaggttaccataacttcagagcctaccaatgagacagaatcttcccaagcccagcaggagaccccaattcagtttccagaggaggtggaaccttctgcaacccaacaggaggccccaattgagcctccagttcctcctatggagcatgaactttccatcagtgagcagcagcagccagttcagccttctgagtctcctagggaggtcgaatcttctccgacccagcaggagaccccaggtcagcctccagaacatcatgaagtcacagtttcacctccaggtcaccatcaaactcatcatttagcttcacccagtgtctctgtgaagcctccagacgtgcagctcaccatagcagcagagcctagtgcagaggtgggaacttctctagtccaccaggaggctacaactcggctctcagggtcaggtaatgatgtagaacctcccgccatccagcacgggggcccacctctgcttccagagtcatcagaagaagctggacctttagcagttcaacaggagacttcatttcaatctccggaacctattaataatgagaacccctctccaacccagcaggaggctgcagctgagcatccacagaccgctgaggagggtgagtcttccctaacccatcaggaggccccagctcagactccagagttccctaatgtagttgtagctcaacctccagagcattcacacctgactcaagccacagttcaacctttggatctggggtttaccatcactccagaatccaagacagaggttgaactttctccaaccatgaaggagaccccaactcagcctcctaagaaagttgtaccccaacttcgagtatatcaaggggtaacaaatccaacaccaggtcaggatcaagctcagcatccagtgtcacccagcgttacagttcaacttttggacctgggacttaccatcactccagaacctactacggaggttggacattctacacccccgaagaggactatagtttctccaaagcatcctgaggtgacacttccacatccagaccaggttcagactcagcattcacacctgactcgagccacagttcaacctttggacctggggtttaccatcactccaaaatccatgacagaggttgaaccttctacagccctgatgactacagctcctcctccaggacaccctgaggtgacacttccaccttcagacaagggtcaggctcagcattcacacctgactcaagccaccgttcaacctctggacctggagcttaccataactacaaaacctactacagaggttaaaccatctccaaccacggaggagacctcaactcagcctccagacctgggacttgccatcattccagaacccactacagagactggacattctacagccctggagaagactacagctcctcgtccagaccgggttcagactctgcatcgaagcctgactgaagtcacaggtccacctactgaactagaacctgctcaggattcactggtgcagtctgaaagttacacccaaaataaggctttaactgcaccagaggaacacaaggcctccacaagcaccaacatatgtgagctctgtacctgcggagatgagatgttgtcatgtattgatctcaacccagagcagaggctccgccaagtgcctgtgccagagcccaacacccacaatggcaccttcaccatcttaaatttccaaggaaactatatttcttacattgatggaaatgtatggaaagcatacagttggaccgagaaactaattctcagagaaaataacttgactgaattacacaaggattcatttgaaggcctgctatccctccagtatttagatttatcctgcaataaaatacagtctattgaaagacatacatttgaaccactaccatttttgaagtttataaatcttagttgcaatgtaattacagaactcagctttggaacatttcaggcctggcacggaatgcagtttttacataagttaattctcaatcacaatcctctgacaactgttgaagatccgtatctctttaaattgccagcattaaaatatctagacatgggaacaacgctagtcccacttacaacacttaagaacattctcatgatgactgttgaactggaaaaactgatcttacctagccatatggcctgctgcctctgccaatttaaaaacagcattgaggctgtctgcaagacagtcaagctgcattgcaacagtgcatgtctgacaaacaccacacattgtcctgaagaagcatcggtagggaatccagaaggagcgttcatgaaggtgttacaagcccggaagaactacacaagcactgagctgattgttgagccagaggagccctcagacagcagtggcatcaacttgtcaggctttgggagtgagcagctagacaccaatgacgagagtgattttatcagtacactacgttacatcttgccttatttctcagcggtaaacctagatgtgaaatcactgttactaccgttaattaaactgccaaccacaggaaacagcctggcaaagattcaaactgtaggccaaaaccggcagagagtgaagagagtcctcatgggcccaaggagcatccagaaaagacacttcaaagaggtaggaaggcagagcatcaggagggaacagggtgcccaggcatctgtggagaacgctgccgaagaaaaaaggctcgggagtccagccccaagggaggtggaacagccccacacacagcaggggcctgagaagttagcgggaaacgccgtctacaccaagccttccttcacccaagagcataaggcagcagtctctgtgctgaaacccttctccaagggcgcgccttctacctccagccctgcaaaagccctaccacaggtgagagacagatggaaagacttaacccacgctatttccactttagaaagtgcaaaggctagagttacaaatacgaagacgtctaaaccaatcgtacatgccagaaaaaaataccgctttcacaaaactcgctcccacgtgacccacagaacacccaaagtcaaaaagagtccaaaggtcagaaagaaaagttatctgagtagactgatgctcgcaaacaggcttccattctctgcagcgaagagcctcataaattccccttcacaaggggctttttcatccttaggagacctgagtcctcaagaaaacccttttctggaagtatctgctccttcagaacattttatagaaaagaataatacaaaacacacaactgcaagaaatgcctttgaagaaaatgattttatggaaaacactaacatgccagaaggaaccatctctgaaaacacaaactacaatcatcctcctgaggcagattccgctgggactgcattcaacttagggccaactgttaaacaaactgagacaaaatgggaatacaacaacgtgggcactgacctgtcccccgagcccaaaagcttcaattacccattgctctcgtccccaggtgatcagtttgaaattcagctaacccagcagctacagtcccttatccccaacaacaatgtgagaaggctcattgctcatgttatccggaccttgaagatggactgctctggggcccatgtgcaagtgacctgtgccaagctcatctccaggacaggccacctgatgaagcttctcagtgggcagcaggaagtaaaggcatccaagatagaatgggatacggaccaatggaagattgagaactacattaatgagagcacagaagcccagagtgaacagaaagagaagtcgcttgagctcaaaaaagaagttccaggatatggctatactgacaaactcatcttggcattaattgttactggaatactaacgattttgattatacttttctgcctcattgtgatatgttgtcaccgaaggtcattacaagaagatgaagaaggattctcaagggacagcgaagccccaacggaggaggaggagagtgaagccctgccataggaggagaacacagcccacctcaggcctcctgcaaaaatacatagaataaacaacaacagttactaaataaa

SEQ ID NO: 296802 - DNA, 2096 bp, Artificial Sequence
  derived and/or modified sequence
atgcagttttacacattgaaaataattctcaatcacaatcctctgacaactgttgaagatccgtatctctttaaattgccagcattaaaatatctagacatgggaacaacgctagtcccacttacaacacttaagaacattctcatgatgactgttgaactggaaaaactgatcttacctagccatatggcctgctgcctctgccaatttaaaaacagcattgaggctgtctgcaagacagtcaagctgcattgcaacagtgcatgtctgacaaacaccatacattgtcctgaagaagcatcggtagggaatccagaaggagcgttcatgaaggtgttacaagcccggaagaactacacaagcactgagctgattgttgagccagaggagccctcagacagcagtggcatcaacttgtcaggctttgggagtgagcagctagacaccaatgacgagagtgattttatcagtacactacgttacatcttgccttatttctcagcggtaaacctagatgtgaaatcactgttactaccgttaattaaactgccaaccacaggaaacagcctggcaaagattcaaactgtaggccaaaaccggcagagagtgaagagagtcctcatgggcccaaggagcatccagaaaaggcacttcaaagaggtaggaaggcagagcatcaggagggaacagggtgcccaggcatctgtggagaacgctgccgaagaaaaaaggctcgggagtccagccccaagggaggtggaacagccccacacacagcaggggcctgagaagttagcgggaaacgccgtctacaccaagccttccttcacccaagagcataaggcagcagtctctgtgctgaaacccttctccaagggcgcgccttctacctccagccctgcaaaagccctaccacaggtgagagacagatggaaagacttaacccacgctatttccattttagaaagtgcaaaggctagagttacaaatacgaagacgtctaaaccaatcgtacatgccagaaaaaaataccgctttcacaaaactcgctcccacgtgacccacagaacacccaaagtcaaaaagagtccaaaggtcagaaagaaaagttatctgagtagactgatgctcgcaaacaggcttccattctctgcagcgaagagcctcataaattccccttcacaaggggctttttcatccttaggagacctgagtcctcaagaaaacccttttctggaagtatctgctccttcagaacattttatagaaaagaataatacaaaacacacaactgcaagaaatgcctttgaagaaaatgattttatggaaaacactaacatgccagaaggaaccatctctgaaaacacaaactacaatcatcctcctgaggcagattccgctgggactgcattcaacttagggccaactgttaaacaaactgagacaaaatgggaatacaacaacgtgggcactgacccgtcccccgagcccaaaagcttcaattacccattgctctcgtccccaggtgatcagtttgaaattcagctaacccagcagctacagtcccttatccccaacaacaatgtgagaaggctcattgctcatgttatccggaccttgaagatggactgctctggggcccatgtgcaagtgacctgtgccaagctcatctccaggacaggccacctgatgaagcttctcagtgggcagcaggaagtaaaggcatccaagatagaatgggatacggaccaatggaagattgagaactacattaatgagagcacagaagcccagagtgaacagaaagagaagtcgcttgagctcaaaaaagaagttccaggatatggctatactgacaaactcatcttggcattaattgttactggaatactaacgattttgattatacttttctgccttattgtgatatgttgtcaccgaaggtcattacaagaagatgaagaaggattctcaagggacagcgaagccccaacggaggaggaggagagtgaagccctgccataggaggagaacacagcccacctcaggcctcctgcaaaaatacatagaataaacaacaacagttactaaatgaa

SEQ ID NO: 296803 - DNA, 4982 bp, Artificial Sequence
  derived and/or modified sequence
agaatgacttccgctcagtgcccggcactagcgtgtgtcatgtccccgctgcgtttctggggcccatggcccctccttatgtggcaactattgtggctactagtcaaggaggctcagcctctggagtgggtcaaggacccgctccagctgacctctaaccccctggggccgcctgagccctggtcttcccactcctcccatttcccacgggaatctccccatgcgcctactctcccagcagacccgtgggactttgatcacctggggccctctgcttcctcagagatgccagccccaccccaggaatcgactgaaaatttggttccattcctggacacctgggattcagctggagagctgcccctggagccagagcagttcttggcttcacagcaggatttaaaggacaagctgagtccacaggaaaggctccctgtttcgcccaagaagctgaagaaagatccagctcagcgttggagccttgctgagattattggaattatacgccaattatccacacctcagagtcagaaacagactttgcagaatgaatattccagtacagatacaccgtatcccggtagcctgcctccagaactccgggtgaagtcagatgagcctccagggccctctgagcaagttggaccttctcaattccatctagagcccgaaactcaaaatccagagacccttgaagacatccagtcctcttcactccagcaagaagccccagcacagcttccacagctccttgaggaagaaccttcttcaatgcagcaggaggccccagctctgcctccagagtcctctatggagagtctaactctaccgaatcatgaggtgtcagttcaacctccaggtgaggatcaagcttattatcacttgcccaacattacagttaaacctgcagatgtggaggttaccataacttcagagcctaccaatgagacagaatcttcccaagcccagcaggagaccccaattcagtttccagaggaggtggaaccttctgcaacccaacaggaggccccaattgagcctccagttcctcctatggagcatgaactttccatcagtgagcagcagcagccagttcagccttctgagtctcctagggaggtcgaatcttctccgacccagcaggagaccccaggtcagcctccagaacatcatgaagtcacagtttcacctccaggtcaccatcaaactcatcatttagcttcacccagtgtctctgtgaagcctccagacgtgcagctcaccatagcagcagagcctagtgcagaggtgggaacttctctagtccaccaggaggctacaactcggctctcagggtcaggtaatgatgtagaacctcccgccatccagcacgggggcccacctctgcttccagagtcatcagaagaagctggacctttagcagttcaacaggagacttcatttcaatctccggaacctattaataatgagaacccctctccaacccagcaggaggctgcagctgagcatccacagaccgctgaggagggtgagtcttccctaacccatcaggaggccccagctcagactccagagttccctaatgtagttgtagctcaacctccagagcattcacacctgactcaagccacagttcaacctttggatctggggtttaccatcactccagaatccaagacagaggttgaactttctccaaccatgaaggagaccccaactcagcctcctaagaaagttgtaccccaacttcgagtatatcaaggggtaacaaatccaacaccaggtcaggatcaagctcagcatccagtgtcacccagcgttacagttcaacttttggacctgggacttaccatcactccagaacctactacggaggttggacattctacacccccgaagaggactatagtttctccaaagcatcctgaggtgacacttccacatccagaccaggttcagactcagcattcacacctgactcgagccacagttcaacctttggacctggggtttaccatcactccaaaatccatgacagaggttgaaccttctacagccctgatgactacagctcctcctccaggacaccctgaggtgacacttccaccttcagacaagggtcaggctcagcattcacacctgactcaagccaccgttcaacctctggacctggagcttaccataactacaaaacctactacagaggttaaaccatctccaaccacggaggagacctcaactcagcctccagacctgggacttgccatcattccagaacccactacagagactggacattctacagccctggagaagactacagctcctcgtccagaccgggttcagactctgcatcgaagcctgactgaagtcacaggtccacctactgaactagaacctgctcaggattcactggtgcagtctgaaagttacacccaaaataaggctttaactgcaccagaggaacacaaggcctccacaagcaccaacatatgtgagctctgtacctgcggagatgagatgttgtcatgtattgatctcaacccagagcagaggctccgccaagtgcctgtgccagagcccaacacccacaatggcaccttcaccatcttaaatttccaaggaaactatatttcttacattgatggaaatgtatggaaagcatacagttggaccgagaaactaattctcagagaaaataacttgactgaattacacaaggattcatttgaaggcctgctatccctccagtatttagatttatcctgcaataaaatacagtctattgaaagacatacatttgaaccactaccatttttgaagtttataaatcttagttgcaatgtaattacagaactcagctttggaacatttcaggcctggcacggaatgcagtttttacataagttaattctcaatcacaatcctctgacaactgttgaagatccgtatctctttaaattgccagcattaaaatatctagacatgggaacaacgctagtcccacttacaacacttaagaacattctcatgatgactgttgaactggaaaaactgatcttacctagccatatggcctgctgcctctgccaatttaaaaacagcattgaggctgtctgcaagacagtcaagctgcattgcaacagtgcatgtctgacaaacaccatacattgtcctgaagaagcatcggtagggaatccagaaggagcgttcatgaaggtgttacaagcccggaagaactacacaagcactgagctgattgttgagccagaggagccctcagacagcagtggcatcaacttgtcaggctttgggagtgagcagctagacaccaatgacgagagtgattttatcagtacactacgttacatcttgccttatttctcagcggtaaacctagatgtgaaatcactgttactaccgttaattaaactgccaaccacaggaaacagcctggcaaagattcaaactgtaggccaaaaccggcagagagtgaagagagtcctcatgggcccaaggagcatccagaaaaggcacttcaaagaggtaggaaggcagagcatcaggagggaacagggtgcccaggcatctgtggagaacgctgccgaagaaaaaaggctcgggagtccagccccaagggaggtggaacagccccacacacagcaggggcctgagaagttagcgggaaacgccgtctacaccaagccttccttcacccaagagcataaggcagcagtctctgtgctgaaacccttctccaagggcgcgccttctacctccagccctgcaaaagccctaccacaggtgagagacagatggaaagacttaacccacgctatttccattttagaaagtgcaaaggctagagttacaaatacgaagacgtctaaaccaatcgtacatgccagaaaaaaataccgctttcacaaaactcgctcccacgtgacccacagaacacccaaagtcaaaaagagtccaaaggtcagaaagaaaagttatctgagtagactgatgctcgcaaacaggcttccattctctgcagcgaagagcctcataaattccccttcacaaggggctttttcatccttaggagacctgagtcctcaagaaaacccttttctggaagtatctgctccttcagaacattttatagaaaagaataatacaaaacacacaactgcaagaaatgcctttgaagaaaatgattttatggaaaacactaacatgccagaaggaaccatctctgaaaacacaaactacaatcatcctcctgaggcagattccgctgggactgcattcaacttagggccaactgttaaacaaactgagacaaaatgggaatacaacaacgtgggcactgacccgtcccccgagcccaaaagcttcaattacccattgctctcgtccccaggtgatcagtttgaaattcagctaacccagcagctacagtcccttatccccaacaacaatgtgagaaggctcattgctcatgttatccggaccttgaagatggactgctctggggcccatgtgcaagtgacctgtgccaagctcatctccaggacaggccacctgatgaagcttctcagtgggcagcaggaagtaaaggcatccaagatagaatgggatacggaccaatggaagattgagaactacattaatgagagcacagaagcccagagtgaacagaaagagaagtcgcttgagctcaaaaaagaagttccaggatatggctatactgacaaactcatcttggcattaattgttactggaatactaacgattttgattatacttttctgccttattgtgatatgttgtcaccgaaggtcattacaagaagatgaagaaggattctcaagggacagcgaagccccaacggaggaggaggagagtgaagccctgccataggaggagaacacagcccacctcaggcctcctgcaaaaatacatagaataaacaacaacagttactaaatgaa

SEQ ID NO: 296804 - protein, 472 aa, Artificial Sequence [sequence omitted]

SEQ ID NO: 296805 - protein, 258 aa, Artificial Sequence
  derived and/or modified sequence
MSGLHLVKQGRDRKKIDSQRDFTVASPAEFVTRFGGNKVIEKVLIANNGIAAVKCMRSIRRWSYEMFRNERAIRFVVMVTPEDLKANAEYIKMADHYVPVPGGPNNNNYANVELILDIAKRIPVQAVWAGWGHASENPKLPELLLKNGIAFMGPPSQAMWALGDKIASSIVAQTAGIPTLPWSGSGLRVDWQENDFSKRILNVPQELYEKGYVKDVDDGLQAAEEVGYPVMIKASEGGGGKGIRKVNNADDFPNLFRQ

SEQ ID NO: 296806 - DNA, 3389 bp, Artificial Sequence
  derived and/or modified sequence
gtggggcccatctagggagccggtgggaatggagactgggctaggtcaggcccctgggcgctcagcagttctgtcggcaagtgagcacaagaggagcggggcagcctgagggtctggccctgtctacttggagacaaccccggtgagatgcaagggttatggccacagggtgaggggacgcctggcccagcctcagggctgttgtccagcaggtctctgagggcccacctgcccctgttctcccccattcccctagagctacagccctcactgtcccgtgaggggaaaaggcatggtgacaatgggggctgtagccctaggagaacgggggagaagatgggcagggccccgttctgggcatctcacggtgaggccagggaggcagcagggctcgcggctaaagacctgggtctggtgctgggaagggatctggggccgggtaagaggagcccagccaggagcccatccctcagggatcacaggatggagagacagaggatccctggggaggtagggcgggagggagctgacgagccgtgccacttctgaaacgcagggtgtgtggctcgggtgcagggagaggcaggtggatgctgggaggtcagaacctgcaagggccttggggctgtcaagtggggtgggcccctggtgcagccagagtacaccgggcaggtctcagggcaggctcccttgaccctggcggggggatgtggtcactccctgagggactcctgtcagggcccggtcgcccaccctgggcggcccccatcccatctcagggctaacctttctcagctccagcagaaagcaccacctcgagtccaggacgggcagccccactgggcagcctgaccgccccccacgccaggggccccagtaaccccggccaggctgtccctacactccttcttctcccaggtcctgcccctcctgggagtcagccccacaggaaggcccttgtcctcccttccctgtgccttctcctgggctgagccctgagctggaaagggacagagccagtcctttctgggggtcggcacccaggctggggccgctccaggccccgtgcagttcctcagctctgcctgggttgccttacagtgagacggagctgcctcctctgactgcgcgggaggcgaaggtaagagcctgatgcgtggaggggctggtccagggacgtagggactgggcgggtggtcagtgaggcagaggaagcagctggcctgagcggtggcgggtgagggcaacacgctgtcactgggaggggcagcagtccctgctggacctgaccccaggttgctgttcactttggcagtttgataaaattccaaaaggagaaccacagtcctggcttgggggtggctgcgcgcttgtgtcaggaccccacctagaggctgggacctaagactggtgtgtctgtggcctgaggatggtacatcccggggtcccaaagccagcccactggtgctcatttgctcaaaggctctcagcccttgaggtctgcccttccctggctccttccagctggctcccaccagggctccagagcccaagacccagcatccgcgggcggctctgggaagcctggcagctccgctaactccaacatgcctcatttgacagcaaattcggcgggagatcagccgaaagagcaagtgggtggatatgctgggagactgggagaaatacaaaagcagcagaaagctcatagatcgagcgtacaagggaatgcccatgaacatccggggcccgatgtggtcagtcctcctgaacattgaggaaatgaagttgaaaaaccccggaagataccagatcatgaaggagaagggcaagaggtcatctgagcacatccagcgcatcgaccgggacataagcgggacattaaggaagcatatgttcttcagggatcgatacggaaccaagcagcgggaactactccacatcctcctggcatatgaggagtataacccggaggtgggctactgcagggacctgagccacatcgccgccttgttcctcctctatcttcctgaggaggatgcattctgggcactggtgcagctgctggccagtgagaggcactccctgcagggatttcacagcccaaatggcgggaccgtccaggggctccaagaccaacaggagcatgtggtagccacgtcacaacccaagaccatggggcatcaggacaagaaagatctatgtgggcagtgttccccgttaggctgcctcatccggatattgattgacgggatctctctcgggctcaccctgcgcctgtgggacgtgtatctggtagaaggcgaacaggcgttgatgccgataacaagaatcgcctttaaggttcagcagaagcgcctcacgaagacgtccaggtgtggcccgtgggcacgtttttgcaaccggttcgttgatacctgggccagggatgaggacactgtgctcaagcatcttagggcctctatgaagaaactaacaagaaagcagggggacctgccacccccagccaaacccgagcaagggtcgtcggcatccaggcctgtgccagcttcacgtggcgggaagaccctctgcaagggggacaggcaggcccctccaggcccaccagcccggttcccgcggcccatttggtcagcttccccgccacgggcacctcgttcttccacaccctgtcctggtggggctgtccgggaagacacctaccctgtgggcactcagggtgtgcccagcccggccctggctcagggaggacctcagggttcctggagattcctgcagtggaactccatgccccgcctcccaacggacctggacgtagagggcccttggttccgccattatgatttcagacagagctgctgggtccgtgccatatcccaggaggaccagctggccccctgctggcaggctgaacaccctgcggagcgggtgagatcggctttcgctgcacccagcactgattccgaccagggcacccccttcagagctagggacgaacagcagtgtgctcccacctcagggccttgcctctgcggcctccacttggaaagttctcagttccctccaggcttctagaagcatctgggccagggctcatggctggataatttccctaggcttaacaacccaagcaagcttcgcatcctcgttttatttttggttaaacttatgaaaatgtattaagaaagagtgcagctcgagagagattcagagatggaacacaccagaccccagatcacaaagccaaccatgcccagcccctcccagcaccccaagccccacgaccatcgttctgaattctgacgacaccgtgagcctgcctttgtacttcaaactcatggaaggataaccaccttcatgttttgaaataaatgtttcctgttgaaatg

SEQ ID NO: 296807 - DNA, 3389 bp, Artificial Sequence
  derived and/or modified sequence
gtggggcccatctagggagccggtgggaatggagactgggctaggtcaggcccctgggcgctcagcagttctgtcggcaagtgagcacaagaggagcggggcagcctgagggtctggccctgtctacttggagacaaccccggtgagatgcaagggttatggccacagggtgaggggacgcctggcccagcctcagggctgttgtccagcaggtctctgagggcccacctgcccctgttctcccccattcccctagagctacagccctcactgtcccgtgaggggaaaaggcatggtgacaatgggggctgtagccctaggagaacgggggagaagatgggcagggccccgttctgggcatctcacggtgaggccagggaggcagcagggctcgcggctaaagacctgggtctggtgctgggaagggatctggggccgggtaagaggagcccagccaggagcccatccctcagggatcacaggatggagagacagaggatccctggggaggtagggcgggagggagctgacgagccgtgccacttctgaaacgcagggtgtgtggctcgggtgcagggagaggcaggtggatgctgggaggtcagaacctgcaagggccttggggctgtcaagtggggtgggcccctggtgcagccagagtacaccgggcaggtctcagggcaggctcccttgaccctggcggggggatgtggtcactccctgagggactcctgtcagggcccggtcgcccaccctgggcggcccccatcccatctcagggctaacctttctcagctccagcagaaagcaccacctcgagtccaggacgggcagccccactgggcagcctgaccgccccccacgccaggggccccagtaaccccggccaggctgtccctacactccttcttctcccaggtcctgcccctcctgggagtcagccccacaggaaggcccttgtcctcccttccctgtgccttctcctgggctgagccctgagctggaaagggacagagccagtcctttctgggggtcggcacccaggctggggccgctccaggccccgtgcagttcctcagctctgcctgggttgccttacagtgagacggagctgcctcctctgactgcgcgggaggcgaaggtaagagcctgatgcgtggaggggctggtccagggacgtagggactgggcgggtggtcagtgaggcagaggaagcagctggcctgagcggtggcgggtgagggcaacacgctgtcactgggaggggcagcagtccctgctggacctgaccccaggttgctgttcactttggcagtttgataaaattccaaaaggagaaccacagtcctggcttgggggtggctgcgcgcttgtgtcaggaccccacctagaggctgggacctaagactggtgtgtctgtggcctgaggatggtacatcccggggtcccaaagccagcccactggtgctcatttgctcaaaggctctcagcccttgaggtctgcccttccctggctccttccagctggctcccaccagggctccagagcccaagacccagcatccgcgggcggctctgggaagcctggcagctccgctaactccaacatgcctcatttgacagcaaattcggcgggagatcagccgaaagagcaagtgggtggatatgctgggagactgggagaaatacaaaagcagcagaaagctcatagatcgagcgtacaagggaatgcccatgaacatccggggcccgatgtggtcagtcctcctgaacattgaggaaatgaagttgaaaaaccccggaagataccagatcatgaaggagaagggcaagaggtcatctgagcacatccagcgcatcgaccgggacataagcgggacattaaggaagcatatgttcttcagggatcgatacggaaccaagcagcgggaactactccacatcctcctggcatatgaggagtataacccggaggtgggctactgcagggacctgagccacatcgccgccttgttcctcctctatcttcctgaggaggatgcattctgggcactggtgcagctgctggccagtgagaggcactccctgcagggatttcacagcccaaatggcgggaccgtccaggggctccaagaccaacaggagcatgtggtagccacgtcacaacccaagaccatggggcatcaggacaagaaagatctatgtgggcagtgttccccgttaggctgcctcatccggatattgattgacgggatctctctcgggctcaccctgcgcctgtgggacgtgtatctggtagaaggcgaacaggcgttgatgccgataacaagaatcgcctttaaggttcagcagaagcgcctcacgaagacgtccaggtgtggcccgtgggcacgtttttgcaaccggttcgttgatacctgggccagggatgaggacactgtgctcaagcatcttagggcctctatgaagaaactaacaagaaagcagggggacctgccacccccagccaaacccgagcaagggtcgtcggcatccaggcctgtgccggcttcacgtggcgggaagaccctctgcaagggggacaggcaggcccctccaggcccaccagcctggttcccgcggcccatttggtcagcttccccgccacgggcacctcgttcttccacaccctgtcctggtggggctgtccgggaagacacctaccctgtgggcactcagggtgtgcccagcccggccctggctcagggaggacctcagggttcctggagattcctgcagtggaactccatgccccgcctcccaacggacctggacgtagagggcccttggttccgccattatgatttcagacagagctgctgggtccgtgccatatcccaggaggaccagctggccccctgctggcaggctgaacaccctgcggagcgggtgagatcggctttcgctgcacccagcactgattccgaccagggcacccccttcagagctagggacgaacagcagtgtgctcccacctcagggccttgcctctgcggcctccacttggaaagttctcagttccctccaggcttctagaagcatctgggccagggctcatggctggataatttccctaggcttaacaacccaagcaagcttcgcatcctcgttttatttttggttaaacttatgaaaatgtattaagaaagagtgcagctcgagagagattcagagatggaacacaccagaccccagatcacaaagccaaccatgcccagcccctcccagcacccccagccccacgaccatcgttctgaattctgacgacaccgtgagcctgcctttgtacttcaaactcatggaaggataaccaccttcatgttttgaaataaatgtttcctgttgaaatg

SEQ ID NO: 296808 - protein, 293 aa, Artificial Sequence
  derived and/or modified sequence
MGPPSACPHRECIPWQGLLLTASLLTFWNAPTTAWLFIASAPFEVAEGENVHLSVVYLPENLYSYGWYKGKTVEPNQLIAAYVIDTHVRTPGPAYSGRETISPSGDLHFQNVTLEDTGYYTLQVTYRNSQIEQASHHLRVYESVAQPSIQASSTTVTEKGSVVLTCHTNNTGTSFQWIFNNQRLQVTKRMKLSWFNHMLTIDPIRQEDAGEYQCEVSNPVSSNRSDPLKLTVKSDDNTLGILIGVLVGSLLVAALVCFLLLRKTGRASDQSDFREQQPPASTPGHGPSDSSIS

SEQ ID NO: 296809 - DNA, 882 bp, Artificial Sequence
  derived and/or modified sequence
atgggcccccccagcgcctgcccccacagagagtgcatcccctggcagggcctgctgctgaccgccagcctgctgaccttctggaacgcccccaccaccgcctggctgttcatcgccagcgcccccttcgaggtggccgagggcgagaacgtgcacctgagcgtggtgtacctgcccgagaacctgtacagctacggctggtacaagggcaagaccgtggagcccaaccagctgatcgccgcctacgtgatcgacacccacgtgagaacccccggccccgcctacagcggcagagagaccatcagccccagcggcgacctgcacttccagaacgtgaccctggaggacaccggctactacaccctgcaggtgacctacagaaacagccagatcgagcaggccagccaccacctgagagtgtacgagagcgtggcccagcccagcatccaggccagcagcaccaccgtgaccgagaagggcagcgtggtgctgacctgccacaccaacaacaccggcaccagcttccagtggatcttcaacaaccagagactgcaggtgaccaagagaatgaagctgagctggttcaaccacatgctgaccatcgaccccatcagacaggaggacgccggcgagtaccagtgcgaggtgagcaaccccgtgagcagcaacagaagcgaccccctgaagctgaccgtgaagagcgacgacaacaccctgggcatcctgatcggcgtgctggtgggcagcctgctggtggccgccctggtgtgcttcctgctgctgagaaagaccggcagagccagcgaccagagcgacttcagagagcagcagccccccgccagcacccccggccacggccccagcgacagcagcatcagctag

SEQ ID NO: 296810 - DNA, 882 bp, Artificial Sequence
  derived and/or modified sequence
atgggtcccccgtctgcttgccctcaccgcgaatgtatcccatggcagggattgcttctcaccgcttcccttttaacgttctggaacgctccaacgactgcatggctttttatagcttctgcaccattcgaggtagcagaaggcgagaatgtgcacctctcggttgtctacttgcccgagaacctgtattcgtatggttggtacaaggggaagacagtcgagcccaaccagctcattgccgcctatgtcatagatacacacgtccggacacccggtccggcttactccgggcgggagactatttccccctctggtgatttgcatttccagaatgtgacgctggaagacacgggatattacacattgcaagtgacatacagaaatagccaaatcgagcaagcaagccatcatctgagggtatacgaaagcgttgcccagcccagcatacaagcaagctctacaaccgtgacggagaaggggagcgtcgtgctgacctgccacactaataacaccggtaccagctttcagtggatcttcaataaccagaggctgcaggtgacaaaacgaatgaagctgagttggttcaaccacatgctgacaattgaccccatcaggcaggaggatgcgggagaatatcagtgcgaagtcagtaatccagtctcaagcaatagatctgatccactaaagctgactgttaagagcgacgataatacgctgggcatactgatcggagtattggttggaagcctcctcgtggctgccctggtgtgcttcttacttctgcgcaagacagggagagcgtcggaccaatcagacttcagagaacagcaaccaccagcgtccactcccggacacggcccgtcagacagctccataagttag

SEQ ID NO: 296811 - DNA, 882 bp, Artificial Sequence
  derived and/or modified sequence
atgggccccccatctgcctgcccccaccgggagtgcatcccctggcagggcctgctgctgacagccagcctgctgaccttctggaatgcccccaccacagcctggctgttcatcgccagcgccccctttgaggtggccgagggagaaaatgtgcacctgtctgtggtgtacctgcctgagaacctgtacagctatggctggtacaagggcaagacagtggagcccaaccagctgattgctgcctacgtgattgacacccacgtgaggaccccaggccctgcctacagcggccgggagaccatcagccccagcggggacctgcacttccagaatgtgaccctggaggacaccggctactacaccctgcaggtgacctacagaaacagccagatcgagcaggccagccaccacctgcgggtgtatgaatctgtggcccagcccagcatccaggccagcagcaccaccgtgacagagaagggctctgtggtgctgacctgccacaccaacaacacaggcaccagcttccagtggatcttcaacaaccagaggctgcaggtgaccaagaggatgaagctgtcctggttcaaccacatgctgaccatcgaccccatccggcaggaggatgctggggagtaccagtgtgaggtgagcaaccctgtgagcagcaacagaagtgaccccctgaagctgactgtgaagagtgatgacaacaccctgggcatcctgattggagtgctggtgggcagcctgctggtggccgccctggtgtgcttcctgctgctgaggaagacaggccgggccagtgaccagagcgacttccgggagcagcagcccccagccagcaccccaggccacggccccagcgacagcagcatctcctag

SEQ ID NO: 296812 - DNA, 882 bp, Artificial Sequence
  derived and/or modified sequence
atgggcccccccagcgcctgcccccaccgggagtgcatcccctggcaaggcctgttgttgacagcttctctgttgactttttggaatgctcccacaacggcttggttgttcatagcatcagcaccattcgaggtggcagagggcgagaatgtgcatttaagcgtggtttacctgccagaaaatctctactcctacggttggtataagggaaagactgtggaacccaaccaactgatagcagcctacgtgatcgatacacacgtgaggaccccaggccctgcctatagcggcagggagaccatatctccgagcggtgatcttcattttcagaacgtcacactggaagacacgggttattatacactccaagtgacctaccgaaattcccaaatcgaacaagcttcccaccacctccgagtttatgagtcagttgcacaacctagtatccaagcttctagtactaccgtaaccgagaagggatctgtcgtgctaacctgccacaccaataacactggtactagctttcaatggattttcaacaatcagaggttacaagtgactaagagaatgaagctttcgtggtttaaccatatgttaacaattgatccgatacgacaggaggacgcgggagaataccagtgcgaggttagcaacccagtctccagcaatcgctcagaccctcttaagctgaccgtcaagtctgatgataacacattgggcatcttgattggtgtcttggtgggaagtcttctggtagccgccctggtgtgttttctgctcctgcgtaaaacaggacgggcatccgatcagagcgacttcagggagcagcagcctcccgcctcaacacccggacatggccctagcgactctagcatttcatag

SEQ ID NO: 296813 - DNA, 882 bp, Artificial Sequence
  derived and/or modified sequence
atggggcctccatcagcttgtccccatagggaatgcataccatggcagggtctgttgctgacagcaagcttgcttactttctggaacgctccaactactgcgtggctgtttattgccagcgctccatttgaagtcgctgagggggagaacgtacatctcagtgtggtgtatctgcccgaaaatctgtatagctacggctggtataagggcaagaccgtcgagcctaatcagctgatcgccgcatacgttattgatacccacgttagaacccctggccctgcgtatagcggacgggagacaatcagtccgtcaggagatttacactttcagaatgtaacattggaggacacaggttactacacccttcaagtgacctacaggaacagtcagatagaacaagcaagtcatcacctgagggtttacgagtccgtggcccagccaagtattcaggcctcgagtaccaccgtcacagaaaaaggaagcgttgtgctgacgtgccacacgaacaacacagggacttcatttcagtggatttttaataatcagcgcctgcaggtcacaaagaggatgaagcttagctggtttaaccacatgttgactatcgaccccataagacaggaggacgccggagaatatcaatgtgaggtctccaatcctgtgagcagcaatcgatcagaccctctgaaactcacagtcaaatcggacgacaacacccttgggattctcattggcgtgctcgtgggctctctgctcgtagccgctctggtttgcttcctgttgctgagaaaaacgggacgcgcatctgatcagagcgattttagggagcaacagcccccagctagtacacccggacatggtccctccgacagcagtatttcctag

SEQ ID NO: 296814 - DNA, 1008 bp, Artificial Sequence
  derived and/or modified sequence
ggaggacagagcaggcagcagagaccatggggcccccctcagcttgtccccacagagaatgcatcccctggcaggggctcttgctcacagcctcacttttaactttctggaacgcacccaccactgcctggctctttattgcatcagcgccctttgaagttgctgaaggggagaatgttcatctctctgtggtttatctgcccgagaatctttacagctatggctggtacaaagggaaaacggtggagcccaaccagctaatcgcagcatatgtaatagacactcacgttaggactccagggcctgcatacagcggtcgagagacaatatcacccagtggagatctgcatttccagaacgtcaccctagaggacacgggatactacaccctacaagtcacatacagaaattctcagattgaacaggcatctcaccatctccgtgtatacgagtcagtggctcagccctccatccaagccagcagcaccacagtcacagagaagggctccgtggtcctgacctgccacacaaataacactggaacctctttccagtggattttcaacaaccagcgtctgcaggtcacgaagaggatgaagctgtcctggtttaaccatatgctcaccatagaccccatcaggcaggaggacgctggggagtatcagtgtgaggtctccaacccagtcagctccaacaggagcgaccccctcaagctgactgtaaaatcagatgacaacactctaggcatcctgatcggggtcctggttgggagtcttctggtggctgcacttgtgtgtttcctgctcctccgaaaaactggcagggccagcgatcagagtgacttcagggagcagcagcccccagcctccacccccggccatggaccctctgacagctccatctcctaggaattgctacactctgacacaaacatttactgctggatcgaccacaaagcagatgtggcttcttaggttcctctgggagctgctcctgtgggttgatgga

SEQ ID NO: 296815 - DNA, 90 bp, Artificial Sequence
  derived and/or modified sequence
atggcagggcgtgttcctagccttctggtattactggtgttcccctctagctgcctggcgtttaggagccccctctccgtttttaagtag

SEQ ID NO: 296816 - protein, 292 aa, Artificial Sequence
  derived and/or modified sequence
MGPPSACPHRECIPWQGLLLTASLLTFWNAPTTAWLFIASAPFEVAEGENVHLSVVYLPENLYSYGWYKGKTVEPNQLIAAYVIDTHVRTPGPAYSGRETISPSGDLHFQNVTLEDTGYYTLQVTYRNSQIEQASHHLRVYESVAQPSIQASSTTVTEKGSVVLTCHTNNTGTSFQWIFNNQRLQVTKRMKLSWFNHMLTIDPIRQEDAGEYQCEVSNPVSSNRSDPLKLTVKYDNTLGILIGVLVGSLLVAALVCFLLLRKTGRASDQSDFREQQPPASTPGHGPSDSSIS

SEQ ID NO: 296817 - DNA, 879 bp, Artificial Sequence
  derived and/or modified sequence
atgggcccccccagcgcctgcccccacagagagtgcatcccctggcagggcctgctgctgaccgccagcctgctgaccttctggaacgcccccaccaccgcctggctgttcatcgccagcgcccccttcgaggtggccgagggcgagaacgtgcacctgagcgtggtgtacctgcccgagaacctgtacagctacggctggtacaagggcaagaccgtggagcccaaccagctgatcgccgcctacgtgatcgacacccacgtgagaacccccggccccgcctacagcggcagagagaccatcagccccagcggcgacctgcacttccagaacgtgaccctggaggacaccggctactacaccctgcaggtgacctacagaaacagccagatcgagcaggccagccaccacctgagagtgtacgagagcgtggcccagcccagcatccaggccagcagcaccaccgtgaccgagaagggcagcgtggtgctgacctgccacaccaacaacaccggcaccagcttccagtggatcttcaacaaccagagactgcaggtgaccaagagaatgaagctgagctggttcaaccacatgctgaccatcgaccccatcagacaggaggacgccggcgagtaccagtgcgaggtgagcaaccccgtgagcagcaacagaagcgaccccctgaagctgaccgtgaagtacgacaacaccctgggcatcctgatcggcgtgctggtgggcagcctgctggtggccgccctggtgtgcttcctgctgctgagaaagaccggcagagccagcgaccagagcgacttcagagagcagcagccccccgccagcacccccggccacggccccagcgacagcagcatcagctag

SEQ ID NO: 296818 - DNA, 879 bp, Artificial Sequence
  derived and/or modified sequence
atgggaccaccgtcggcctgtccgcacagggagtgtattccctggcaggggctcctcttgactgcatccctgctcacattttggaacgccccaacaactgcttggctgttcatcgctagtgctcctttcgaggtggctgagggagagaacgtgcacctgagcgtcgtttatttaccagagaacctatacagttatggttggtataaggggaagacggtcgagcctaatcagctgattgctgcatatgtcatcgatacccacgtgagaaccccagggcctgcttactccggccgggaaacaatcagcccttccggagacttgcatttccaaaatgttacactcgaagatacaggctactacacgctccaggttacttaccgaaactcgcagattgagcaggcttcacaccacctgcgcgtctacgagagcgtggcccagccctctatccaggcctcttcaacaactgttacagagaaggggagtgtggtccttacatgtcacaccaataacaccggcactagttttcagtggatcttcaataatcaacgtctgcaggtcaccaagcgcatgaagttaagttggtttaatcatatgctgaccatcgatccgatcaggcaagaggacgccggggaatatcagtgcgaggtgtccaatcctgtttcctcaaaccggagtgaccccttgaagctgactgtgaagtatgacaatactctggggattctgatcggcgtgctcgtggggtccttgctcgtggccgcactcgtttgttttctgctcctcagaaagaccggacgggcctcagaccagagcgacttccgggaacagcagcctccggcatccacccccggacacggaccttcggattcttcaatatcttag

SEQ ID NO: 296819 - DNA, 879 bp, Artificial Sequence
  derived and/or modified sequence
atgggccccccatctgcctgcccccaccgggagtgcatcccctggcagggcctgctgctgacagccagcctgctgaccttctggaatgcccccaccacagcctggctgttcatcgccagcgccccctttgaggtggccgagggagaaaatgtgcacctgtctgtggtgtacctgcctgagaacctgtacagctatggctggtacaagggcaagacagtggagcccaaccagctgattgctgcctacgtgattgacacccacgtgaggaccccaggccctgcctacagcggccgggagaccatcagccccagcggggacctgcacttccagaatgtgaccctggaggacaccggctactacaccctgcaggtgacctacagaaacagccagatcgagcaggccagccaccacctgcgggtgtatgaatctgtggcccagcccagcatccaggccagcagcaccaccgtgacagagaagggctctgtggtgctgacctgccacaccaacaacacaggcaccagcttccagtggatcttcaacaaccagaggctgcaggtgaccaagaggatgaagctgtcctggttcaaccacatgctgaccatcgaccccatccggcaggaggatgctggggagtaccagtgtgaggtgagcaaccctgtgagcagcaacagaagtgaccccctgaagctgactgtgaagtatgacaacaccctgggcatcctgattggagtgctggtgggcagcctgctggtggccgccctggtgtgcttcctgctgctgaggaagacaggccgggccagtgaccagagcgacttccgggagcagcagcccccagccagcaccccaggccacggccccagcgacagcagcatctcctag

SEQ ID NO: 296820 - DNA, 879 bp, Artificial Sequence
  derived and/or modified sequence
atgggcccccccagcgcctgcccccaccgggagtgcatcccctggcaaggactccttctcactgccagcctgctgacgttttggaatgcaccaaccacagcatggttatttatcgccagtgcacccttcgaagttgcggagggcgaaaacgtgcatctcagtgtcgtgtacttacccgagaacctttactcttacggctggtataaaggcaaaacagtcgaaccaaatcagttgatcgccgcttatgtgatcgatacccacgtgagaactccaggccccgcttactcaggacgggaaactattagcccatcaggagatctccactttcaaaatgtgacactggaagatacggggtactatacgttgcaggtgacctatcggaactcccaaattgagcaggcctcccaccacctgcgagtgtatgagagcgtggctcagccttcaattcaggcctcgagcacaactgttactgagaagggaagtgtggtcctgacatgccacactaataatacgggtaccagctttcagtggatctttaataaccagcgtttacaggttacaaaacgtatgaaactcagctggttcaaccacatgctgacgattgatcctatcagacaggaggacgccggcgaataccagtgcgaagtcagcaaccctgtgagtagtaatcgaagcgacccattgaagctgactgtaaagtacgacaatacactgggtatattgattggggtgttagtgggttcacttctcgttgcggctttggtgtgttttctgctcctgcgcaaaaccgggcgagcttccgaccagtctgacttccgggagcagcagccgcccgcctccaccccgggccacggcccttccgacagctccatctcgtag

SEQ ID NO: 296821 - DNA, 879 bp, Artificial Sequence
  derived and/or modified sequence
atgggcccaccttccgcgtgtccccatagagaatgcatcccttggcagggactcctgctcacagctagtctcctgacgttctggaatgccccaacgactgcttggctgttcattgcaagcgccccattcgaagtggcagaaggcgaaaacgtgcacctgtccgtggtctatctccctgagaatttgtattcctatgggtggtataaggggaaaacagtggagcctaatcagttgatcgccgcatatgtcatcgacacccacgtcaggacaccaggacccgcttatagcggcagggagacaatttccccttccggagatctgcatttccagaacgtaaccctggaggacaccggctactatacactgcaggtgacttacagaaactcccagattgaacaggcttcccaccatttacgggtctacgaatccgtggcacagccatccatccaggcttcatctactaccgtgaccgagaaagggtccgtagtccttacttgtcacaccaacaataccggaactagttttcagtggatttttaataaccagcgtttacaggtgactaaacgaatgaaactgtcatggttcaaccatatgctaaccatagatccaatccgccaggaggacgcaggagagtaccagtgtgaggtttccaaccccgttagctccaatcgatcagaccccttgaagttgaccgtcaagtatgacaatactcttggcatcctgatcggagtcctggtcggcagcctgctggtggcagcgttagtatgcttcctattgctgcggaagaccggacgtgccagcgaccagagtgacttccgcgagcaacaaccacctgcttccacacctgggcacggtccctccgactcttctatatcgtag

SEQ ID NO: 296822 - DNA, 1300 bp, Artificial Sequence
  derived and/or modified sequence
ctcctctccacagaggaggacagagcaggcagcagagaccatggggcccccctcagcttgtccccacagagaatgcatcccctggcaggggctcttgctcacagcctcacttttaactttctggaacgcacccaccactgcctggctctttattgcatcagcgccctttgaagttgctgaaggggagaatgttcatctctctgtggtttatctgcccgagaatctttacagctatggctggtacaaagggaaaacggtggagcccaaccagctaatcgcagcatatgtaatagacactcacgttaggactccagggcctgcatacagcggtcgagagacaatatcacccagtggagatctgcatttccagaacgtcaccctagaggacacgggatactacaccctacaagtcacatacagaaattctcagattgaacaggcatctcaccatctccgtgtatacgagtcagtggctcagccctccatccaagccagcagcaccacagtcacagagaagggctccgtggtcctgacctgccacacaaataacactggaacctctttccagtggattttcaacaaccagcgtctgcaggtcacgaagaggatgaagctgtcctggtttaaccatatgctcaccatagaccccatcaggcaggaggacgctggggagtatcagtgtgaggtctccaacccagtcagctccaacaggagcgaccccctcaagctgactgtaaaatatgacaacactctaggcatcctgatcggggtcctggttgggagtcttctggtggctgcacttgtgtgtttcctgctcctccgaaaaactggcagggccagcgatcagagtgacttcagggagcagcagcccccagcctccacccccggccatggaccctctgacagctccatctcctaggaattgctacactctgacacaaacatttactgctggatcgaccacaaagcagatgtggcttcttaggttcctctgggagctgctcctgtgggttgatggagcgtccctgaagcccccagccctggggatggggaaggacatggagcctgagccagagaaccagctctgagtcctgaggagacacaggcctggggacaggaagggatgggggtccctgctgaatatatagagacctcaacagactgccccgggctctgggtgggccaaggcgaaggcttcccatcaccacaggaagcgggggcttgcagggaaagtgaatgggcctatggcccacccggggtcacctggaaaggatctgaataaaggggaaacttcctctca

SEQ ID NO: 296823 - protein, 400 aa, Artificial Sequence
  derived and/or modified sequence
MFPSVRVKVKGLDPGKQYHVAIDVVPVDSKRYRYVYHSSQWMVAGNTDHLCIIPRFYVHPDSPCSGETWMRQIISFDRMKLTNNEMDDKGHIILQSMHKYKPRVHVIEQGSSVDLSQIQSLPTEGVKTFSFKETEFTTVTAYQNQQITKLKIERNPFAKGFRDTGRNRGVLDGLLETYPWRPSFTLDFKTFGADTQSGSSGSSPVTSSGGAPSPLNSLLSPLCFSPMFHLPTSSLGMPCPEAYLPNVNLPLCYKICPTNFWQQQPLVLPAPERLASSNSSQSLAPLMMEVPMLSSLGVTNSKSGSSEDSSDQYLQAPNSTNQMLYGLQSPGNIFLPNSITPEALSCSFHPSYDFYRYNFSMPSRLISGSNHLKVNDDSQVSFGEGKCNHVHWYPAINHYL

SEQ ID NO: 296824 - protein, 463 aa, Artificial Sequence
  derived and/or modified sequence
MLVTLRASQEEDDDADDFESDYEEESYHLAPEEVNKAPVFVPVGLRSPEPVSAQIEETMEELEITVNVPDVGCIAVVEHELPNTDVTTEEMKQEENLSVPFEMTTSEHIQDEPGTNDGSTEAAITLLTMGDLVLQSEISSEQGDGVCIIPHVHSKDKSHIPSSLDNVNHKIVHECQELSSPVITTSPASFEENKIVLEEQSSREEISLMEKVKENATPTRNTISKVTSNLRIRSRLAKPKPNLEKTLGTNRLDDYQEVSSLCVTKGAEMETQRETEKNASKATELENKNLGPVTTAENKDQSKLACVHGIKGTSISSEVNLTERNENQEESSQEVHMLSVAPVASSETGPCTLGLDRGLGENSVEEPQIKDSKGDSVLTLPVPEYTPTSIPEVQQENIINPQDLTVFVYQQLQLVKMPWVYLFLEEIILKSRLIIWILYLGRDFNAGLIKMTTFLLPKNVHSL

SEQ ID NO: 296825 - DNA, 1392 bp, Artificial Sequence
  derived and/or modified sequence
atgctggtcactctcagggcctcccaagaggaggacgacgacgccgatgattttgagagcgactacgaggaggagtcttaccatctcgctccggaggaggtcaataaagcacctgttttcgtgccggttggcctacgcagcccggaacctgtcagtgcccagatagaggagacaatggaggagcttgagattaccgtgaacgtcccggacgtgggctgcattgcagttgtagagcacgagctgcccaacaccgatgtaacaaccgaggaaatgaagcaggaggagaacctaagcgttccttttgagatgaccacctccgaacatatccaggatgaaccaggcacaaacgacggatcaacagaggccgcgataacccttctgaccatgggcgatctagttctccagagtgaaatcagctctgaacagggcgacggcgtgtgtataatcccacatgtacattctaaagacaaatcgcacatcccgtcaagtctcgataacgtcaaccataagattgtgcacgagtgccaggagctcagcagcccagtgatcactacaagcccggcgagcttcgaggaaaacaaaatcgttttggaagaacagtcatcccgcgaagaaatctctctgatggagaaggtgaaagaaaacgccacaccgacacgcaacacaatttctaaggtgacctctaaccttaggatacggtctaggctcgccaaaccgaagccaaatctagagaagaccttgggtaccaaccgcttagacgactaccaggaggtgagcagcctgtgcgtaacaaagggcgccgagatggagacccagcgcgaaaccgagaagaacgcttccaaagccactgagcttgagaataaaaaccttggaccagtcacaactgccgaaaacaaggaccagtccaagttagcgtgcgtccacggaattaagggtacctcgatttcctctgaagtgaatttgaccgagcgaaacgagaatcaggaggagtcgtcacaggaggttcacatgctaagtgtagcaccagtggcatctagcgagacaggcccttgcacacttggtcttgaccgaggcctgggcgaaaattccgtggaggagcctcagataaaggactcaaagggtgactctgttctcaccctgcctgtgccagaatacacccccacttctattccagaagtgcagcaggagaacatcatcaacccccaagacctgactgtgttcgtgtatcagcaactgcagctcgtgaaaatgccctgggtgtacctgtttctggaagagataattctgaagagcagactgattatctggatcctctacctaggaagagatttcaacgctggcttgattaagatgactacattcttactgcccaaaaacgtgcatagcttgtag

SEQ ID NO: 296826 - DNA, 1392 bp, Artificial Sequence
  derived and/or modified sequence
atgctggtgacgctgcgggcaagccaagaggaggacgatgacgccgacgactttgaatctgactatgaagaagaaagctaccacctggcccctgaagaagtcaacaaggcaccagtcttcgtgcccgtgggtctgcggagcccagaaccagttagtgcccaaatcgaggagactatggaggaactagagatcaccgtgaacgtgcctgacgtcggatgtatcgccgtagttgagcacgaattgcctaatactgacgtgacaacggaggagatgaagcaggaggaaaatctgagcgtgcccttcgaaatgaccacttccgaacatatacaagacgaacctggcactaacgatgggagcactgaggcggctattaccctgctaaccatgggggacctagttcttcagagcgaaatctcaagcgagcagggagacggcgtctgcattattccacatgtgcattcgaaagacaaatcacatatcccatcgagcctggataacgtcaaccataagattgtacatgagtgccaggaactgagctcccctgtcatcacaaccagtccagctagctttgaagagaacaagattgtcctggaggagcagtctagcagggaagagatcagcctgatggagaaagtgaaagagaatgcaacgcccacccgaaacactatttcgaaagttacgtcgaacctccgcattcggtcccggctggcgaaacccaagccaaatttagagaagaccttaggcaccaataggctggacgattaccaggaggtctccagcctgtgcgtgacaaagggagctgaaatggaaacccagcgggaaacagaaaaaaacgcttctaaagccactgaacttgagaataagaacttgggtcctgtcaccaccgctgagaataaagaccagtcaaaactcgcgtgcgtgcacgggattaagggcacgagcatcagttctgaggtcaacctcaccgagcgcaatgaaaaccaagaagagtcgtctcaggaggtgcatatgttgtcagtggcacccgtggccagttcagagacagggccatgcacactgggtcttgacagagggttgggcgagaatagcgtcgaggagccccagatcaaagacagcaagggcgacagcgtgctgactctgccagtgcccgagtatacacctacaagcattcctgaagtgcaacaagagaatataattaaccctcaggacctgacagtatttgtgtaccagcagctccagctagtgaagatgccctgggtttatctgtttctggaagaaattattctgaaaagtagacttatcatatggattctctacctggggcgagacttcaacgctggattgataaagatgacaactttccttctgccgaagaatgtccacagtctttag

SEQ ID NO: 296827 - DNA, 1392 bp, Artificial Sequence
  derived and/or modified sequence
atgctggtgaccctgcgggccagccaggaggaggatgatgatgctgatgactttgaaagtgactatgaggaggagagctaccacctggcccctgaggaggtgaacaaggcccctgtgtttgtgcctgtgggcctgcggagccctgagcctgtgtctgcccagatcgaggagaccatggaggagctggagatcaccgtgaatgtgcctgatgtgggctgcatcgctgtggtggagcacgagctgcccaacacagatgtgaccacagaggagatgaagcaggaggagaacctgtctgtgccctttgagatgaccaccagcgagcacatccaggatgagcccggcaccaatgatggcagcacagaggccgccatcaccctgctgaccatgggagacctggtgctgcagagcgagatcagcagcgagcagggagatggagtgtgcatcatcccccacgtgcacagcaaggacaagagccacatccccagcagcctggacaacgtgaaccacaagatcgtgcatgagtgccaggagctgagcagccctgtgatcaccaccagccctgccagctttgaggagaacaagatcgtgctggaggagcagagcagccgggaggagatcagcctgatggagaaggtgaaggaaaatgccacccccaccaggaacaccatcagcaaggtgaccagcaacctgcgcatccgcagccggctggccaagcccaagcccaacctggagaagaccctgggcaccaaccggctggatgactaccaggaggtgagcagcctgtgtgtgaccaagggagctgagatggagacccagcgggagacagagaagaatgccagcaaggccacagagctggagaacaagaacctgggccctgtgaccacagctgagaacaaggaccagagcaagctggcctgtgtgcacggcatcaagggcaccagcatcagcagcgaggtgaacctgacagaaagaaatgaaaaccaggaggagagcagccaggaggtgcacatgctgtctgtggcccctgtggccagcagcgagaccggcccctgcaccctgggcctggaccggggcctgggagaaaattctgtggaggagccccagatcaaggacagcaaaggagacagcgtgctgaccctgcctgtgcctgagtacacccccaccagcatccctgaggtgcagcaggagaacatcatcaacccccaggacctgactgtgtttgtgtaccagcagctgcagctggtgaagatgccctgggtgtacctgttcctggaggagatcatcctgaagagccgcctcatcatctggatcctgtacctgggccgggacttcaatgccggcctcatcaagatgaccaccttcctgctgcccaagaatgtgcacagcctgtag

SEQ ID NO: 296828 - DNA, 1392 bp, Artificial Sequence
  derived and/or modified sequence
atgctggtgaccctgcgggccagccaggaggaggacgacgacgccgacgattttgaatctgactatgaggaggagtcatatcatcttgcacccgaagaggtcaacaaggcacccgttttcgtgcccgtcggattgcggtctcccgagcctgtgtctgctcagattgaggagactatggaggaactggagatcaccgtgaatgtgcctgacgtgggttgtatcgccgtcgttgagcatgagctgcctaatactgacgtgaccacggaagagatgaagcaggaagaaaatttgtccgttccatttgaaatgactaccagcgagcacatacaggatgagccaggaacaaacgacggatctactgaagccgcaattaccttgctgacaatgggagacctggtgcttcagtctgagatttcttcagaacagggagacggcgtctgcataatcccacatgtgcatagtaaggacaagagccacataccaagttcactggataacgtcaaccacaaaattgttcacgagtgccaggaattatccagtcctgttataaccactagccccgcatcgttcgaagagaataagattgtgctagaggagcagtcgtctagagaggaaatttcgctgatggagaaagtcaaagaaaacgcaacccctactagaaacacgatctcaaaagtcacgtccaacctccggattcgttccagattggcaaagcccaagcctaatctggaaaagacactggggacgaatcgcttggatgattaccaggaggtgtcgtccctgtgcgtaaccaaaggggctgagatggaaactcaaagggagacggagaagaacgcgagcaaggcaaccgagctggaaaataagaatttgggccccgtcacaactgcggaaaacaaagaccagagtaaactcgcttgcgtgcatggaatcaagggcacgagtatttcatccgaagtgaatctgaccgagcgtaacgagaaccaagaggagtcctcgcaagaggtacacatgctgagtgttgcacccgttgcttcatcagagactggcccatgtaccctagggctagacagagggctgggcgaaaactccgtggaggagcctcagatcaaagattcaaaaggagatagcgtattaaccctaccagttcctgagtatacgccaacaagtattccggaagtgcagcaggaaaatatcatcaatcctcaagacctgacagtgtttgtgtaccagcagctccagctcgtaaagatgccatgggtttacttatttctcgaggagatcatactgaaaagtagactgatcatttggatcctatacttaggtagggatttcaacgcaggattgattaagatgactacttttctcctgcctaaaaacgtgcattcactgtag

SEQ ID NO: 296829 - DNA, 1392 bp, Artificial Sequence
  derived and/or modified sequence
atgctggtgaccctgcgggccagccaggaggaggacgacgacgccgacgactttgagtcagactacgaagaggagagctaccatctcgccccagaggaggtgaacaaggcacctgtgttcgtcccagtgggactgcggagcccagaacctgtgtcagctcaaattgaggagacgatggaagaactggagataacagtcaacgtgcccgacgtgggatgcatcgccgtggtggaacatgaactgccgaatactgatgtgacgaccgaggaaatgaagcaggaagagaatctgtccgtgcccttcgaaatgactacaagtgaacacattcaggacgagcccggcacaaacgacggaagcacggaagcggccatcacactgctgacaatgggcgacctcgtgctgcagagcgagatatcgtccgaacaaggagacggcgtgtgtatcatcccccacgtccacagcaaggacaagagccatatcccttccagtctcgacaatgtcaaccataagatagtgcacgagtgtcaggagctctctagccccgtgattacaacatctccagcttcatttgaggagaacaagattgttttagaggagcagtctagcagagaggaaatttctttaatggaaaaagtaaaagagaacgctacccctacaaggaacaccatatcgaaagtgactagtaatctgcggatacggtcacgtttggccaagccaaaacctaatctggaaaaaactctgggtaccaacagactagatgattatcaggaagtaagttctctatgcgtgactaagggcgctgaaatggagacacagcgggagaccgaaaaaaacgcctcgaaagccaccgaactggagaataaaaatctgggacccgtgactacagcagagaacaaggatcagagcaagcttgcgtgcgttcacggcatcaagggtacctcaatctcaagtgaggtgaaccttacagaacggaacgagaaccaagaagaatcatcacaggaggtccacatgctgtctgtagcgccagttgctagttccgaaaccggcccctgcactctcggcctggatagaggcttgggcgagaattcggtggaagagccccaaatcaaggactctaagggagatagtgtgttaacccttcctgtaccagagtacacaccaacttccattcctgaggtacagcaggagaacatcattaatcctcaggatttgaccgtgttcgtataccagcagctgcagcttgtcaagatgccgtgggtctacttgttcctcgaagagattatcctgaagagtagattgatcatctggatcctatatctggggagggatttcaacgcagggctcatcaagatgactacctttctcctcccaaagaacgtccacagcctgtag

SEQ ID NO: 296830 - DNA, 1392 bp, Artificial Sequence
  derived and/or modified sequence
atgctagttaccttaagggcaagtcaggaggaggacgacgatgctgatgatttcgagtccgactacgaggaggaatcttaccacttggcaccggaagaagtaaacaaagcccctgtgtttgtgccagtcgggttgcgatcaccagagcccgtgtctgctcagattgaggaaacaatggaagagctggaaattacggtcaatgtgcctgatgtggggtgtatcgctgtggtcgaacatgaactccctaacactgatgttacaacggaggagatgaaacaggaggagaacttaagcgttccatttgaaatgactactagcgagcacattcaggacgagcctggtactaatgacggtagtaccgaagccgctattactttgttgacaatgggcgatctggtcctccagtccgaaatttcctccgaacagggagatggagtttgcatcattccacacgtgcatagtaaagataagtctcacatcccttcaagcctggataatgtcaaccacaaaatcgtccacgagtgccaggaactcagctcacccgtgattacgacctcccctgcctcatttgaggagaataaaatagtattagaagaacagtcctctagggaagaaatctcgctcatggaaaaagtgaaagaaaatgccactcccaccaggaacacaatatccaaagttacctcaaacctgaggatacgcagtaggcttgccaaaccgaagcctaatctggagaagaccctcggcaccaaccggctggacgactaccaggaagttagtagcttgtgcgtcacaaagggggctgagatggaaacccaaagagagacagaaaaaaatgcctccaaagcaacggagctcgaaaacaaaaatttgggccctgtcacgactgctgaaaacaaggatcaatccaagcttgcatgtgtgcatggcatcaagggcaccagtattagctcagaagtgaatttgaccgagcgaaacgagaaccaggaggagagtagccaggaggtgcacatgctgagcgtcgccccagtggcctccagcgaaaccggcccatgcactctcggactggaccgcggtctgggcgaaaactctgtagaggaacctcagatcaaggattctaaaggtgactctgtgctcacactcccagtgccagagtatacccctacgtccatcccagaagtgcagcaagagaacatcatcaatcctcaggacctcactgtctttgtttaccaacagctccagctagtaaagatgccatgggtgtatctcttcctcgaggaaattatcctgaagtctaggctcatcatttggatcttgtatctgggcagagactttaatgctggtcttattaagatgaccacctttcttcttcctaaaaacgtccactctttgtag

SEQ ID NO: 296831 - DNA, 1392 bp, Artificial Sequence
  derived and/or modified sequence
atgttggtaacactacgcgcttctcaggaagaggatgatgatgcagacgacttcgaatcagactacgaagaggagtcctaccacctggccccagaagaggttaacaaggcaccagtgtttgtgccagtggggctgcgctcccccgaacccgtgtctgctcagattgaagaaaccatggaagaattagagataaccgtcaatgtgcctgacgtgggatgtatcgccgttgtggaacatgagctcccgaatacggatgtgactactgaggagatgaagcaggaggaaaatttgtctgttcccttcgagatgacaactagtgaacacattcaggatgaacccggaaccaacgacggtagcactgaggctgctattactctgctgaccatgggcgacctagtcctgcagagcgaaatcagctcggaacagggcgacggcgtgtgcattatcccacacgtgcactcgaaagacaaatcccacatcccctcctccctggataatgtgaaccacaagatagtccatgagtgccaagaattatctagcccggtgataacaacaagccccgcttcgtttgaggagaataagatcgtgcttgaggaacagtcctcacgagaggagatctccctaatggaaaaagtgaaggaaaacgccactccaaccaggaataccatctccaaagtgacgagcaatctcaggatccggagcagactggcaaagcccaaaccaaacctcgagaaaacattaggtactaatagactggatgactatcaggaggtgtccagtctttgtgttacaaaaggcgctgagatggagactcagcgggaaacggaaaagaatgcttccaaggctactgagctggaaaataagaacctcggaccagttaccacagccgaaaataaagaccagagtaaattggcatgtgtgcacgggattaaaggaacctctatatccagtgaagtgaatctgaccgagcgcaatgaaaaccaagaggaaagctcccaggaagtccatatgttatctgttgcaccggtcgcgtcgagtgagaccggcccttgcacactgggcctcgaccgcggattgggcgagaacagtgtcgaggagccacagatcaaggacagcaagggagattcagtgctgacgctgccggttcccgaatacacccctacctccatccctgaagtgcagcaggagaacattatcaacccccaggacttaacggtcttcgtctatcagcaactgcagctggtcaaaatgccttgggtctaccttttcctcgaggagatcattctgaagtcgcggctgattatttggatcctctacctgggcagggactttaacgcgggtctgattaaaatgaccacctttttgctgcctaagaacgtacatagtctgtag

SEQ ID NO: 296832 - DNA, 5562 bp, Artificial Sequence
  derived and/or modified sequence
tgacaagaaggaaattccaaaaggctaagccaaatttgggaagagcacacagcaagaaaagattgtgtaggttccaaagagtctgctttggcaaaaatagatgcggaattagaagaagttggaccatcaagaagggttggagaggaaactgtaggagataattcaccatcttcagttgttgaagagcaatatctcaataaactaacaagctgtccacaaccgttaaacgaaacaagttactctaaaattgccctggatgggaaaacaactatctcttctacatctgagtatgagagaaatcgtggtgaaaggagaagtcataaaaagttcaaaccaaatgtcaccagaggtcgtggatcaaaacgagttcggggtaagacctctaagaaggaacctagagcttccaaggccatgctggtgactcttcgggcttcccaggaagaagatgatgatgctgacgattttgagtctgactatgaggaagaaagctatcatcttgctcccgaagaagtaaacaaagctccagtatttgtacctgttggtctcagatctcctgaacctgtttctgctcagattgaggaaacaatggaagagcttgaaataactgtgaatgtcccagatgtaggatgcatagctgttgttgaacatgagctaccaaacacagatgtgactactgaagaaatgaaacaagaagaaaatttgagtgtaccgtttgaaatgaccacaagtgaacatatccaagatgaaccaggtaccaatgatggaagcaccgaagctgcaataactttacttacaatgggagatctagtattgcagtcagagatcagtagtgaacagggtgatggagtatgtataattcctcatgttcattcaaaggataaaagccatattccttctagcctagataatgtaaatcacaaaattgttcatgaatgtcaggaactttcttcacctgtcattactacatctcctgcatcatttgaagaaaacaagattgtattggaggaacaaagttccagagaagaaataagtttaatggagaaagtaaaggagaatgctacaccaaccaggaatacaatttctaaagtgaccagtaatttgagaataagaagtaggcttgctaagcctaaaccaaatcttgagaagactttagggaccaacaggcttgatgattatcaggaagtttccagtttgtgtgtaaccaaaggggcagaaatggaaactcaaagagaaacagagaaaaatgcttccaaagcaacagaattggaaaataaaaacctcggaccagttacaacagcagagaataaggatcagagcaaattggcatgtgtacatggtatcaaagggaccagtatttcttcagaagtaaacctaactgaaagaaacgaaaatcaagaagagagctctcaggaggttcacatgttgtcagttgctccagttgcttcctctgagacagggccctgcacacttggtttggataggggtcttggtgaaaattctgttgaagagccccagataaaggactctaaaggagacagtgtgcttacacttcctgtgccagagtatacaccaacaagtattccagaagtccaacaagagaatataatcaatcctcaagacctaacagtatttgtttaccagcaacttcagttggtcaagatgccatgggtttatctatttctggaagagataattctaaaaagccgcctgataatttggatcttgtatctaggaagagatttcaatgcaggcttgataaaaatgaccacattcctcctgccaaaaaacgttcactcactttaagagatgactgtcaagaatataccactgaggtgcactcaaaggaattaacaaatgtttttgaggaaacaggggagtctcacaagggacaagatatttttcttacctcaggaagcacactgacaactccagaacctcaaagacagcaagttgaagcagcttttcagagtagaggatctagatctcctgatgcatgcatggacaagaatgtgcctcagttacctcaggatgaaatgattgtgtctgataaggaagaaagaactgatgctgctcctaagtctcagcaaatggatagcagaacatcgtcttctaaagcctcactatccagacctggcagaagacccctgggatttttatctttaatatgctcaaagaatagtttggagtctgatgaacctatgcaagtccatagtaagaaacgcctaaaacctcttatacctggattaagaaagaaattgaaaagatctaatccattcaatgaaagccaggaaaaaaatcgagagtcctctgatctgcttccatctccaagtgttattactactcaatctgagaatattagcagctcagcaactcagagacccttctgacttgtggaagcaaaaggaagcagtgctgacacccacaagaatttaaggaactgtaaaactagaatttgttcacatgtttcatttctatgtctcctgaagctgtccaatggtttcttgtgatcagcccttactgaaagaaggatataaaagtgcccaaaagcgggcccctcaaggggaggcaaccacagtctctgaatatttcttcaatgatatcttcattgaagtggatgaaacagaataaaacaatcttttctctttttcttttttaaattaggtctaggatttccagagtcaattacatcaacaaaacagtatttagagcaaaatatcactgtcttatttttctttaggttgattttgaatacttaatgagcttgatttgaagcttttataatcagtggaaaacatttctgaggttcctttcattctgactgattcagcattttgcaaatagcaagcaattaagactgctttctcagacagaaataacaactcttgtttacattttgactcttcctgtgctaagcacacatggacatttgggaatgttgtggatatatgtctctgtatgaattgcagtgcagacagatttgggggttaattgtatcatatttaacatttagcaacttcttttgtgaagattttttatttttagggggagatgatgaaggatgaaggctttttcatttgcttctaagtacagtcatgtatcacataatgaagtttaagtcaatgatggaccacatatattacagtggtcccatgcaattaaaatggagataaattcctatcaactagtgacattatagccatcataacacagtgcattgcttttttatgtttagatatgtttagatacacaaatacttactattgtgttacaactgcctacagtattcagcatagtaacacattgtagaggtttgtagccgaggagcaataggctataccacatagcctcagtctgtacggtgtgtagcagcctgtaccatctcagtgtttgtaagtacactctgcgttgtttcacacaagatcacctaacaaggcaattcttagaacatgtagttaagggacacgtgactatatgtgaaaacaaattgtcaaacttcactttagtatggcaaatgttaaagaacttttctattatcagctgtttgtctgactgaaaaatacatatttttctaattcatggtgatgtaacattagtcctaattgaaaaactagtatttaaacataattatttataaagatgacacatcaaagggcttatttatttttaaattttttatttaaaaggatattcagttttagctatttttacccctcagattgtagataaagaaggcattaaatttatgtttgtctcctttttctgtttaattttaaagatatttaaaatgatataactaaaaatgtttagctggtgtatatgttttgaatacctttttcccctcagtttagtatattgactttgtactgtaaatttttctgcttttcttggataatctcaggattttcatgaggatagggggaactcaactttatttatgagacaaaatttccatacaaagctcaatctcctttatacacccacagacataatattagtttttaaaaagccaatttcttcatagttttttcccattaaattctcaaggaacacttggatctttaagcacggaacataatcatgatgttaaaaacagagaaaataaggctttataaagttaatgattatcatcagtatgaatttaaggtttgttttaatttcaagatttgattttttatacgtgtaattctattatctacccaagcagatctgtagtggttccaattagacttctcaaacagcaaatttatcctgattttatttgaaaagcctcttggattgatagtatagtagctcaggcattggaaactttctgcaaactgttttgggtttgcaggccagatggtctctgtggcagctactcagctctgcaatttcagtgtgaaagaagccatagacagtacttgaatgaaggactgtggctggattggccttttagtttgaccccctacattaggccccaaattttcttaccctgaggtgctgatatctgtatggatgagttatttgtcactaaagttatgagttgtgcctaaaagttaaaactgttgactgtattatgtaatgatcagtatttcagttgggaagatattttagagtctagataattatgtttgtatattgaaaaaatggtggccagtttttaagttccttaatagaagagaattatgtctcagcacatataacagtaatgctaatttattgaaactactgctgttagagcacttcttattcattgtcttttagtgaaatttatggcgtaacactttgtcagagaggaggctatataattcggagcggaaattgtctataagtaggcatttatttcatgattgatatgtcacagaaatcatggtagtaaatcacattgctatttgaataccctgtttttgtaagtttttaaaactcatattctgaaaagatttcattctcttagtgttagcttgggagttagattgccatgattaaactattatttatccttgtgtaatattagtttttaactttaacatctgtttctttttaatctataatgagctagttttatggaaaatggaatttcttactatataaagaatacagagactcattgtattagagaatcaagtcagccagctaaagtatcctactgttaaatccttaaacctaattttggaaaagagaaagttaatcaatgtatttaccttacatgttggaaagaactatgttaggtctgattcatgtgaagaagatgttgcaaaggatttatttcacaaattttaaaggagatatgagtaaaagtttttatcttttcttgactttttctcctgaacacttatgtcttagcaagtggtcaacatgaggatttgaacgcctaattgttggtaaatggttgaggcatgacaaaaatattaatatccactgtttaccatcatgttatttgaaacaaaagtgaccatgtatactatcttgcttgaagaagtctttgacagaaaaagcaatatcatgtcatttataaattttcttgttctaaagaaagcagttatatatatatataaattatgtaaataaaagttattttatatc

SEQ ID NO: 296833 - DNA, 1392 bp, Artificial Sequence
  derived and/or modified sequence
atgctggtgaccctgagagccagccaggaggaggacgacgacgccgacgacttcgagagcgactacgaggaggagagctaccacctggcccccgaggaggtgaacaaggcccccgtgttcgtgcccgtgggcctgagaagccccgagcccgtgagcgcccagatcgaggagaccatggaggagctggagatcaccgtgaacgtgcccgacgtgggctgcatcgccgtggtggagcacgagctgcccaacaccgacgtgaccaccgaggagatgaagcaggaggagaacctgagcgtgcccttcgagatgaccaccagcgagcacatccaggacgagcccggcaccaacgacggcagcaccgaggccgccatcaccctgctgaccatgggcgacctggtgctgcagagcgagatcagcagcgagcagggcgacggcgtgtgcatcatcccccacgtgcacagcaaggacaagagccacatccccagcagcctggacaacgtgaaccacaagatcgtgcacgagtgccaggagctgagcagccccgtgatcaccaccagccccgccagcttcgaggagaacaagatcgtgctggaggagcagagcagcagagaggagatcagcctgatggagaaggtgaaggagaacgccacccccaccagaaacaccatcagcaaggtgaccagcaacctgagaatcagaagcagactggccaagcccaagcccaacctggagaagaccctgggcaccaacagactggacgactaccaggaggtgagcagcctgtgcgtgaccaagggcgccgagatggagacccagagagagaccgagaagaacgccagcaaggccaccgagctggagaacaagaacctgggccccgtgaccaccgccgagaacaaggaccagagcaagctggcctgcgtgcacggcatcaagggcaccagcatcagcagcgaggtgaacctgaccgagagaaacgagaaccaggaggagagcagccaggaggtgcacatgctgagcgtggcccccgtggccagcagcgagaccggcccctgcaccctgggcctggacagaggcctgggcgagaacagcgtggaggagccccagatcaaggacagcaagggcgacagcgtgctgaccctgcccgtgcccgagtacacccccaccagcatccccgaggtgcagcaggagaacatcatcaacccccaggacctgaccgtgttcgtgtaccagcagctgcagctggtgaagatgccctgggtgtacctgttcctggaggagatcatcctgaagagcagactgatcatctggatcctgtacctgggcagagacttcaacgccggcctgatcaagatgaccaccttcctgctgcccaagaacgtgcacagcctgtag

SEQ ID NO: 296834 - protein, 2132 aa, Artificial Sequence
  derived and/or modified sequence
MSSRISDTERSQKDAQTVEEESLTLSREDAEQVALEVDLNQKKRRRKKQDGANELGVNNLLENATVQAGPSKGEKHKNKCQAIRPELKEGECSKEQMLSCTQNIDGIVGFASTEKVEKRTDPILSLSNQQDATSVATESSESSTSDLPSFEVGIRALCEVNNAEGSCIEERNVDLKNNSLEIDQTENVKPMLRGRFQRPKPNLSRAGKKSVLSQGKTESESKNSHSKTSVEKNHVEKDKMNTLDILRMETTERENPEAETVSVLGEKNCLQEGSQLKALRPVQVRGRLQKPKPNAGKAAERKEILISQEEIGANVEKNENESCADRDTPQHMEDQSRKDFEEEDVILQPEKNDSFQNVQPDEPKVLNECLSVQENNKANKLNQVPILRTRFQKPKPNIGRGTGRREISSKEEVLEKILVSGEMAAALRETVRLDTSPKEMVPAEINTKEMQSDLKETGRRAISPREKILDVIDDTIEMETGLKAMGREICLREKTPEVIDATEEIDKDLEEAGRREISPQKNGPEEVKPLGEVETDLKATGNESSPREKTPEVTDATEEIDKNLEETGRRKISPRENGPEEVKPVDEMETDLNATGRESSPREKTPEVIDATEEIDLEETEREVSPQENGLEEVKPLGEMETDLKATGRDSFPRGKTPEVIDAIEEIEIDLEETEREISPQENGLEEVKPLGEMQTDLKATGREISPREKTPEVIDATEEIDKDLEETGRREISPEENGPEEVKPVDEMETDLKTTGREGSSREKTREVIDAAEVIETDLEETEREISPQENGPEEVKPVGKMETDLKEIREEISQREKVLAEFSAIREKEIDLKETGKRDIPIMEKVSGKMAVVEEMEADLKETGKENFRERGSEEICVTEEKVAELKQTGKTDISPRENELEETSTSRQTDTHLMQSGSNDFSAVPSLDIQNISSEVLSMMHTPVEEKRNSEKEVSSHFSHFKISSQTHESDKTEVQGIQSPDVPEQFSDINLSKSLPQEQKPLEIKPAPFVRSRFKRPKPNLARAALKRETTESEKYIYEKKSETKKMETIVMQENNEQTDTLPSQHDEASLMISREKDTLGHRNEEAVILPCTQTERNLSPSNSCEPKEESQSAPVQKNDSVVSVGTNNVNTFQQEMKESVIQTARQVRGRLQRPRPNIRKTGQRQIVDKGEAKGIIKEGRTILPKDETEKKVLTVSNSQIETEIEVPSSAVPEHRMYENQSQVVLVENLHVNKTNETIRHENKPYVPSSAQMTRRKFQKAKPNLGRAHSKKEEPVLEKVTTDQSKEGKPEDHLLQKGASNTQLLLKEKAELLTSLEVSARKDCVGSKESALAKIDAELEEVGPSRRVGEETVGDNSPSSVVEEQYLNKLTSCPQPLNETSYSKIALDGKTTISSTSEYERNRGERRSHKKFKPNVTRGRGSKRVRGKTSKKEPRASKAMLVTLRASQEEDDDADDFESDYEEESYHLAPEEVNKAPVFVPVGLRSPEPVSAQIEETMEELEITVNVPDVGCIAVVEHELPNTDVTTEEMKQEENLSVPFEMTTSEHIQDEPGVCIIPHVHSKDKSHIPSSLDNVNHKIVHECQELSSPVITTSPASFEENKIVLEEQSSREEISLMEKVKENATPTRNTISKVTSNLRIRSRLAKPKPNLEKTLGTNRLDDYQEVSSLCVTKGAEMETQRETEKNASKATELENKNLGPVTTAENKDQSKLACVHGIKGTSISSEVNLTERNENQEESSQEVHMLSVAPVASSETGPCTLGLDRGLGENSVEEPQIKDSKGDSVLTLPVPEYTPTSIPEVQQENIINPQDLTVNLVANVPQDGEDEQAFILTLVEIPANAVEEFTDATAQFMPNPLLPAPILVKSVNTEERGDMSICLPATSVGQDAMGLSISGRDNSKKPPDNLDLVSRKRFQCRLDKNDHIPPAKKRSLTLRDDCQEYTTEVHSKELTNVFEETGESHKGQDIFLTSGSTLTTPEPQRQQVEAAFQSRGSRSPDACMDKNVPQLPQDEMIVSDKEERTDAAPKSQQMDSRTSSSKASLSRPGRRPLGFLSLICSKNSLESDEPMQVHSKKRLKPLIPGLRKKLKRSNPFNESQEKNRESSDLLPSPSVITTQSENISSSATQSPF

SEQ ID NO: 296835 - protein, 193 aa, Artificial Sequence
  derived and/or modified sequence
MSPCGGEDIVADHVASYGVNLYQSYGPSGQYTHEFDGDEQFYVDLGRKETVWCLPVLRQFRFDPQFALTNIAVLKHNLNSLIKRSNSTAATNEVPEVTVFSKSPVTLGQPNILICLVDNIFPPVVNITWLSNGHSVTEGVSETSFLSKSDHSFFKISYLTLLPSAEESYDCKVEHWGLDKPLLKHWVHGFLSF

SEQ ID NO: 296836 - protein, 253 aa, Artificial Sequence
  derived and/or modified sequence
GCLGKRMILNKALMLGALALTTVMSPCGGEDIVADHVASYGVNLYQSYGPSGQYTHEFDGDEQFYVDLGRKETVWCLPVLRQFRFDPQFALTNIAVLKHNLNSLIKRSNSTAATNEVPEVTVFSKSPVTLGQPNILICLVDNIFPPVVNITWLSNGHSVTEGVSETSFLSKSDHSFFKISYLTLLPSAEESYDCKVEHWGLDKPLLKHWGKDEFHHFLMLSCLSSSELPAFYSYIPKLVFHTSWVSFFLIFFF

SEQ ID NO: 296837 - protein, 146 aa, Artificial Sequence [sequence omitted]

SEQ ID NO: 296838 - protein, 254 aa, Artificial Sequence
  derived and/or modified sequence
MILNKALMLGALALTTVMSPCGGEDIVADHVASYGVNLYQSYGPSGQYTHEFDGDEQFYVDLGRKETVWCLPVLRQFRFDPQFALTNIAVLKHNLNSLIKRSNSTAATNEVPEVTVFSKSPVTLGQPNILICLVDNIFPPVVNITWLSNGHSVTEGVSETSFLSKSDHSFFKISYLTLLPSAEESYDCKVEHWGLDKPLLKHWEPEIPAPMSELTETVVCALGLSVGLVGIVVGTVFIIRGLRSVGASRHQGPL

SEQ ID NO: 296839 - DNA, 582 bp, Artificial Sequence
  derived and/or modified sequence
atgagcccctgcggcggcgaggacatcgtggccgaccacgtggccagctacggcgtgaacctgtaccagagctacggccccagcggccagtacacccacgagttcgacggcgacgagcagttctacgtggacctgggcagaaaggagaccgtgtggtgcctgcccgtgctgagacagttcagattcgacccccagttcgccctgaccaacatcgccgtgctgaagcacaacctgaacagcctgatcaagagaagcaacagcaccgccgccaccaacgaggtgcccgaggtgaccgtgttcagcaagagccccgtgaccctgggccagcccaacatcctgatctgcctggtggacaacatcttcccccccgtggtgaacatcacctggctgagcaacggccacagcgtgaccgagggcgtgagcgagaccagcttcctgagcaagagcgaccacagcttcttcaagatcagctacctgaccctgctgcccagcgccgaggagagctacgactgcaaggtggagcactggggcctggacaagcccctgctgaagcactgggtgcacggcttcctgagcttctag

SEQ ID NO: 296840 - DNA, 762 bp, Artificial Sequence
  derived and/or modified sequence
ggctgcctgggcaagagaatgatcctgaacaaggccctgatgctgggcgccctggccctgaccaccgtgatgagcccctgcggcggcgaggacatcgtggccgaccacgtggccagctacggcgtgaacctgtaccagagctacggccccagcggccagtacacccacgagttcgacggcgacgagcagttctacgtggacctgggcagaaaggagaccgtgtggtgcctgcccgtgctgagacagttcagattcgacccccagttcgccctgaccaacatcgccgtgctgaagcacaacctgaacagcctgatcaagagaagcaacagcaccgccgccaccaacgaggtgcccgaggtgaccgtgttcagcaagagccccgtgaccctgggccagcccaacatcctgatctgcctggtggacaacatcttcccccccgtggtgaacatcacctggctgagcaacggccacagcgtgaccgagggcgtgagcgagaccagcttcctgagcaagagcgaccacagcttcttcaagatcagctacctgaccctgctgcccagcgccgaggagagctacgactgcaaggtggagcactggggcctggacaagcccctgctgaagcactggggcaaggacgagttccaccacttcctgatgctgagctgcctgagcagcagcgagctgcccgccttctacagctacatccccaagctggtgttccacaccagctgggtgagcttcttcctgatcttcttcttctag

SEQ ID NO: 296841 - DNA, 441 bp, Artificial Sequence
  derived and/or modified sequence
atgatcctgaacaaggccctgatgctgggcgccctggccctgaccaccgtgatgagcccctgcggcggcgaggacatcgtggccgaccacgtggccagctacggcgtgaacctgtaccagagctacggccccagcggccagtacacccacgagttcgacggcgacgagcagttctacgtggacctgggcagaaaggagaccgtgtggtgcctgcccgtgctgagacagttcagattcgacccccagttcgccctgaccaacatgtgcatcgccatctacagaagcagaagagtggacctgctgcacgacctggccctgttcagcggccccatctaccacatccccttcctgctgcagatgttcctgctgagccccctgctgtgggacctgaactgctacatctgcagcgagctgaccaacgccttcgagctgttcccctag

SEQ ID NO: 296842 - DNA, 765 bp, Artificial Sequence
  derived and/or modified sequence
atgatcctgaacaaggccctgatgctgggcgccctggccctgaccaccgtgatgagcccctgcggcggcgaggacatcgtggccgaccacgtggccagctacggcgtgaacctgtaccagagctacggccccagcggccagtacacccacgagttcgacggcgacgagcagttctacgtggacctgggcagaaaggagaccgtgtggtgcctgcccgtgctgagacagttcagattcgacccccagttcgccctgaccaacatcgccgtgctgaagcacaacctgaacagcctgatcaagagaagcaacagcaccgccgccaccaacgaggtgcccgaggtgaccgtgttcagcaagagccccgtgaccctgggccagcccaacatcctgatctgcctggtggacaacatcttcccccccgtggtgaacatcacctggctgagcaacggccacagcgtgaccgagggcgtgagcgagaccagcttcctgagcaagagcgaccacagcttcttcaagatcagctacctgaccctgctgcccagcgccgaggagagctacgactgcaaggtggagcactggggcctggacaagcccctgctgaagcactgggagcccgagatccccgcccccatgagcgagctgaccgagaccgtggtgtgcgccctgggcctgagcgtgggcctggtgggcatcgtggtgggcaccgtgttcatcatcagaggcctgagaagcgtgggcgccagcagacaccagggccccctgtag

SEQ ID NO: 296843 - DNA, 582 bp, Artificial Sequence
  derived and/or modified sequence
atgtcaccctgcggcggggaggacatcgtcgctgatcatgtcgcctcctatggcgtcaacctgtaccagtcgtacggcccttcagggcagtacactcatgagttcgacggggacgagcagttttatgtggaccttggccgaaaggagactgtgtggtgtttgcccgtgctcagacagttccgcttcgacccacagtttgcactgaccaatattgccgtgctgaagcacaatctgaattcattaatcaaaaggagcaacagcaccgctgctaccaacgaggtgccagaagtgaccgtcttttccaagagtcctgttaccctcggacagcccaacatccttatatgcctggttgacaatattttcccccctgtagtgaatataacctggctctccaacggacacagcgtcacagagggagtgtccgagacctcattccttagtaagagtgaccactcattttttaagattagctatctaaccttactgcctagcgccgaggagtcttacgattgtaaagtcgaacattgggggctagacaagcccttactcaagcactgggtgcacggatttttgagcttttag

SEQ ID NO: 296844 - DNA, 762 bp, Artificial Sequence
  derived and/or modified sequence
gggtgtctggggaaacgcatgatacttaacaaggctttaatgctcggcgctcttgctttaacaaccgttatgagtccctgcggcggggaggatattgtcgccgatcatgtggcttcatatggggtgaacctgtaccaaagctacggccctagcggacagtacacacatgagtttgatggcgacgaacagttctacgtggatctgggtaggaaggagactgtttggtgtcttccagttctccgccaattccgtttcgacccacagtttgccttaacaaacatcgccgtgctgaaacataacttgaactcccttatcaagcgctccaacagtaccgcggcaacaaacgaggtgcctgaggtgacggtgttcagtaaaagtccagtgacccttgggcagcctaacattctcatttgcctggtggacaacatatttcctcctgtcgtcaatataacttggttaagtaatggtcactccgtgacagaaggtgtgagtgaaacatcgttcctgagtaagagtgaccactcgttcttcaagatctcctaccttaccctgctgcctagcgccgaagagtcatatgattgcaaggtcgaacattggggtttggacaaaccactccttaagcactggggaaaagatgaatttcatcacttcctgatgcttagctgcctgtcaagctctgagctccccgctttttactcctatatacctaaactcgtgttccacacctcctgggtgtctttcttcttgattttcttcttctag

SEQ ID NO: 296845 - DNA, 441 bp, Artificial Sequence
  derived and/or modified sequence
atgatcctcaacaaagccctcatgttaggagccctggcactaaccaccgtgatgagtccttgtggcggcgaggatatagtggcggatcatgtggcttcctatggagtcaacctgtaccagtcatacggaccttcggggcagtatacccacgaattcgatggagatgagcagttctatgtggacctgggacgcaaagagactgtgtggtgcttgcctgtattacggcagtttcgcttcgatcctcaattcgctcttaccaacatgtgtattgccatatacagatccagaagggttgatctgcttcacgatctagcactgttcagcgggccaatttaccatattcccttcctgcttcagatgtttcttttgagcccgttgttatgggacctaaattgttacatctgcagcgaacttacgaacgcatttgaactgttcccatag

SEQ ID NO: 296846 - DNA, 765 bp, Artificial Sequence
  derived and/or modified sequence
atgatcctgaataaggcgctgatgctcggtgctttggcccttaccaccgtgatgtctccatgtgggggtgaagacatcgtggctgatcacgtggcttcctacggcgttaacctataccagtcctatggaccctccggacagtacacacatgagtttgatggggatgagcagttctacgtggacctcggacgtaaggaaaccgtgtggtgcctgcccgtcctacgccagttcaggttcgatcctcagtttgcgttgaccaacatagcggttctgaaacacaacctcaatagcttgatcaagcggagtaactccacagccgctaccaatgaagtgcccgaggtaacggtcttttctaaaagtcccgtcaccctgggtcagccaaacattctgatctgcctagtggacaatatattcccaccggtggttaacatcacttggctcagtaacgggcactcggtgactgaaggtgtttccgaaactagttttctgtctaaatctgaccacagcttctttaaaatttcttacttgactttactgccttccgccgaggagtcctatgactgcaaagtggagcactggggcttagacaagcccttgctgaagcactgggagcccgagatacccgctccaatgagcgagctaaccgaaacagtggtgtgcgccctcggtctcagcgttggactggtgggaattgttgtcggaactgtattcatcattcgtgggctcagatctgtgggagccagccgccaccaggggcctctttag

SEQ ID NO: 296847 - DNA, 582 bp, Artificial Sequence
  derived and/or modified sequence
atgagcccctgtggaggagaagatattgtggccgaccacgtggccagctatggagtgaacctgtaccagagctatggccccagcggccagtacacccatgaatttgatggagatgagcagttctacgtggacctgggcaggaaggagaccgtgtggtgcctgcctgtgctgcggcagttccgctttgacccccagtttgccctgaccaacattgctgtgctgaagcacaacctgaacagcctcatcaagaggagcaacagcacagctgccaccaatgaggtgcctgaggtgaccgtcttcagcaagagccctgtgaccctgggccagcccaacatcctgatctgcctggtggacaacatcttcccccctgtggtgaacatcacctggctgagcaatggccacagcgtgacagaaggagtgtctgagaccagcttcctgagcaagagtgaccacagcttcttcaagatctcctacctgaccctgctgcccagcgctgaggagagctatgactgcaaggtggagcactggggcctggacaagcccctgctgaagcactgggtgcacggcttcctgtccttctag

SEQ ID NO: 296848 - DNA, 762 bp, Artificial Sequence
  derived and/or modified sequence
ggctgcctgggcaagaggatgatcctgaacaaggccctgatgctgggcgccctggccctgaccaccgtgatgagcccctgtggcggggaggacatcgtggccgaccacgtggccagctatggagtgaacctgtaccagagctatggccccagcggccagtacacccatgaatttgatggagatgagcagttctacgtggacctgggcaggaaggagaccgtgtggtgcctgcctgtgctgcggcagttccgctttgacccccagtttgccctgaccaacattgctgtgctgaagcacaacctgaacagcctcatcaagaggagcaacagcacagctgccaccaatgaggtgcctgaggtgacagtgttcagcaagagccctgtgaccctgggccagcccaacatcctgatctgcctggtggacaacatcttcccccctgtggtgaacatcacctggctgagcaatggccacagcgtgacagagggcgtgtctgagaccagcttcctgagcaagagtgaccacagcttcttcaagatctcctacctgaccctgctgcccagcgctgaggagagctatgactgcaaggtggagcactggggcctggacaagcccctgctgaagcactggggcaaggatgagttccaccacttcctgatgctgagctgcctgagcagcagcgagctgcctgccttctacagctacatccccaagctggtgttccacacctcctgggtgtccttcttcctgatcttcttcttctag

SEQ ID NO: 296849 - DNA, 441 bp, Artificial Sequence
  derived and/or modified sequence
atgatcctgaacaaggccctgatgctgggcgccctggccctgaccaccgtgatgagcccctgtggcggggaggacatcgtggccgaccacgtggccagctatggagtgaacctgtaccagagctatggccccagcggccagtacacccatgaatttgatggagatgagcagttctacgtggacctgggcaggaaggagaccgtgtggtgcctgcctgtgctgcggcagttccgctttgacccccagtttgccctgaccaacatgtgcatcgccatctaccgcagccggcgggtggacctgctgcatgacctggccctcttcagcggccccatctaccacatccccttcctgctgcagatgttcctgctgagccccctgctgtgggacctgaactgctacatctgcagcgagctgaccaatgcctttgagctgttcccctag

SEQ ID NO: 296850 - DNA, 765 bp, Artificial Sequence
  derived and/or modified sequence
atgatcctgaacaaggccctgatgctgggcgccctggccctgaccaccgtgatgagcccctgtggcggggaggacatcgtggccgaccacgtggccagctatggagtgaacctgtaccagagctatggccccagcggccagtacacccatgaatttgatggagatgagcagttctacgtggacctgggcaggaaggagaccgtgtggtgcctgcctgtgctgcggcagttccgctttgacccccagtttgccctgaccaacattgctgtgctgaagcacaacctgaacagcctcatcaagaggagcaacagcacagctgccaccaatgaggtgcctgaggtgacagtgttcagcaagagccctgtgaccctgggccagcccaacatcctgatctgcctggtggacaacatcttcccccctgtggtgaacatcacctggctgagcaatggccacagcgtgacagagggcgtgtctgagaccagcttcctgagcaagagtgaccacagcttcttcaagatctcctacctgaccctgctgcccagcgctgaggagagctatgactgcaaggtggagcactggggcctggacaagcccctgctgaagcactgggagcctgagatcccagcccccatgtctgagctgacagaaacagtggtgtgtgccctgggcctgtctgtgggcctggtgggcatcgtggtgggcaccgtcttcatcatccggggcctgcggtctgtgggcgccagccgccaccagggccccctgtag

SEQ ID NO: 296851 - DNA, 582 bp, Artificial Sequence
  derived and/or modified sequence
atgagcccctgcggcggcgaggacatcgtggccgaccacgtggccagctacggtgtcaacctctaccagtcctacgggccctcgggccagtatacacacgagttcgacggagatgaacagttctatgtagatctgggaagaaaggagaccgtctggtgcttacctgtcctgcgccagtttagattcgatccccagttcgctcttaccaacatcgccgtgctgaaacacaatctgaactcactaataaaaagaagcaactcaactgccgcaactaatgaggtccccgaagtaaccgtgttctcaaaatcaccagtgactctcggccagcctaatattctgatttgcctcgtcgataacattttcccacccgtggtcaacattacttggctctctaacggacactctgtgactgaaggagtaagcgagacaagtttcctttcaaaatcagaccatagcttctttaagatcagttacctgacccttttgcccagcgccgaggagtcatatgactgtaaggtcgaacattggggattggataaaccactcctgaagcattgggtgcatggcttcttgtccttttag

SEQ ID NO: 296852 - DNA, 762 bp, Artificial Sequence
  derived and/or modified sequence
ggctgcctgggcaagcggatgatcctgaacaaggccctgatgctgggtgccctggctctgactaccgtcatgtccccgtgtgggggcgaggacatcgtcgcagaccacgtcgcctcctacggtgttaacttataccagtcctatggtccaagcggacagtacacccatgagtttgatggggacgaacagttttatgttgatttgggccggaaggagaccgtctggtgtctccccgtcctgaggcagttcaggtttgatccccaatttgccctcaccaacatcgccgtgttgaaacacaacctcaactctctgatcaagcgaagtaatagtactgcagctacaaatgaggttccggaagtaacagtgttttctaagagtcccgtgaccttaggccaaccgaacatactgatttgtctcgtggataacatctttccacccgtagtcaatattacctggctttcgaacggacacagtgtaaccgaaggagtatccgaaacttcttttctcagtaagagtgaccattccttcttcaagattagttatctaaccctgcttccttcagcggaagaaagctacgattgcaaggtggagcactggggccttgataagccgcttctgaagcattggggcaaagatgagttccaccattttctgatgctgtcatgccttagctcctctgagttacccgccttctattcttacatccctaagcttgtgttccacacctcgtgggtgtctttcttcttgattttcttcttctag

SEQ ID NO: 296853 - DNA, 441 bp, Artificial Sequence
  derived and/or modified sequence
atgatcctgaacaaggccctgatgctgggcgccctggccctgaccactgtgatgagcccctgtggtggcgaggatatcgtggccgaccacgtggccagctacggagtcaatctgtaccagagttatggcccttccggccaatacacccatgagttcgacggcgacgagcaattctatgtggatctggggcggaaggaaactgtgtggtgcctgcctgtgctgcgtcaatttcgttttgacccgcagttcgccctcactaacatgtgtatcgcaatttaccgtagtcgccgggtggatctcctgcacgacttggcactgttttctggacctatctatcacattccgttcctcctacaaatgtttctactctcccctttgctgtgggacctgaattgttatatctgcagtgagctcacaaacgcctttgaactgtttccttag

SEQ ID NO: 296854 - DNA, 765 bp, Artificial Sequence
  derived and/or modified sequence
atgatcctgaacaaggccctgatgctgggcgccctggccctgaccactgtgatgtctccctgcggaggtgaagatatcgtcgcagaccacgtcgctagctacggcgtcaatttgtaccagagctacgggcccagtgggcagtacactcatgagtttgatggcgatgaacaattttacgtggacctggggaggaaagaaacagtgtggtgccttcctgtgttgcgacagtttcgtttcgacccacagttcgccttgaccaacatagcagtgctcaagcataacctgaactccctcataaagcgatcaaactcgactgccgccaccaatgaggtcccggaggtgacagtgtttagcaagagcccagtgacccttgggcaacccaacatcctgatctgtctggtcgacaacatatttccccccgtcgtgaacattacctggctgagcaacggacactccgtgaccgagggcgttagcgaaacgagcttcttaagcaagtctgatcacagtttctttaagatatcgtacctgacgctgctgcccagcgctgaggagagctacgactgcaaggtggaacattgggggctggacaagccactgctgaagcattgggagccagaaattccggcccctatgtccgagctgaccgagacagtggtgtgtgcgctcggcctatctgttggtctggtcgggattgtcgtaggcaccgtcttcatcatccggggtttacggtcagtgggtgcatcgcgccaccaaggtccattgtag

SEQ ID NO: 296855 - DNA, 582 bp, Artificial Sequence
  derived and/or modified sequence
atgagtccttgtggcggagaggatattgtagcggaccatgtcgctagctatggcgtaaacctttaccaatcatacggtccatcaggacagtacacccatgagttcgacggcgatgagcagttttacgtcgatcttgggagaaaggagacagtttggtgcctccccgtgctgagacagtttcggtttgacccacagtttgcacttacaaacatcgccgttctgaagcataatctcaattccctgatcaaacggtccaatagcaccgccgcaacaaacgaggtgcccgaagtcacagtgttctccaagtctcccgtgactctgggacaacctaatatccttatttgtctcgtggacaatatctttccaccagtggtcaatataacttggctttccaacggacacagcgtgactgaaggtgtgtcagaaacatcattcctctccaagtcagatcatagttttttcaagataagctaccttactcttctgcctagcgcagaagagtcatacgactgtaaggtggagcattggggtctcgacaaaccccttttgaagcattgggtgcatgggttcctatcattttag

SEQ ID NO: 296856 - DNA, 762 bp, Artificial Sequence
  derived and/or modified sequence
gggtgtctcgggaagcgaatgattctcaataaggccctgatgctcggggcacttgccctgactaccgtgatgagcccttgcggcggtgaagacatagtagcagatcacgtcgcatcctacggcgtgaacctgtatcaaagctacggaccctcaggccagtatacacacgagtttgatggagacgagcagttttacgttgacctcgggagaaaagaaactgtttggtgcctcccagtcctcaggcagttccgctttgatcctcaatttgccctgactaatattgccgtgctcaagcacaacctcaactctctgattaaacggtccaattcaaccgccgctaccaacgaggtgccagaggttacggtcttctctaagtcacccgttaccttgggccaacccaacatccttatctgtctcgttgataatatttttccaccagttgtaaacattacatggctaagcaatgggcatagcgtgacagagggtgtgagcgagacttcttttctgtcgaaatccgaccatagctttttcaaaatcagctacctgactctgctgcctagcgccgaggaaagctatgattgcaaggtggaacattgggggctcgataagcctctgcttaagcattgggggaaagacgagttccatcacttcctgatgctttcatgtctcagctccagtgaattgccagccttctacagctacattccaaagctggtctttcacacttcttgggtgagcttttttttgatcttcttcttctag

SEQ ID NO: 296857 - DNA, 441 bp, Artificial Sequence
  derived and/or modified sequence
atgattctgaataaggcactcatgttaggcgcactagctctgaccactgtcatgtccccatgcggcggagaggatatcgtggcggatcacgtggcctcctacggtgtgaacctataccaaagctatggaccaagcggacagtatacacacgagttcgatggcgacgagcaattctatgtggacctgggacggaaagaaaccgtgtggtgtctgcctgtgctgcggcagtttaggttcgaccctcagtttgcccttacgaatatgtgcattgctatttataggtcgcgacgtgtggatctactccacgatcttgccttatttagtggcccaatttaccacatcccctttttgctgcagatgttcctactgagtccgttgttgtgggacctcaactgttacatctgttctgagctcaccaatgcttttgaactgtttccatag

SEQ ID NO: 296858 - DNA, 765 bp, Artificial Sequence
  derived and/or modified sequence
atgatcctcaataaggctctgatgcttggtgctctcgctctgactacagtaatgtccccttgcggaggggaggacatagttgcggaccacgtggccagttatggcgttaatctgtaccagtcttacggccctagcgggcagtacacccatgagtttgatggcgatgagcagttctatgtggatctaggcaggaaggaaactgtctggtgtctccccgttttacgccagttcaggttcgaccctcagtttgcactgaccaacatagcagtgctgaagcataacttaaattccctcataaagagatcaaattcaactgctgccacaaatgaggtcccagaggtgaccgtttttagtaaaagtcccgtgacgctgggtcagccaaatatactgatctgcctcgtcgataatatctttcccccagtcgttaacatcacctggctctccaatgggcacagcgtgacggagggtgtctcagagacctcctttctgagtaagtctgaccacagttttttcaaaatttcctacctgaccctgctcccctccgccgaggagtcatacgactgcaaggtggagcactgggggctggacaagcctttgttaaagcactgggagccagagatccctgctcctatgtcggaactaaccgaaacggtcgtgtgcgcactgggactgagcgtggggttggtgggcattgtggtcggaaccgtatttatcattcgcggtctgcggagcgtcggggcatcacggcaccaagggccactatag

SEQ ID NO: 296859 - DNA, 683 bp, Artificial Sequence
  derived and/or modified sequence
acaattgctctacaactcagaacagcaactgctaaggctgccttgggaagaggatgatcctaaacaaagctctgatgctgggggcccttgccctgaccaccgtgatgagcccctgtggaggtgaagacattgtggctgaccacgtcgcctcttatggtgtaaacttgtaccagtcttacggtccctctggccagtacacccatgaatttgatggagatgagcagttctacgtggacctggggaggaaggagactgtctggtgtttgcctgttctcagacaatttagatttgacccgcaatttgcactgacaaacatcgctgtcctaaaacataacttgaacagtctgattaaacgctccaactctaccgctgctaccaatgaggttcctgaggtcacagtgttttccaagtctcccgtgacactgggtcagcccaacatcctcatctgtcttgtggacaacatctttcctcctgtggtcaacatcacatggctgagcaatgggcactcagtcacagaaggtgtttctgagaccagcttcctctccaagagtgatcattccttcttcaagatcagttacctcaccctcctcccttctgctgaggagagttatgactgcaaggtggagcactggggcctggacaagcctcttctgaaacactgggttcatgggtttctttctttc

SEQ ID NO: 296860 - DNA, 794 bp, Artificial Sequence
  derived and/or modified sequence
acaattgctctacaactcagaacagcaactgctaaggctgccttgggaagaggatgatcctaaacaaagctctgatgctgggggcccttgccctgaccaccgtgatgagcccctgtggaggtgaagacattgtggctgaccacgtcgcctcttatggtgtaaacttgtaccagtcttacggtccctctggccagtacacccatgaatttgatggagatgagcagttctacgtggacctggggaggaaggagactgtctggtgtttgcctgttctcagacaatttagatttgacccgcaatttgcactgacaaacatcgctgtcctaaaacataacttgaacagtctgattaaacgctccaactctaccgctgctaccaatgaggttcctgaggtcacagtgttttccaagtctcccgtgacactgggtcagcccaacatcctcatctgtcttgtggacaacatctttcctcctgtggtcaacatcacatggctgagcaatgggcactcagtcacagaaggtgtttctgagaccagcttcctctccaagagtgatcattccttcttcaagatcagttacctcaccctcctcccttctgctgaggagagttatgactgcaaggtggagcactggggcctggacaagcctcttctgaaacactggggtaaggatgagttccaccactttttgatgctttcttgtctgtcaagttcagaacttcctgccttttactcctatatcccaaaacttgttttccacacttcatgggtttctttctttcttatttttttcttc

SEQ ID NO: 296861 - DNA, 943 bp, Artificial Sequence
  derived and/or modified sequence
acaattgctctacaactcagaacagcaactgctaaggctgccttgggaagaggatgatcctaaacaaagctctgatgctgggggcccttgccctgaccaccgtgatgagcccctgtggaggtgaagacattgtggctgaccacgtcgcctcttatggtgtaaacttgtaccagtcttacggtccctctggccagtacacccatgaatttgatggagatgagcagttctacgtggacctggggaggaaggagactgtctggtgtttgcctgttctcagacaatttagatttgacccgcaatttgcactgacaaacatgtgcatcgccatctacaggagcagaagagtggacttgctacatgacctagcattattttctggccccatttatcatatcccttttctcctccaaatgtttctcctctcacctcttctgtgggacttaaattgctatatctgctcagagctcacaaatgcctttgaattatttccctgacttcctgatttttttcttcttaagtgttacctactaagagttgcctggagtaagccacccagctacctaattcctcagtaacctccatctataatctccatggaagcaacaaattccctttatgagatatatgtcaaatttttccatctttcatccagggctgactgaaaccgtggctaagaattgggagactctcttgtttcaagccaatttaacatcatttaccagatcatttgtcatgtccagtaacacagaagcaaccaactacagtatagcctgataacatgatttcttagctgacattaatatttctttcttccttgtgttcccacccttggcattgccacccacccctcaattaaggcaacaatgaagttaatggataccctctgcctttggctcagaaatgttatagcaaaaattttaaaataaaaaagtaagtctgtact

SEQ ID NO: 296862 - DNA, 1465 bp, Artificial Sequence
  derived and/or modified sequence
acaattgctctacaactcagaacagcaactgctaaggctgccttgggaagaggatgatcctaaacaaagctctgatgctgggggcccttgccctgaccaccgtgatgagcccctgtggaggtgaagacattgtggctgaccacgtcgcctcttatggtgtaaacttgtaccagtcttacggtccctctggccagtacacccatgaatttgatggagatgagcagttctacgtggacctggggaggaaggagactgtctggtgtttgcctgttctcagacaatttagatttgacccgcaatttgcactgacaaacatcgctgtcctaaaacataacttgaacagtctgattaaacgctccaactctaccgctgctaccaatgaggttcctgaggtcacagtgttttccaagtctcccgtgacactgggtcagcccaacatcctcatctgtcttgtggacaacatctttcctcctgtggtcaacatcacatggctgagcaatgggcactcagtcacagaaggtgtttctgagaccagcttcctctccaagagtgatcattccttcttcaagatcagttacctcaccctcctcccttctgctgaggagagttatgactgcaaggtggagcactggggcctggacaagcctcttctgaaacactgggagcctgagattccagcccctatgtcagagctcacagagactgtggtctgcgccctgggattgtctgtgggcctcgtgggcattgtggtgggcactgtcttcatcatccgaggcctgcgttcagttggtgcttccagacaccaagggcccttgtgaatcccatcctggaatggaaggtgcatcgccatctacaggagcagaagagtggacttgctacatgacctagcattattttctggccccatttatcatatcccttttctcctccaaatgtttctcctctcacctcttctgtgggacttaaattgctatatctgctcagagctcacaaatgcctttgaattatttccctgacttcctgatttttttcttcttaagtgttacctactaagagttgcctggagtaagccacccagctacctaattcctcagtaacctccatctataatctccatggaagcaacaaattccctttatgagatatatgtcaaatttttccatctttcatccagggctgactgaaaccgtggctaagaattgggagactctcttgtttcaagccaatttaacatcatttaccagatcatttgtcatgtccagtaacacagaagcaaccaactacagtatagcctgataacatgatttcttagctgacattaatatttctttcttccttgtgttcccacccttggcattgccacccacccctcaattaaggcaacaatgaagttaatggataccctctgcctttggctcagaaatgttatagcaaaaattttaaaataaaaaagtaagtctgtact

SEQ ID NO: 296863 - DNA, 765 bp, Artificial Sequence
  derived and/or modified sequence
atgattctgaacaaagcacttatgctgggagctcttgccctaacaaccgtgatgtctccctgtggcggtgaagatatagtggctgaccatgtagcatcgtatggagtcaatctgtatcaatcatacgggccgtccggccaatacacgcatgagtttgatggggacgagcaattctacgtcgatttggggagaaaagaaaccgtgtggtgcctcccagtgctgaggcagtttcgtttcgacccccagttcgcattaacaaacatcgctgtcctgaagcacaacctgaattccttaatcaagagatccaactcgactgccgccactaatgaggtaccagaggtaaccgtattttccaagtcccccgtaacgttggggcagcccaatattttgatatgtctggtcgataatatcttcccccccgtcgtaaacattacttggctcagcaatgggcatagtgttaccgaaggagtcagtgaaacttctttcctttccaaatccgaccacagcttttttaagattagctatttaaccttgctcccatccgcggaggagagttacgactgcaaggttgagcactggggcctggataagcccctgctaaagcattgggaacctgagattccagcgcctatgtcggagctcaccgagacagtcgtttgtgcccttggtctctccgtggggctggtcggaattgttgtcggcactgttttcattatcagaggattgaggtctgtgggagcaagcagacaccaaggtccactgtag

SEQ ID NO: 296864 - DNA, 765 bp, Artificial Sequence
  derived and/or modified sequence
atgattctgaataaagccctgatgctgggcgccctagctttaacgacagtgatgtctccctgtgggggcgaagatatcgtggccgaccacgtcgcctcctatggagtaaacttgtaccagtcctacggaccaagtggacagtatacccatgagtttgacggcgatgagcagttttatgtagacctgggccgcaaagaaacagtctggtgcctacccgtgctccgacagttccgcttcgatcctcaattcgcactgacgaatattgcagtgttaaagcataacctcaacagcctgattaagcgttcaaactcaaccgctgctaccaatgaagttcctgaggtgaccgtcttttctaagagtccagtaacccttggccagcccaatattctcatatgtctcgtggataacatcttcccaccagtggtgaacatcacgtggttgtctaatgggcattcggtgactgagggcgtgtctgagacaagctttctgagtaagtcagaccactcgtttttcaaaatttcctaccttactctgctccctagcgccgaggagtcctatgattgcaaggtagaacactggggcctggataaacccctgttgaaacattgggagcctgagattccagcaccaatgtccgagttgacagaaacagtggtatgcgcactagggctctctgtcggcctcgttggcatcgttgtgggcactgtcttcattataagaggtcttagaagcgttggcgcctcgaggcatcagggccctctttag

SEQ ID NO: 296865 - DNA, 765 bp, Artificial Sequence
  derived and/or modified sequence
atgattctcaacaaagctctgatgttgggggcattggctctcacgacggttatgtccccttgtgggggggaggacatcgtggcggaccacgtggcctcgtatggcgtcaatctgtatcagagttacggcccaagcggtcagtatacacatgagttcgacggcgacgagcagttctatgtggatctgggcagaaaggaaaccgtgtggtgtttgcctgtgctccggcagttccggtttgatccacagttcgctctgacgaacatcgctgtgttgaagcataatctcaactctttgattaagcggtccaattctacagctgctactaatgaggtgcccgaggtgacagtcttctccaaatctcccgtgacactggggcagcctaacattctcatttgtcttgtggacaacatctttccacctgtggtgaatatcacctggttgagcaatgggcacagcgtaactgagggcgtctctgagacatcctttttgtcaaaaagtgaccacagcttcttcaagatttcctatcttacgctgctgccttcagcggaggagagttacgattgtaaggtggagcactgggggctagacaagcctctcctaaaacactgggaaccagaaattccagcgcccatgtctgaactcaccgaaaccgtcgtttgcgctttgggactgtccgtgggcttagtgggtatagtcgtgggaacggtctttattatccgcggtctgcggtccgtgggggccagtaggcaccaagggcctctttag

SEQ ID NO: 296866 - DNA, 441 bp, Artificial Sequence
  derived and/or modified sequence
atgatcctgaacaaggctctgatgcttggcgcattagctctgaccaccgtgatgtccccgtgtgggggggaagacattgttgctgaccacgttgcttcgtatggggtaaatctgtatcagtcatacggtccctcaggacagtacactcacgagttcgatggagacgaacaattctatgtggatctcgggcggaaggaaactgtgtggtgtctgcccgtgctccggcagttccgctttgatccacaattcgctttaactaatatgtgtattgccatttaccggagccggagggtagaccttctgcacgacctggcactcttttccggtccgatctaccacattccgtttcttcttcagatgtttctactgagcccacttctgtgggatctgaattgttatatttgcagtgagcttactaacgctttcgagctattcccatag

SEQ ID NO: 296867 - DNA, 762 bp, Artificial Sequence
  derived and/or modified sequence
gggtgtctggggaaaaggatgatccttaacaaggccctgatgctgggggccctcgcccttacaactgtaatgtcgccctgcggtggagaagacatcgtggctgaccacgtggcatcttacggcgttaacttgtaccagtcttacggccccagcggacagtacacccatgagtttgacggtgatgagcagttctatgtggatctgggacgtaaagagaccgtctggtgtctgcccgtgttgcgccagtttagattcgatccccagttcgccctgacgaatatagcggtactgaaacacaatctgaactccctaatcaaaagatctaacagtactgccgccaccaatgaggttcctgaggttacagtgttcagtaagtcacctgtgacactggggcagccaaacattttgatatgtctggtggataatatcttccctcctgtggtgaacattacgtggttgtctaacggacactcagtcaccgaaggggtatcggaaacatcttttttgtccaagtccgatcatagcttttttaaaataagctatctcactctgctccccagcgcagaagagtcatacgattgtaaagtcgaacattggggtctggacaagcctctgctgaaacactggggaaaggacgagtttcaccacttcctgatgttgtcctgtttgagttcttccgaactccctgccttttatagctacataccgaaactggtgtttcacacgtcctgggtgtcattctttcttatcttctttttctag

SEQ ID NO: 296868 - DNA, 582 bp, Artificial Sequence
  derived and/or modified sequence
atgagcccgtgtggtggagaagacatcgtcgctgatcatgtggcaagttatggggttaatttgtaccagtcttacggcccttctggacagtatacccacgaattcgacggcgatgagcaattctacgtggatcttgggcggaaagagacagtatggtgcttgccagtgctgcgccagttcagatttgatccacagtttgctcttacgaatatcgctgtgctgaagcataatctgaactcgttgattaagaggagcaacagtacggccgccactaacgaggtcccagaggtaacagtcttcagcaaatcccctgttacactcggtcagcctaatatcctgatatgcttagtggataatatctttcccccagtcgtgaacatcacctggctctctaacggccactcagttacggagggtgtaagcgaaacgagtttcttgtccaaatcagatcacagtttttttaagatttcctatctgactttattaccctccgctgaggagtcctacgactgtaaagtcgagcactggggcttagacaaacccctgttaaagcattgggttcacggatttctcagcttttag

SEQ ID NO: 296869 - DNA, 1522 bp, Artificial Sequence
  derived and/or modified sequence
ggcagggtttggtttgggtgtcttcagattgccttgtctcgaggtcctcacaattgctctacaactcagaacagcaactgctaaggctgccttgggaagaggatgatcctaaacaaagctctgatgctgggggcccttgccctgaccaccgtgatgagcccctgtggaggtgaagacattgtggctgaccacgtcgcctcttatggtgtaaacttgtaccagtcttacggtccctctggccagtacacccatgaatttgatggagatgagcagttctacgtggacctggggaggaaggagactgtctggtgtttgcctgttctcagacaatttagatttgacccgcaatttgcactgacaaacatcgctgtcctaaaacataacttgaacagtctgattaaacgctccaactctaccgctgctaccaatgaggttcctgaggtcacagtgttttccaagtctcccgtgacactgggtcagcccaacatcctcatctgtcttgtggacaacatctttcctcctgtggtcaacatcacatggctgagcaatgggcactcagtcacagaaggtgtttctgagaccagcttcctctccaagagtgatcattccttcttcaagatcagttacctcaccctcctcccttctgctgaggagagttatgactgcaaggtggagcactggggcctggacaagcctcttctgaaacactgggagcctgagattccagcccctatgtcagagctcacagagactgtggtctgcgccctgggattgtctgtgggcctcgtgggcattgtggtgggcactgtcttcatcatccgaggcctgcgttcagttggtgcttccagacaccaagggcccttgtgaatcccatcctggaatggaaggtgcatcgccatctacaggagcagaagagtggacttgctacatgacctagcattattttctggccccatttatcatatcccttttctcctccaaatgtttctcctctcacctcttctgtgggacttaaattgctatatctgctcagagctcacaaatgcctttgaattatttccctgacttcctgatttttttcttcttaagtgttacctactaagagttgcctggagtaagccacccagctacctaattcctcagtaacctccatctataatctccatggaagcaacaaattccctttatgagatatatgtcaaatttttccatctttcatccagggctgactgaaaccgtggctaagaattgggagactctcttgtttcaagccaatttaacatcatttaccagatcatttgtcatgtccagtaacacagaagcaaccaactacagtatagcctgataacatgatttcttagctgacattaatatttctttcttccttgtgttcccacccttggcattgccacccacccctcaattaaggcaacaatgaagttaatggataccctctgcctttggctcagaaatgttatagcaaaaattttaaaataaaaaagtaagtctgtactaatttcaa

SEQ ID NO: 296870 - DNA, 1103 bp, Artificial Sequence
  derived and/or modified sequence
aggctgccttgggaagaggatgatcctaaacaaagctctgatgctgggggcccttgccctgaccaccgtgatgagcccctgtggaggtgaagacattgtggctgaccacgtcgcctcttatggtgtaaacttgtaccagtcttacggtccctctggccagtacacccatgaatttgatggagatgagcagttctacgtggacctggggaggaaggagactgtctggtgtttgcctgttctcagacaatttagatttgacccgcaatttgcactgacaaacatcgctgtcctaaaacataacttgaacagtctgattaaacgctccaactctaccgctgctaccaatgaggttcctgaggtcacagtgttttccaagtctcccgtgacactgggtcagcccaacatcctcatctgtcttgtggacaacatctttcctcctgtggtcaacatcacatggctgagcaatgggcactcagtcacagaaggtgtttctgagaccagcttcctctccaagagtgatcattccttcttcaagatcagttacctcaccctcctcccttctgctgaggagagttatgactgcaaggtggagcactggggcctggacaagcctcttctgaaacactgggagcctgagattccagcccctatgtcagagctcacagagactgtggtctgcgccctgggattgtctgtgggcctcgtgggcattgtggtgggcactgtcttcatcatccgaggcctgcgttcagttggtgcttccagacaccaagggcccttgtgaatcccatcctggaatggaagggctgactgaaaccgtggctaagaattgggagactctcttgtttcaagccaatttaacatcatttaccagatcatttgtcatgtccagtaacacagaagcaaccaactacagtatagcctgataacatgatttcttagctgacattaatatttctttcttccttgtgttcccacccttggcattgccacccacccctcaattaaggcaacaatgaagttaatggataccctctgcctttggctcagaaatgttatagcaaaaattttaaaataaaaaagtaagtctgtactaatttcaa

SEQ ID NO: 296871 - DNA, 1237 bp, Artificial Sequence
  derived and/or modified sequence
aggctgccttgggaagaggatgatcctaaacaaagctctgatgctgggggcccttgccctgaccaccgtgatgagcccctgtggaggtgaagacattgtggctgaccacgtcgcctcttatggtgtaaacttgtaccagtcttacggtccctctggccagtacacccatgaatttgatggagatgagcagttctacgtggacctggggaggaaggagactgtctggtgtttgcctgttctcagacaatttagatttgacccgcaatttgcactgacaaacatcgctgtcctaaaacataacttgaacagtctgattaaacgctccaactctaccgctgctaccaatgaggttcctgaggtcacagtgttttccaagtctcccgtgacactgggtcagcccaacatcctcatctgtcttgtggacaacatctttcctcctgtggtcaacatcacatggctgagcaatgggcactcagtcacagaaggtgtttctgagaccagcttcctctccaagagtgatcattccttcttcaagatcagttacctcaccctcctcccttctgctgaggagagttatgactgcaaggtggagcactggggcctggacaagcctcttctgaaacactgggagcctgagattccagcccctatgtcagagctcacagagactgtggtctgcgccctgggattgtctgtgggcctcgtgggcattgtggtgggcactgtcttcatcatccgaggcctgcgttcagttggtgcttccagacaccaagggcccttgtgaatcccatcctggaatggaagtgttacctactaagagttgcctggagtaagccacccagctacctaattcctcagtaacctccatctataatctccatggaagcaacaaattccctttatgagatatatgtcaaatttttccatctttcatccagggctgactgaaaccgtggctaagaattgggagactctcttgtttcaagccaatttaacatcatttaccagatcatttgtcatgtccagtaacacagaagcaaccaactacagtatagcctgataacatgatttcttagctgacattaatatttctttcttccttgtgttcccacccttggcattgccacccacccctcaattaaggcaacaatgaagttaatggataccctctgcctttggctcagaaatgttatagcaaaaattttaaaataaaaaagtaagtctgtactaatttcaa

SEQ ID NO: 296872 - DNA, 765 bp, Artificial Sequence
  derived and/or modified sequence
atgatcctgaacaaggccctgatgctgggcgccctggccctgaccactgtgatgtctccctgcggaggagaagacatcgtggccgaccacgtggctagctatggagttaacctgtaccagtcttatggccctagcggccagtacacacatgagtttgacggtgacgagcagttttatgtcgatctggggagaaaagaaaccgtctggtgccttccagtgctaagacaattcaggtttgacccccaattcgcgctaacaaatatagctgtcctgaagcataaccttaattcactgatcaaaagatcaaattctaccgcggccaccaacgaggtccccgaagttactgtctttagtaagagccccgtgacgctggggcagccaaacatcctgatttgcctggtggataatatatttcctcctgttgttaacatcacttggctgtctaacggacacagcgtaaccgagggggtctctgaaacctcctttctcagcaagtctgaccacagcttttttaaaatttcatacttaaccttacttcccagtgccgaagagtcatacgattgtaaagtcgaacattggggactggacaagccactattgaagcattgggagcccgaaatcccggcacctatgagcgagcttactgagaccgtggtgtgtgctttgggcctcagtgtaggcctcgtgggcattgtggtcgggactgtgttcatcattagaggccttaggtccgtgggcgcgtctagacaccagggtcctttgtag

SEQ ID NO: 296873 - DNA, 765 bp, Artificial Sequence
  derived and/or modified sequence
atgatcctgaacaaggccctgatgctgggcgccctggccctgaccactgtcatgagtccttgcggcggggaagacattgttgcagatcacgtcgctagttacggagtcaacctgtaccagagttatggcccctccggacaatacacacatgaattcgacggggatgagcagttctacgtggatttaggacgcaaggaaacagtttggtgccttcccgttctgaggcagttcagattcgatccgcagttcgccctcacaaacattgctgtattgaaacataatcttaattccctgattaagagaagcaactcaactgccgctactaacgaggtccccgaggtgacagtattctcaaagagccccgtgactttaggacaaccaaatattcttatctgcctggtagataatattttcccccccgtcgtgaacatcacttggctgtcaaatggccactccgtgaccgagggcgtgagcgaaactagcttcctctcaaagtctgaccatagcttcttcaaaatatcttatcttactctccttccttctgcggaggagagctatgactgtaaagtcgaacattggggcctagacaaaccactactaaagcactgggaacccgagattcccgcgccgatgtcagaacttactgaaaccgttgtgtgcgccctcggattatcagtcggactagttggcatcgtcgtggggaccgtctttatcattcgggggttaagatcagtcggagcctcacgacatcagggccccctttag

SEQ ID NO: 296874 - DNA, 765 bp, Artificial Sequence
  derived and/or modified sequence
atgatcctgaacaaggccctgatgctgggcgccctggccctgaccactgtgatgtcaccgtgcgggggcgaagacatcgttgcagaccacgtcgctagttacggggttaatttataccaatcctatgggccgtctggtcagtatacccatgagttcgatggggacgagcaattttacgtcgacctgggccgtaaggaaacagtttggtgcctcccggtgctcaggcagtttcgatttgacccccaattcgccctaacaaatattgccgtgctcaagcacaaccttaattcgcttatcaaaagatctaatagcaccgccgccacaaatgaggttccagaagtgacagtgttttccaagagcccggtgacactcggccagcctaacatcttgatctgcctggtggataacatctttccacctgtggtgaacattacatggcttagtaatggacattcagtcactgagggagtgtcggagacttcttttttatctaagagcgaccactctttctttaagatcagctatctgacattgctccctagtgccgaagaaagctatgactgtaaggtggaacattggggccttgataagcctctgcttaaacattgggaacccgagatccccgccccaatgtcagagctcaccgagaccgtggtgtgcgctttgggcttatccgtaggactggtcggcatagtggttggcaccgtgttcataatcagaggcctgcggagcgttggcgcatcacgacatcagggtccgctctag

SEQ ID NO: 296875 - DNA, 441 bp, Artificial Sequence
  derived and/or modified sequence
atgatcctgaacaaggccctgatgctgggcgccctggccctgaccaccgtcatgagcccgtgtggcggggaggatattgtcgcagatcatgtggcatcctatggtgtgaatctttaccagtcctatggacctagcggacagtatacccacgaattcgacggcgatgagcagttttacgtcgatttgggtcggaaagagactgtgtggtgcttgcccgtgctgagacagtttcggttcgaccctcagtttgctcttacaaacatgtgcatcgcaatctataggtctagaagagttgatcttctgcacgacctcgctctattcagtggcccaatctaccacatcccgtttctactgcagatgtttcttctctccccactgctttgggacctcaattgttatatttgctcagaacttaccaatgcgtttgagctttttccctag

SEQ ID NO: 296876 - DNA, 762 bp, Artificial Sequence
  derived and/or modified sequence
ggctgcctgggcaagcggatgatcctgaacaaggccctgatgctgggggctctcgctcttactactgtcatgtccccttgtggaggggaggacatagtggctgatcatgtggcatcttacggagtgaacttataccaaagctacggcccttccggacagtatacccacgaattcgacggagacgaacaattttacgtcgatttggggaggaaggaaacagtatggtgcctccctgtgttgcgacagttcaggtttgaccctcagttcgcccttaccaacatcgccgttttgaaacacaaccttaattctctaatcaagcgttcgaattcaacagctgccacgaacgaagtgccagaagtgactgtttttagtaagagccccgtgaccctgggccagcctaatatactgatttgcctggtggataatatcttcccacctgtggttaatataacatggttgagtaacggccattcagtaaccgaaggtgtttccgagactagctttctgagtaagtcagaccatagtttttttaaaattagttatctgaccctcctgcccagtgcggaggaatcctatgattgtaaggtggagcactggggcctcgacaagcccctgcttaagcactggggtaaagacgaatttcaccattttctgatgctgagctgtctgagcagtagcgagctccctgctttttatagctacatcccgaaacttgtattccatacttcatgggtgagcttcttcctcattttcttcttttag

SEQ ID NO: 296877 - DNA, 582 bp, Artificial Sequence
  derived and/or modified sequence
atgagcccctgcggcggcgaggacatcgtggccgaccacgtggcctcctacggcgtgaatctctaccagtcttatgggccatccgggcagtacacccatgagttcgacggagatgagcagttctatgtggacttgggaaggaaagagaccgtctggtgtttgcccgtgctccgacaatttaggtttgacccgcaatttgctctgaccaatattgccgtgctcaaacacaaccttaattccctgatcaagcgatcaaacagcaccgccgccacaaatgaggtgccagaagtgaccgtgttcagtaagagccccgtgaccttggggcaacccaacattctgatctgcctggtggataacattttcccacccgtcgtgaacataacttggttgtctaatggccattccgtcaccgagggcgtttcagaaacctccttccttagcaagagcgatcatagtttcttcaaaatttcctatcttacactcctgcctagtgcagaggaatcctacgactgtaaagtggagcactggggcctcgataagcccttgctaaagcactgggttcacgggtttttatcattctag

SEQ ID NO: 296878 - DNA, 765 bp, Artificial Sequence
  derived and/or modified sequence
atgatccttaacaaggctctcatgctgggagccctggccctgacaaccgttatgtccccatgcggcggtgaagatattgtcgcagatcatgtggctagttacggggtgaatctttatcagagttatggtcctagcggtcagtatacccatgagtttgatggggacgagcagttttatgtggacctcgggcgaaaggaaactgtttggtgcctcccggttttgcggcagtttagatttgacccgcaatttgcactgaccaacatcgccgtgttgaagcacaatctcaatagtttaatcaagaggtccaactccacagccgctaccaacgaagtgcccgaagtgacagtgttttctaaatctccagtaaccctggggcagcccaatatcttaatatgtctagtggataacatctttccgccagtcgtcaatataacttggcttagtaacggccactccgtgacagaaggcgtgtccgaaaccagcttcttgagcaaatcagaccactccttcttcaagatcagctacctgaccctgctgcccagtgctgaagaaagttatgactgtaaggtagaacactggggacttgacaagcccctgctgaagcactgggagccggagattcctgccccaatgtcagaactgactgagactgtggtctgcgcccttgggctctcggtcggactggtaggaatcgtggttggtacagtctttattatccgcggactccgctctgtgggagcttctaggcatcagggcccactctag

SEQ ID NO: 296879 - DNA, 765 bp, Artificial Sequence
  derived and/or modified sequence
atgattctcaacaaagccttaatgttgggagcattggctctaaccacggtcatgagtccctgtgggggtgaggacatagttgctgaccacgtggcaagctacggcgtgaatttgtatcagtcatatgggccttcaggacaatacacgcatgagttcgatggagacgaacagttctatgtcgacttgggtagaaaagaaacagtgtggtgcctgcccgtgctgagacagtttcggttcgatccccagtttgcactcactaatattgccgtgctcaaacacaacttgaactctttgataaaacgtagcaacagtaccgcggcaacaaatgaggtacccgaggtgaccgtcttctctaaaagtcctgtaaccctgggacaacctaatattctgatctgcctggtagataacattttcccacccgtcgttaacatcacttggttgtccaacggccattctgtgacagagggcgtgtccgaaacctcattcctttcaaaatccgaccactccttcttcaagatctcatatctcactctcctcccctctgcagaggagagctatgattgcaaggtggagcattgggggctggacaagccactgcttaagcactgggagccagaaattccagctcccatgtctgagctcacagaaactgtggtctgcgcattaggtctgtcagtgggccttgttggaattgtggtcggtaccgtgtttatcatacgcggtctgcgatctgtaggggctagtagacatcagggaccactgtag

SEQ ID NO: 296880 - DNA, 765 bp, Artificial Sequence
  derived and/or modified sequence
atgatactgaataaggccctcatgcttggagcactcgctttgacaactgtgatgtcaccctgcggaggcgaagacattgtggcagaccacgtggctagttatggagtgaacttgtatcagtcatatggcccttcgggacagtatactcatgagttcgatggcgatgagcagttctatgttgatctggggagaaaggagactgtgtggtgcctgcccgtgctcaggcagttccgtttcgatcctcaattcgctctcactaatattgccgtcctgaaacataacttgaacagtctcatcaagaggagtaattcaaccgccgctaccaatgaggtaccagaggtgactgtgttcagcaaaagcccggtgaccttgggccagcccaacatcctgatatgtcttgtggacaatatcttcccccctgtggtgaacatcacctggctctctaatggtcatagtgttacagagggggtgtctgagacatcgtttttgagcaagtcagatcattccttcttcaagatatcctatctgacactcctacctagtgccgaagaaagttacgattgtaaagtggagcattggggattggacaagccactcctgaaacattgggagcctgagatccccgctcccatgtccgagttaactgagacagtggtatgcgcactagggctgtcagtgggtttagtcggtattgtagtcggcacagtgttcatcattcgtggtctgagatccgtgggggctagtcggcaccagggacccttgtag

SEQ ID NO: 296881 - DNA, 441 bp, Artificial Sequence
  derived and/or modified sequence
atgatcctgaataaggccctgatgttgggggcactggcccttacaaccgtcatgagcccttgcggaggcgaggacatcgtggcagatcatgtggcatcctatggggtcaatctgtaccagagttacggtccaagcggccagtatacgcacgaatttgatggagatgaacagttctacgtggacttggggaggaaagagaccgtctggtgtctgcctgtgcttaggcagtttcgcttcgatccccaattcgccctcacaaatatgtgtatcgccatatacagaagccgaagggtggacctcctgcacgacctagcactctttagcggcccaatctaccacataccatttctgctccagatgtttctcctgtcccctctactatgggacctgaattgctatatctgctcagagctgactaacgcttttgagctattcccttag

SEQ ID NO: 296882 - DNA, 762 bp, Artificial Sequence
  derived and/or modified sequence
gggtgcctgggtaagcggatgattctgaacaaggccctcatgctgggtgccttagcccttacaaccgtgatgtccccctgtggtggagaggatattgtggcagaccacgtggccagctatggagtgaatctgtatcagtcctatggaccatccggtcagtatactcacgagttcgatggagatgaacaattctacgttgatctggggaggaaggagacagtctggtgtctgcctgtgctccggcagtttaggtttgatcctcagtttgctctcaccaatatagctgtactcaaacacaatttgaactccttaatcaagaggtctaatagcaccgccgctacaaacgaggtgccagaggtgactgtgttttcaaaatctccagttacgctcggacagcccaatatcctcatttgtttagtcgataacatctttcctcccgttgtcaatatcacttggctgtcgaacgggcactccgtgacagagggagtctcagagactagttttctgtcgaaaagtgatcactctttcttcaagatctcttatctgacgctcctgccctctgcagaggagtcgtacgattgcaaagtagagcactgggggctggacaagccactcctgaagcattggggcaaagacgaattccaccattttctgatgctgtcttgcttgtcctcctcagaactgccggcattctacagctacatcccgaagctggtgttccacacctcctgggtgagctttttcttgatcttctttttttag

SEQ ID NO: 296883 - DNA, 582 bp, Artificial Sequence
  derived and/or modified sequence
atgagcccttgtggaggcgaagacatagtggcagatcatgtcgctagctatggcgtgaatctttaccaatcctatggccctagtggccagtacactcacgaattcgatggggacgagcagttttacgtcgatctggggaggaaagaaaccgtctggtgcctcccagtgttgcgccagttccgcttcgacccacagttcgcattaaccaacatcgccgtgttgaaacacaacttgaatagcttgataaagcgaagcaatagcactgcagcgactaacgaggtgcctgaagtcacggtgttcagcaagtcccctgtgacactagggcaacctaacattctgatctgtctggtggacaacatctttcctcccgtggtgaatataacatggcttagcaacgggcactcagtgactgaaggcgtgagcgagactagcttcctgagtaaatcagatcactcattctttaagatcagctatcttactttattaccttctgccgaagagagctacgactgtaaggtagagcattggggactggataagcccttacttaagcattgggtgcacggcttcctgagcttttag

SEQ ID NO: 296884 - protein, 782 aa, Artificial Sequence
  derived and/or modified sequence
MFPPSGSTGLIPPSHFQARPLSTLPRMAPTWLSDIPLVQPPGHQDVSERRLDTQRPQVTMWERDVSSDRQEPGRRGRSWGLEGSQALSQQAEVIVRQLQELRWLEEEVWLLRETSLQQKMRLEAQAMELEALARAEKAGRAEAEGLRAALAGAEVVRKNLEEGRQRELEEVQRLHQEQLSSLTQAHEEALSSLTSKAEGLEKSLSSLETRRAGEAKELAEAQREAELLRKQLSKTQEDLEAQVTLVENLRKYVGEQVPSEVHSQTWELERQKLLETMQHLQEDRDSLHATAELLQVRVQSLTHILALQEEELTRKVQPSDSLEPEFTRKCQSLLNRWREKVFALMVQLKAQELEHSDSVKQLKGQVASLQEKVTSQSQEQAILQRSLQDKAAEVEVERMGAKGLQLELSRAQEARRWWQQQTASAEEQLRLVVNAVSSSQIWLETTMAKVEGAAAQLPSLNNRLSYAVRKVHTIRGLIARKLALAQLRQESCPLPPPVTDVSLELQQLREERNRLDAELQLSARLIQQEVGRAREQGEAERQQLSKVAQQLEQELQQTQESLASLGLQLEVARQCQQESTEEAASLRQELTQQQELYGQALQEKVAEVETRLREQLSDTERRLNEARREHAKAVVSLRQIQRRAAQEKERSQELRRLQEEARKEEGQRLARRLQELERDKNLMLATLQQEGLLSRYKQQRLLTVLPSLLDKKKSVVSSPRPPECSASAPVAAAVPTRESIKGSLSVLLDDLQDLSEAISKEEAVCQGDNLDRCSSCNPQMSS

SEQ ID NO: 296885 - protein, 729 aa, Artificial Sequence
  derived and/or modified sequence
MFPPSGSTGLIPPSHFQARPLSTLPRMAPTWLSDIPLVQPPGHQDVSERRLDTQRPQVTMWERDVSSDRQEPGRRGRSWGLEGSQALSQQAEVIVRQLQELRWLEEEVWLLRETSLQQKMRLEAQAMELEALARAEKAGRAEAEGLRAALAGAEVVRKNLEEGRQRELEEVQRLHQEQLSSLTQAHEEALSSLTSKAEGLEKSLSSLETRRAGEAKELAEAQREAELLRKQLSKTQEDLEAQVTLVENLRKYVGEQVPSEVHSQTWELERQKLLETMQHLQEDRDSLHATAELLQVRVQSLTHILALQEEELTRKVQPSDSLEPEFTRKCQSLLNRWREKVFALMVQLKAQELEHSDSVKQLKGQVASLQEKVTSQSQEQAILQRSLQDKAAEVEVERMGAKGLQLELSRAQEARRWWQQQTASAEEQLRLVVNAVSSCPLPPPVTDVSLELQQLREERNRLDAELQLSARLIQQEVGRAREQGEAERQQLSKVAQQLEQELQQTQESLASLGLQLEVARQCQQESTEEAASLRQELTQQQELYGQALQEKVAEVETRLREQLSDTERRLNEARREHAKAVVSLRQIQRRAAQEKERSQELRRLQEEARKEEGQRLARRLQELERDKNLMLATLQQEGLLSRYKQQRLLTVLPSLLDKKKSVVSSPRPPECSASAPVAAAVPTRESIKGSLSVLLDDLQDLSEAISKEEAVCQGDNLDRCSSCNPQMSS

SEQ ID NO: 296886 - protein, 171 aa, Artificial Sequence
  derived and/or modified sequence
MFPPSGQWDQTRGVVVVSAWETDHLCFCNSSGSTGLIPPSHFQARPLSTLPRMAPTWLSDIPLVQPPGHQDVSERRLDTQRPQVTMWERDVSSDRQEPGRRGRSWGLEGSQALSQQAEVIVRQLQELRWLEEEVWLLRETSLQQKMRLEAQAMELEALARAEKAGRAEAEG

SEQ ID NO: 296887 - protein, 153 aa, Artificial Sequence
  derived and/or modified sequence
MFPPSGSTGLIPPSHFQARPLSTLPRMAPTWLSDIPLVQPPGHQDVSERRLDTQRPQVTMWERDVSSDRQEPGRRGRSWGLEGSQALSQQAEVIVRQLQELRWLEEEVWLLRETSLQQKMRLEAQAMELEALARAEKAGRAEAEGLRAALAGA

SEQ ID NO: 296888 - protein, 188 aa, Artificial Sequence
  derived and/or modified sequence
MFPPSGSTGLIPPSHFQARPLSTLPRMAPTWLSDIPLVQPPGHQDVSERRLDTQRPQVTMWERDVSSDRQEPGRRGRSWGLEGSQALSQQAEVIVRQLQELRWLEEEVWLLRETSLQQKMRLEAQAMELEALARAEKAGRAEAEGLRAALAGAEVVRKNLEEGRQRELEEVQRLHQEQLSSLTQAHEE

SEQ ID NO: 296889 - protein, 118 aa, Artificial Sequence
  derived and/or modified sequence
MFPPSGSTGLIPPSHFQARPLSTLPRMAPTWLSDIPLVQPPGHQDVSERRLDTQRPQVTMWERDVSSDRQEPGRRGRSWGLEGSQALSQQAEVIVRQLQELRWLEEEVWLLRETSLQQ

SEQ ID NO: 296890 - DNA, 2349 bp, Artificial Sequence
  derived and/or modified sequence
atgttcccccccagcggcagcaccggcctgatcccccccagccacttccaggccagacccctgagcaccctgcccagaatggcccccacctggctgagcgacatccccctggtgcagccccccggccaccaggacgtgagcgagagaagactggacacccagagaccccaggtgaccatgtgggagagagacgtgagcagcgacagacaggagcccggcagaagaggcagaagctggggcctggagggcagccaggccctgagccagcaggccgaggtgatcgtgagacagctgcaggagctgagatggctggaggaggaggtgtggctgctgagagagaccagcctgcagcagaagatgagactggaggcccaggccatggagctggaggccctggccagagccgagaaggccggcagagccgaggccgagggcctgagagccgccctggccggcgccgaggtggtgagaaagaacctggaggagggcagacagagagagctggaggaggtgcagagactgcaccaggagcagctgagcagcctgacccaggcccacgaggaggccctgagcagcctgaccagcaaggccgagggcctggagaagagcctgagcagcctggagaccagaagagccggcgaggccaaggagctggccgaggcccagagagaggccgagctgctgagaaagcagctgagcaagacccaggaggacctggaggcccaggtgaccctggtggagaacctgagaaagtacgtgggcgagcaggtgcccagcgaggtgcacagccagacctgggagctggagagacagaagctgctggagaccatgcagcacctgcaggaggacagagacagcctgcacgccaccgccgagctgctgcaggtgagagtgcagagcctgacccacatcctggccctgcaggaggaggagctgaccagaaaggtgcagcccagcgacagcctggagcccgagttcaccagaaagtgccagagcctgctgaacagatggagagagaaggtgttcgccctgatggtgcagctgaaggcccaggagctggagcacagcgacagcgtgaagcagctgaagggccaggtggccagcctgcaggagaaggtgaccagccagagccaggagcaggccatcctgcagagaagcctgcaggacaaggccgccgaggtggaggtggagagaatgggcgccaagggcctgcagctggagctgagcagagcccaggaggccagaagatggtggcagcagcagaccgccagcgccgaggagcagctgagactggtggtgaacgccgtgagcagcagccagatctggctggagaccaccatggccaaggtggagggcgccgccgcccagctgcccagcctgaacaacagactgagctacgccgtgagaaaggtgcacaccatcagaggcctgatcgccagaaagctggccctggcccagctgagacaggagagctgccccctgcccccccccgtgaccgacgtgagcctggagctgcagcagctgagagaggagagaaacagactggacgccgagctgcagctgagcgccagactgatccagcaggaggtgggcagagccagagagcagggcgaggccgagagacagcagctgagcaaggtggcccagcagctggagcaggagctgcagcagacccaggagagcctggccagcctgggcctgcagctggaggtggccagacagtgccagcaggagagcaccgaggaggccgccagcctgagacaggagctgacccagcagcaggagctgtacggccaggccctgcaggagaaggtggccgaggtggagaccagactgagagagcagctgagcgacaccgagagaagactgaacgaggccagaagagagcacgccaaggccgtggtgagcctgagacagatccagagaagagccgcccaggagaaggagagaagccaggagctgagaagactgcaggaggaggccagaaaggaggagggccagagactggccagaagactgcaggagctggagagagacaagaacctgatgctggccaccctgcagcaggagggcctgctgagcagatacaagcagcagagactgctgaccgtgctgcccagcctgctggacaagaagaagagcgtggtgagcagccccagaccccccgagtgcagcgccagcgcccccgtggccgccgccgtgcccaccagagagagcatcaagggcagcctgagcgtgctgctggacgacctgcaggacctgagcgaggccatcagcaaggaggaggccgtgtgccagggcgacaacctggacagatgcagcagctgcaacccccagatgagcagctag

SEQ ID NO: 296891 - DNA, 2190 bp, Artificial Sequence
  derived and/or modified sequence
atgttcccccccagcggcagcaccggcctgatcccccccagccacttccaggccagacccctgagcaccctgcccagaatggcccccacctggctgagcgacatccccctggtgcagccccccggccaccaggacgtgagcgagagaagactggacacccagagaccccaggtgaccatgtgggagagagacgtgagcagcgacagacaggagcccggcagaagaggcagaagctggggcctggagggcagccaggccctgagccagcaggccgaggtgatcgtgagacagctgcaggagctgagatggctggaggaggaggtgtggctgctgagagagaccagcctgcagcagaagatgagactggaggcccaggccatggagctggaggccctggccagagccgagaaggccggcagagccgaggccgagggcctgagagccgccctggccggcgccgaggtggtgagaaagaacctggaggagggcagacagagagagctggaggaggtgcagagactgcaccaggagcagctgagcagcctgacccaggcccacgaggaggccctgagcagcctgaccagcaaggccgagggcctggagaagagcctgagcagcctggagaccagaagagccggcgaggccaaggagctggccgaggcccagagagaggccgagctgctgagaaagcagctgagcaagacccaggaggacctggaggcccaggtgaccctggtggagaacctgagaaagtacgtgggcgagcaggtgcccagcgaggtgcacagccagacctgggagctggagagacagaagctgctggagaccatgcagcacctgcaggaggacagagacagcctgcacgccaccgccgagctgctgcaggtgagagtgcagagcctgacccacatcctggccctgcaggaggaggagctgaccagaaaggtgcagcccagcgacagcctggagcccgagttcaccagaaagtgccagagcctgctgaacagatggagagagaaggtgttcgccctgatggtgcagctgaaggcccaggagctggagcacagcgacagcgtgaagcagctgaagggccaggtggccagcctgcaggagaaggtgaccagccagagccaggagcaggccatcctgcagagaagcctgcaggacaaggccgccgaggtggaggtggagagaatgggcgccaagggcctgcagctggagctgagcagagcccaggaggccagaagatggtggcagcagcagaccgccagcgccgaggagcagctgagactggtggtgaacgccgtgagcagctgccccctgcccccccccgtgaccgacgtgagcctggagctgcagcagctgagagaggagagaaacagactggacgccgagctgcagctgagcgccagactgatccagcaggaggtgggcagagccagagagcagggcgaggccgagagacagcagctgagcaaggtggcccagcagctggagcaggagctgcagcagacccaggagagcctggccagcctgggcctgcagctggaggtggccagacagtgccagcaggagagcaccgaggaggccgccagcctgagacaggagctgacccagcagcaggagctgtacggccaggccctgcaggagaaggtggccgaggtggagaccagactgagagagcagctgagcgacaccgagagaagactgaacgaggccagaagagagcacgccaaggccgtggtgagcctgagacagatccagagaagagccgcccaggagaaggagagaagccaggagctgagaagactgcaggaggaggccagaaaggaggagggccagagactggccagaagactgcaggagctggagagagacaagaacctgatgctggccaccctgcagcaggagggcctgctgagcagatacaagcagcagagactgctgaccgtgctgcccagcctgctggacaagaagaagagcgtggtgagcagccccagaccccccgagtgcagcgccagcgcccccgtggccgccgccgtgcccaccagagagagcatcaagggcagcctgagcgtgctgctggacgacctgcaggacctgagcgaggccatcagcaaggaggaggccgtgtgccagggcgacaacctggacagatgcagcagctgcaacccccagatgagcagctag

SEQ ID NO: 296892 - DNA, 2349 bp, Artificial Sequence
  derived and/or modified sequence
atgtttccgccatccggtagcaccgggttgatccccccctcacacttccaggcgcgccccttatcaactttgccaaggatggcccccacctggctgagcgacatcccgcttgtgcaacctccaggtcatcaagacgtttcagagaggcgtctcgacactcagcgtccccaggtgaccatgtgggagagggacgttagcagcgaccgacaggaacctggacggcgggggagatcttggggacttgaagggagccaggcccttagccagcaggctgaggtcattgttaggcagctccaggaactgaggtggctagaggaggaggtgtggcttctgagggagaccagcttgcaacagaagatgaggctggaagcccaggcaatggaacttgaggctctggcacgggccgagaaagcagggcgcgctgaggccgaggggctgcgggctgcacttgcgggcgccgaggtggtccgcaaaaatctagaggagggccgccagagggaactggaagaggtgcagaggctgcaccaggagcaactgagtagtctgacccaagcccacgaagaggcgttatcgtctctgaccagtaaagccgagggcctggagaaatcactgtctagcctggaaaccaggagagcaggagaggcaaaagagctagccgaagctcagagggaggccgaactcttgcggaaacagctctctaaaacccaggaagacttagaagctcaggtgacgctggtggaaaacctaagaaagtacgtgggagagcaggttccatctgaagtgcattcccaaacctgggaactcgaaaggcaaaagctgctggaaacgatgcaacatctgcaagaagatcgggattctctgcacgcaactgcagaacttttacaggtgcgcgtgcagagtctcacccacatactcgcactgcaggaggaagaactgacccggaaggtgcagcccagtgatagtctcgagccagagtttacccggaagtgtcagtccctgctgaatcgatggcgcgagaaggtattcgcactcatggtacagctgaaggctcaggaactggaacacagtgattcagttaagcagctgaaggggcaagtggcctccctgcaggagaaggttaccagccagtcccaagagcaagccatcttgcaacggagtctccaggataaggccgcagaagtagaggttgagagaatgggggccaaagggctgcagctcgaactctcgcgtgctcaggaggcgaggcggtggtggcagcagcagaccgcgagtgcagaagagcagctcaggttggttgtgaatgccgtgagcagcagccagatctggctagaaacaactatggcaaaggtcgaaggggcagccgctcaactgcccagtttgaataatcggctgagctacgcagtccgcaaagtgcacaccattcgcggcctgatcgcccgcaaactggctctggcacaacttaggcaggagtcttgtccgctccctccaccggtgaccgacgtctcactagagctccagcaattgcgtgaagagagaaaccggctggatgccgaactgcagcttagtgcaaggcttatccaacaggaggtgggccgggctcgcgaacaaggagaggcagaacggcagcaactctccaaggtggcacaacagctggagcaggaactccagcagacacaggagtccctcgcaagcttggggttacagctggaggttgcacgccagtgccaacaggagtcaaccgaggaggcagcctccctgagacaggagttgacccagcagcaagaactctatggtcaggccctgcaggaaaaggtcgctgaggtcgagacccggttgcgggaacaattgtccgatacagagcgacggttaaacgaagcccgccgggagcatgcaaaggccgttgtttcattgagacagattcagcggcgcgccgcacaggaaaaggagcggagtcaagagctgcgccgactccaggaggaggctcgcaaggaggaaggacagaggctggcacgaaggctccaagaactagaaagggacaagaatctgatgctcgccactttgcagcaggagggcctcctgtctcgttataagcaacagcgcctcctgacagtgctcccgtcccttctggataagaagaagtcagtggttagtagtcctagaccacctgaatgttcagccagcgcacctgtggccgccgctgtccccacgagggaatcgattaagggctccctgagcgtgctgcttgacgatcttcaggacctgtccgaggccatcagcaaagaagaagcagtctgtcagggggataatctggacagatgctcctcctgcaaccctcagatgtctagctag

SEQ ID NO: 296893 - DNA, 2190 bp, Artificial Sequence
  derived and/or modified sequence
atgtttccgccctccgggtctacaggcctcatcccgccctctcacttccaggctaggccactcagcaccctgcctcggatggcacccacgtggctgtctgacatccccttggtgcaacctcccggtcaccaggatgtatcggaacgcaggctcgacacacagcgcccacaggtgactatgtgggagcgagatgtgagctctgatcggcaggagccgggtagacgcggtcggagctggggactggaaggaagccaagccctctcccagcaggctgaagtaatcgtgagacagctgcaggagcttagatggttggaagaggaggtctggttgttgagggagacctcgctgcagcaaaagatgcgcctggaggctcaggccatggaactggaggctctggcccgcgccgaaaaggctggaagagccgaggccgagggactgagggcagccctcgccggtgctgaagtggtgaggaagaacctggaggagggcaggcaacgggagttagaagaggtgcagcgtcttcatcaggagcaattatctagcctgacccaggcccatgaagaagccttgtctagcctgacgagcaaagccgaaggactggaaaagtctttgagtagtctggaaacacggcgggcaggcgaagctaaggaacttgcagaagcacagagagaggcagagctcctgcggaagcaattgtccaagactcaggaggatctcgaagcacaagttaccctcgtggaaaatttacggaaatatgtcggcgaacaggttccaagcgaggtgcattcccagacatgggagcttgagagacaaaagctgctcgaaactatgcaacacctgcaggaagacagggacagcctgcatgcaaccgccgaactgctacaggtgcgtgtacagtcactcacccatatactcgctttacaggaggaggaattgactcgtaaggtacagccatccgatagcctcgagcctgaattcacccgcaaatgccaatctctcctcaacagatggagagaaaaagtcttcgccttgatggttcagttgaaggctcaagagctggagcactccgatagcgtgaaacaactcaaaggacaggttgcgagccttcaggagaaggttacctcccaatctcaggagcaagcaatcttgcagaggagtctgcaggacaaggccgctgaggtcgaagtggaaagaatgggcgctaaaggcctgcagctggagttaagccgggcccaggaagcccgaaggtggtggcagcaacagactgcatccgccgaggagcagctaagacttgtggtgaatgccgtctcctcctgtcccctgccccccccagttacggacgtatctctggagttacagcagctccgtgaagagcgtaatcggttagacgccgagctccagctgagtgcccgtctcattcagcaggaagttggaagagccagagagcagggagaggccgagcgccaacagctgtctaaagtggctcaacaactggagcaagagctgcaacagacgcaggagtcccttgcatcattaggccttcagctggaagtggccaggcaatgccagcaagagtccaccgaggaagccgcaagcctcaggcaagaactgactcaacagcaggaactgtatggtcaagccctgcaggagaaagtggctgaagttgaaacacgactgagagaacagttgagcgatacagaacgcagacttaacgaggcacggcgggagcatgctaaagccgtggtatccctgcgccagatccagagaagagcggcacaggaaaaggagcggagtcaggaacttagacggctgcaagaagaagctaggaaagaagagggccagcggctggcccgaaggttgcaggagctggagcgagacaaaaatctcatgcttgcaactctgcagcaggaaggactcctcagccggtataaacaacagagactcctgacagtgctgcctagcctgcttgacaagaagaaaagcgtagtcagctctcctagaccgcctgagtgcagtgcttcggccccagttgctgccgccgtgccaacgagagaatctatcaaaggctcactaagcgtgctgctggacgacctgcaagatctgagtgaagctatcagcaaggaggaggccgtgtgccagggggataatttagaccgctgttcctcttgtaacccacaaatgagtagctag

SEQ ID NO: 296894 - DNA, 2349 bp, Artificial Sequence
  derived and/or modified sequence
atgtttcctccctccggctctaccggcctgatccctccttcacacttccaagcccggccgctatctaccttgcccaggatggcccccacatggctgtctgacattcctctcgtacagccaccggggcaccaggatgtcagcgaaaggcgcctggacactcagagaccacaggtgactatgtgggagagggatgtgagctccgaccgacaggaacccgggaggaggggaagaagttggggcctcgaagggtctcaggccctgagtcagcaggcggaggttatcgtgcgccaactgcaggagctgaggtggctggaggaagaagtgtggctcctgagggagacatcactgcaacagaaaatgcgcctggaggcacaagccatggagctggaggctctggctagggcagagaaggctggccgggccgaggcggagggtctcagggcagctctcgccggggccgaggtggtccggaagaacttggaagagggacgccagcgggagctcgaggaggtgcaacgcctccaccaggagcaacttagctctttaacccaggcccacgaggaagccctgagctctctaacctcgaaggcagaggggctggagaaatcgctgtcatccttagagacacggcgggcaggggaagcaaaagaactggctgaggctcagagggaggctgagctgcttagaaaacagctttctaaaactcaggaagatctggaggcccaggtaacactggtcgaaaatctgaggaagtacgtcggcgaacaggtgccttcagaggtgcattctcagacttgggaacttgaaagacagaagctcctggagactatgcaacaccttcaggaggatagagactcacttcatgccacagccgagctcctgcaggtccgggtgcagagccttactcacatcttggcactccaagaggaagagttgactaggaaggtccagccgagcgattccttggaaccagagttcactagaaaatgccagagtctgctgaacagatggagagagaaagtattcgccctgatggtccagctgaaggcccaggagttagagcactcagattcagtaaagcaacttaaaggacaggtcgcctccttgcaggagaaagtgactagtcagtcacaggaacaggcaatcttgcagcgctctctgcaggacaaggcagcggaggtggaggtcgaaagaatgggagcaaagggccttcagttagagctaagtcgcgcgcaagaagccaggaggtggtggcagcaacagaccgccagcgctgaagaacagttgcgcttggtagtcaatgccgtttcaagctcacaaatatggctggagaccacgatggctaaggtggaaggggcagcagcccagcttccaagcctgaataacagactatcctatgccgtgcggaaggtgcatacaataaggggcctgatcgccagaaagctggctctggcccagctaaggcaagagagctgccccttaccgccgcctgtgactgacgtttctctcgaactgcagcagcttagggaggaaaggaatagattagatgcggagttgcagctcagtgcccgcctgattcagcaggaggtgggcagagcccgggaacagggtgaggctgagcgacagcagctctctaaggtggcccagcagctcgagcaagaactgcaacagacacaggaaagccttgcgagtttaggactccaactggaagttgccagacaatgccagcaagagtctaccgaggaagctgccagtctccgacaggagttaactcaacagcaggagctgtacggccaggcccttcaggaaaaagttgccgaggtagaaacgaggctaagggagcagctaagcgataccgagcgacgcctcaacgaggctcgtcgggaacacgccaaggcggtcgttagtctgagacagatacaaagacgagccgcccaggagaaagaacggtctcaggagctgcggaggctgcaagaggaggcgcggaaagaagaaggtcagaggctcgctcgtcggctccaggagctggagagagataagaatctgatgctggccactttgcaacaggagggccttctgtcaagatacaagcaacaacgtctcctgacagtactgccttccttgcttgacaaaaagaaatctgtcgtctcatctccaaggccacctgaatgcagcgcaagcgcacctgttgccgctgccgtaccaacccgggagtccatcaaaggtagcctgagcgttctcctagatgatctgcaagacctgagtgaagcaatcagcaaggaggaagcagtgtgccaaggagacaaccttgatcgctgcagtagctgtaacccccaaatgtcgagctag

SEQ ID NO: 296895 - DNA, 2190 bp, Artificial Sequence
  derived and/or modified sequence
atgtttccacccagtgggagcacaggcctcataccaccatctcacttccaggccaggcccctgagcacattacctagaatggctcctacctggttatccgacatccctcttgtgcagcctccaggccaccaggacgtgagcgagaggcgcctggatacccaaaggccgcaggtgactatgtgggaaagagacgtgagcagtgatcgccaggaaccaggaagacggggacggtcctggggactggagggaagtcaggctctgagccagcaggcagaagtcattgtcagacagctgcaggaactgagatggctggaagaggaagtttggttactgcgggagaccagcctccaacagaagatgcgcctggaggcccaggcgatggagcttgaagcattggcacgagccgaaaaggccggtcgggccgaggccgagggcctccgggcagccttggccggcgccgaggtcgtccggaagaatctcgaggagggtagacagagggagctcgaggaagtccaacgcctgcatcaggaacagttatcctcattaacacaagcccacgaagaggctttatccagcctcacttctaaagctgagggattagaaaagagcctgagttcacttgaaacccgtcgggccggagaggccaaagagctggcagaggcccagcgggaggccgaactactcaggaagcagctttccaagactcaagaagatctcgaagcgcaggtgaccttggtggaaaacctgaggaaatacgttggggagcaggtgccctcagaggtgcacagtcaaacttgggaactggaacggcagaagttactggagactatgcagcacctacaagaagatcgcgattccctccacgccaccgccgaacttctgcaagtgcgggtccagtcgctgacacatatcctcgctctccaggaggaagagctgacccgtaaagtacagccaagcgatagtctggaaccagaattcacacgcaagtgtcagagcttactcaacagatggagagagaaagtctttgcgctcatggtgcagttgaaagcccaagagctggaacattccgactccgttaagcaactgaagggtcaggtggcctccctgcaggagaaggtcacaagccaatctcaggagcaggccatcctccagagatccctccaggacaaggctgccgaggtcgaggtcgaaagaatgggagccaaggggctgcagctggaactgtcgagggcacaggaggccagacggtggtggcaacaacaaacagccagtgccgaagagcagctgaggctggtcgttaatgctgtctcctcttgtccactccccccaccagtaaccgatgttagccttgagttgcaacagctcagggaggaaaggaacaggttagatgccgagctccagctatccgccagattgatccagcaggaagtcgggcgggcacgggagcaaggtgaggctgaaagacagcagctttccaaagttgctcagcaactagagcaagagctacaacagacccaggaaagcctggcgtcgctgggcttacagctggaagtcgcgcgccagtgtcagcaggagagtacggaggaagccgcttcattgagacaggaactaacccaacagcaagagctttatggccaggctttgcaggaaaaggtggccgaagtggagacacgcctacgggagcaactctcagacactgagcgacgcctcaatgaagcccgccgggagcatgccaaagctgtggttagcctgaggcagattcagcggcgcgctgcgcaggagaaggagcgaagtcaggaactgcgaagattacaggaggaagcaaggaaggaggagggccagcggctggcacggcgcctgcaggagctggagcgggacaaaaatctcatgttggccacccttcagcaagaagggctgctgtcccggtataagcagcaacgactcctgactgtgctgccaagcctgctggacaagaaaaaatctgtcgtgagctcccccagaccacccgagtgctctgcctcagctccagtcgctgccgccgttcctacaagagagtccataaaaggaagtctgagcgtgctgctagacgatctacaggacctgtcagaggctattagcaaagaggaagccgtgtgtcagggggacaatctggaccggtgtagtagctgtaatccacagatgagttcttag

SEQ ID NO: 296896 - DNA, 2349 bp, Artificial Sequence
  derived and/or modified sequence
atgttccctccatctgggagcacaggtctgattccaccatcacattttcaggcccggccgctctccacactgccgagaatggccccgacctggctgtcagatatcccccttgtgcagccaccagggcaccaggacgtttctgaacgccgcttggacacacagaggcctcaagtcaccatgtgggagcgggacgtgtctagtgatcgacaggaaccaggacgcagaggtcgctcttggggattggaagggagccaagctttgagccagcaggcagaggtcattgtgcgacaactgcaggaactgcggtggttagaggaggaggtgtggcttttgcgagagacctctttacaacagaagatgcgccttgaggcgcaggctatggaactggaggcactggcacgcgctgaaaaggcaggtcgcgccgaggctgaaggcctgagggcagctctggcaggggccgaagtggtccggaaaaacctagaggagggccgccagagagagctcgaggaggtgcaaaggctgcatcaggagcagctgagtagcctaacccaggcgcacgaggaagccttatcctcactgacttccaaagcggagggtctcgaaaagtctctgtcctctctggagactaggagggcaggcgaggccaaagaactcgccgaggcccagagggaggccgaactcctgagaaagcaactctccaagactcaggaggaccttgaagcccaagtgacactggtagagaacctcagaaaatacgtcggcgagcaggttccatctgaggtgcacagccaaacttgggaactggagcggcagaaattgttggagaccatgcagcacttacaggaggatcgcgattcactgcatgccactgcggagctcctgcaggttcgagtgcagtccttaactcatatcctggccctgcaggaagaagaactgactagaaaggtgcagcctagtgacagcctggagccagagttcactcgcaagtgccagtcgctgctgaatcggtggcgtgagaaggtattcgcactgatggtgcagctgaaagctcaggagctggaacattctgactcagttaaacaactcaagggccaagttgcatccctccaggaaaaagtgacgagccagtcccaggaacaggctattctgcaacggtcccttcaagataaagctgcagaggttgaagtcgagcggatgggagcaaaggggctgcaactggagttatctcgagcacaagaggctcgaaggtggtggcagcagcaaacagcctccgctgaagagcagttaaggttggtggtaaacgctgtttcttcctcacagatctggttagagaccacaatggccaaggttgagggagcagctgcccagcttcccagcctgaacaaccgtctgagctacgccgtgcggaaggtccatacaatcagaggcctcatagctagaaagttagcccttgcacagttacggcaggaaagttgccctctgccacctcctgttacggacgttagcctggagcttcagcaattgcgggaggagcgaaatagattggacgccgaactgcagcttagcgctcgtcttatccaacaagaggtcggacgggccagagagcagggtgaagccgagagacagcagttatctaaggtggcacaacagctcgaacaggagctgcagcagactcaggaaagcctggcttccctaggcctgcagctggaagtcgcaaggcagtgccagcaggaatcaacagaggaggctgccagcctgcgtcaggagctgacacagcaacaagagctgtacggccaggcactgcaggaaaaagtcgcagaagtcgagacccgccttcgggagcagttgtccgatacagagagacgcttaaacgaggctaggcgcgaacacgccaaagccgtcgtgtccctcagacaaattcagcggcgggccgcacaggagaaggaacgctcacaggagttacggcggctccaggaagaagcccgcaaggaagagggacagcggctggcgaggcgattacaggagcttgaaagagataagaacctgatgttggctacactgcagcaggagggcctgctgtctcgttacaagcagcagaggcttttaacagttctcccttctttactggacaaaaagaaaagtgtggtttcttcacctcgcccgcccgagtgctcagcttccgcccccgttgccgccgcagtacctactcgggagtccataaaaggatccctctctgtactgctcgacgacctgcaagacctgtctgaggcaatttctaaggaagaagccgtgtgccagggggataacttggacagatgttcttcttgcaacccccagatgtctagctag

SEQ ID NO: 296897 - DNA, 2349 bp, Artificial Sequence
  derived and/or modified sequence
atgttccccccttccgggtccacaggtctaatccccccatctcacttccaggcccgacccctgagtactctccccagaatggcccctacttggcttagcgatatccctcttgtgcagccaccgggtcaccaggacgtgtcagagcgcagacttgatacccagaggcctcaggtcaccatgtgggagagggatgtaagctcggacagacaagagccgggacgccgcggacgctcatggggcctggaaggcagtcaagccctttcgcagcaggcagaagtcatcgttcggcagttgcaggaactgcgttggctggaggaggaggtgtggcttttgagggagacgagcctccagcaaaaaatgcgtttagaagcccaagccatggaactggaggctttagccagggcagaaaaagctggcagggctgaagccgaggggcttcgcgctgcgctcgcgggcgcggaggtggtgcggaagaacctagaagaaggccgccaaagagaattggaagaggtccagaggttgcaccaggaacaactgtcttccttaactcaggctcacgaggaggccttgagttcactcacgagcaaagctgagggcctggagaagagcctttcctccttagagacccggcgtgcaggcgaggccaaggaactcgccgaggctcagcgtgaggccgaactgctacgcaagcaattatctaaaacacaggaagatttggaagcacaagttaccctggttgaaaatttaaggaaatatgttggcgaacaggtgccgtctgaggtccacagccagacttgggagctcgaaaggcagaagctcttggaaacaatgcagcatctccaggaagacagggacagcctccatgctacggctgaacttttgcaagtcagagtgcaatcgctgacacatatccttgcccttcaggaggaggagctcactcggaaggttcagccctctgactcccttgagcctgaatttacccgtaaatgccagagcttgttgaatagatggcgagagaaagtgtttgccctcatggtgcagcttaaagctcaggagctggaacatagcgatagtgttaagcaacttaagggccaggtggctagcctccaggaaaaagtgaccagtcagtcgcaagagcaagcgatcctacagcgatccttacaggacaaagctgcagaagtggaagtggagcgcatgggcgccaaggggctgcagttggagctatcgcgagcacaggaagctcggaggtggtggcagcaacaaacagcctccgcagaggagcagctgagactcgtggtgaacgctgtatcaagttcccaaatatggctggagacaactatggccaaagttgagggtgcagctgctcagctgccatcactaaacaatcgcttgtcttatgccgtaaggaaggtacacacaataagagggctgattgcccgcaaactagcgctggctcaactacgtcaggagtcatgtcctctcccccccccagtgacggacgtctcccttgagctccagcagctgagggaagagcgcaacaggctagatgccgaattgcaattgtccgcccgactgatacagcaagaggttggcagggcccgcgagcagggagaggctgagcggcagcagctgtccaaagttgctcagcagctggagcaggagttacaacagacacaggaatctttagcctcactgggcttgcagctggaggtggcaaggcagtgccagcaggagtctactgaggaggcggcttctctcagacaagagctaactcagcagcaggaactctacggccaggcgctacaggagaaagtcgctgaggtggaaacccggctgagagaacagctaagcgatacagagaggcggctgaacgaggctcggcgggaacatgcaaaagccgtcgtatctctgcggcaaatccaaaggagagcagcgcaggaaaaggaacgaagtcaagagctaagacgactacaggaggaagcacgaaaagaagaaggtcagaggctggcacggcggctccaggagcttgagcgtgacaaaaatctgatgctggcaaccctgcagcaagaggggctactctccagatataagcaacagcggctactcacggtcctgcctagccttctcgacaagaagaaaagtgttgtatcctctccaagacccccagaatgctcggctagcgcccctgtggccgcagcagttcctactagggagtctattaagggatccctgagcgttctcctggatgacctgcaggatctttctgaggcaatttctaaagaggaagccgtgtgccaaggcgacaacttagatcgatgctccagctgcaacccccagatgtcaagctag

SEQ ID NO: 296898 - DNA, 2349 bp, Artificial Sequence
  derived and/or modified sequence
atgtttcctccttctggcagcacaggcctcatcccccccagccacttccaggcccggcccctgagcaccctgcccaggatggcccccacctggctgagtgacatccccctggtgcagcccccaggccaccaggatgtgtctgaaagaaggctggacacccagaggccccaggtgaccatgtgggagagagatgtgtccagtgaccggcaggagcccggccggcggggccgctcctggggcctggagggcagccaggccctgagccagcaggccgaggtgattgtgcggcagctgcaggagctgcgctggctggaggaggaggtgtggctgctgcgggagaccagcctgcagcagaagatgaggctggaggcccaggccatggagctggaggccctggcccgggcagagaaggccggccgggcagaggccgagggcctgcgggccgccctggccggggctgaggtggtgaggaagaacctggaggagggccggcagcgggagctggaggaggtgcagaggctgcaccaggagcagctgagcagcctgacccaggcccacgaggaggccctgagcagcctgaccagcaaggccgagggcctggagaagagcctgagcagcctggagacccggcgggccggggaggccaaggagctggccgaggcccagcgggaggccgagctgctgaggaagcagctgagcaagacccaggaggacctggaggcccaggtgaccctggtggagaacctgaggaaatatgtgggggagcaggtgcccagcgaggtgcacagccagacctgggagctggagcggcagaagctgctggagaccatgcagcacctgcaggaggaccgggacagcctgcacgccacagctgagctgctgcaggtgcgggtgcagagcctgacccacatcctggccctgcaggaggaggagctgaccaggaaggtgcagcccagcgacagcctggagcctgagttcaccaggaagtgccagagcctgctgaaccgctggagggagaaggtgtttgccctgatggtgcagctgaaggcccaggagctggagcacagcgacagcgtgaagcagctgaagggccaggtggccagcctgcaggagaaggtgaccagccagagccaggagcaggccatcctgcagaggagcctgcaggacaaggctgctgaggtggaggtggagaggatgggcgccaagggcctgcagctggagctgagccgggcccaggaggcccggcgctggtggcagcagcagacagccagcgctgaggagcagctgcggctggtggtgaatgctgtgagcagcagccagatctggctggagaccaccatggccaaggtggagggcgccgccgcccagctgcccagcctgaacaaccggctgtcctatgctgtgaggaaggtgcacaccatccggggcctcatcgccaggaagctggccctggcccagctgcggcaggagagctgccccctgcccccacctgtgacagatgtgtccctggagctgcagcagctgcgggaggagaggaaccggctggatgctgagctgcagctgagcgcccggctcatccagcaggaggtgggccgggcccgggagcagggcgaggccgagcggcagcagctgagcaaggtggcccagcagctggagcaggagctgcagcagacccaggagagcctggccagcctgggcctgcagctggaggtggcccggcagtgccagcaggagagcacagaggaggccgccagcctgcggcaggagctgacccagcagcaggagctgtatggccaggccctgcaggagaaggtggccgaggtggagacccggctgcgggagcagctgagtgacacagaaagaaggctgaatgaggcccggcgggagcacgccaaggctgtggtgtccctgcggcagatccagaggcgggccgcccaggagaaggagaggagccaggagctgcggcggctgcaggaggaggccaggaaggaggagggccagaggctggcccggcggctgcaggagctggagcgggacaagaacctgatgctggccaccctgcagcaggagggcctgctgagccgctacaagcagcagaggctgctgactgtgctgcccagcctgctggacaagaagaagtctgtggtgagcagcccccggcccccagaatgttctgccagcgcccctgtggccgctgctgtgcccacccgggagagcatcaagggcagcctgtctgtgctgctggatgacctgcaggacctgtctgaggccatcagcaaggaggaggccgtgtgccagggcgacaacctggaccgctgcagcagctgcaacccccagatgagcagctag

SEQ ID NO: 296899 - DNA, 2190 bp, Artificial Sequence
  derived and/or modified sequence
atgtttcctccttctggcagcacaggcctcatcccccccagccacttccaggcccggcccctgagcaccctgcccaggatggcccccacctggctgagtgacatccccctggtgcagcccccaggccaccaggatgtgtctgaaagaaggctggacacccagaggccccaggtgaccatgtgggagagagatgtgtccagtgaccggcaggagcccggccggcggggccgctcctggggcctggagggcagccaggccctgagccagcaggccgaggtgattgtgcggcagctgcaggagctgcgctggctggaggaggaggtgtggctgctgcgggagaccagcctgcagcagaagatgaggctggaggcccaggccatggagctggaggccctggcccgggcagagaaggccggccgggcagaggccgagggcctgcgggccgccctggccggggctgaggtggtgaggaagaacctggaggagggccggcagcgggagctggaggaggtgcagaggctgcaccaggagcagctgagcagcctgacccaggcccacgaggaggccctgagcagcctgaccagcaaggccgagggcctggagaagagcctgagcagcctggagacccggcgggccggggaggccaaggagctggccgaggcccagcgggaggccgagctgctgaggaagcagctgagcaagacccaggaggacctggaggcccaggtgaccctggtggagaacctgaggaaatatgtgggggagcaggtgcccagcgaggtgcacagccagacctgggagctggagcggcagaagctgctggagaccatgcagcacctgcaggaggaccgggacagcctgcacgccacagctgagctgctgcaggtgcgggtgcagagcctgacccacatcctggccctgcaggaggaggagctgaccaggaaggtgcagcccagcgacagcctggagcctgagttcaccaggaagtgccagagcctgctgaaccgctggagggagaaggtgtttgccctgatggtgcagctgaaggcccaggagctggagcacagcgacagcgtgaagcagctgaagggccaggtggccagcctgcaggagaaggtgaccagccagagccaggagcaggccatcctgcagaggagcctgcaggacaaggctgctgaggtggaggtggagaggatgggcgccaagggcctgcagctggagctgagccgggcccaggaggcccggcgctggtggcagcagcagacagccagcgctgaggagcagctgcggctggtggtgaatgctgtgagcagctgccccctgcccccacctgtgacagatgtgtccctggagctgcagcagctgcgggaggagaggaaccggctggatgctgagctgcagctgagcgcccggctcatccagcaggaggtgggccgggcccgggagcagggcgaggccgagcggcagcagctgagcaaggtggcccagcagctggagcaggagctgcagcagacccaggagagcctggccagcctgggcctgcagctggaggtggcccggcagtgccagcaggagagcacagaggaggccgccagcctgcggcaggagctgacccagcagcaggagctgtatggccaggccctgcaggagaaggtggccgaggtggagacccggctgcgggagcagctgagtgacacagagcggcggctgaatgaggcccggcgggagcacgccaaggctgtggtgtccctgcggcagatccagaggagagctgcccaggagaaggagaggagccaggagctgcggcggctgcaggaggaggccaggaaggaggagggccagaggctggcccggcggctgcaggagctggagcgggacaagaacctgatgctggccaccctgcagcaggagggcctgctgagccgctacaagcagcagaggctgctgactgtgctgcccagcctgctggacaagaagaagtctgtggtgagcagcccccggcccccagagtgcagcgccagcgcccctgtggccgctgctgtgcccacccgggagagcatcaagggcagcctgtctgtgctgctggatgacctgcaggacctgtctgaggccatcagcaaggaggaggccgtgtgccagggcgacaacctggaccgctgcagcagctgcaacccccagatgagcagctag

SEQ ID NO: 296900 - DNA, 2349 bp, Artificial Sequence
  derived and/or modified sequence
atgttcccccccagcggcagcaccggcctgatcccccccagccacttccaggcccgccccctgtccacactcccacgcatggcccccacttggctgtccgacatacctctggtgcaaccgccaggccatcaggacgtctctgagaggcgactagacacccagcgaccacaggtaacaatgtgggagcgggatgtttcatccgacaggcaagagcctgggcgaaggggaagaagttgggggctggaggggagtcaggcactctctcagcaggccgaggtgatcgtgaggcagctgcaggagcttaggtggcttgaagaggaggtatggcttcttagggagacatctcttcagcaaaaaatgcggttggaggcgcaggctatggagttggaggcattagctagggccgagaaagcaggtcgcgcagaggcagaaggccttagggccgccttggcaggcgctgaagtggttcgaaagaacttagaagaaggccgccagcgagaactcgaggaggtccagcgcctgcatcaagagcagctgagtagcctgacacaggcgcatgaagaggccctcagcagcctgacttcgaaggcagagggcctcgagaagtctctgagttccctggaaacccgccgtgccggcgaagcaaaagagctcgctgaggctcaaagggaagcagagttgctgcggaaacagctgtcgaagacgcaggaagacctggaggcgcaggtgaccttggtagagaacctccgtaaatacgtgggggagcaggtcccctctgaggttcactctcaaacttgggagttggaacgccaaaagcttctcgagactatgcagcatcttcaggaggacagggattccctccacgccactgcagagctgctgcaagtgcgtgtgcagtctttaacacatattttggcactgcaggaggaggagctgacaaggaaggtgcagcctagcgattccctcgagcctgagtttaccaggaagtgtcagagtctcctgaatcgctggcgggagaaagtttttgccctgatggtgcagcttaaggcgcaggagctcgagcattctgatagtgttaagcagctcaaaggtcaggtcgcatctttgcaggaaaaggttactagccagtcccaggaacaggccatcttacagcgctcactacaggataaggccgccgaggtagaggtggagaggatgggcgcaaagggattacagttggaactttctcgtgcacaggaagcccgaagatggtggcagcagcagacagcatccgcggaggaacagctgagacttgtggtgaatgcagtgtcatcctctcaaatctggctggagaccactatggcaaaggttgaaggtgcggccgctcagctgcctagtctgaacaaccggctaagttacgcagtgcgcaaggtgcacactattaggggattgattgccagaaagctcgcacttgcacagctccggcaggagtcctgtcccctccccccccctgtgactgatgtgtccctggagctccagcagctgcgggaggaacggaatcgtcttgacgccgaactgcagttgagtgctcgcttaattcaacaggaagtcgggagggccagggagcagggggaagctgagcggcagcagctctctaaggttgcccagcagctggagcaggaactgcagcagactcaggagtccctggcttctctaggcctccagctggaggtggccaggcaatgccagcaggagagcaccgaagaggccgcctccttacgacaagaactcacacagcagcaggagctgtatggccaggctcttcaggagaaagttgcagaagttgaaactcggctcagagagcaactctccgacaccgagcgcagattgaatgaagctcgccgcgagcacgctaaagctgtggttagcctccgccagattcagagaagggccgctcaagagaaggagcgctcccaggaattgcgaaggctgcaagaggaagctcggaaggaggagggccagaggttggctcgtaggctgcaagagctcgagcgtgacaaaaacctcatgctggccaccctgcagcaggagggcctcctgagcagatacaaacagcagcggctgctgaccgttctcccctccctgcttgacaagaagaaaagtgtagtctcctcccctagaccaccggagtgtagtgccagtgccccggtagccgctgcagttcccacccgagaaagcattaaagggtccctgtctgtgctcctggatgacctacaggacttgtctgaagcaattagcaaagaggaggcggtgtgtcagggagacaatctggatagatgctcttcatgcaatcctcagatgagcagttag

SEQ ID NO: 296901 - DNA, 2190 bp, Artificial Sequence
  derived and/or modified sequence
atgttcccccccagcggcagcaccggcctgatcccccccagccacttccaggctaggcccctgtccactctgcctaggatggctccaacctggctgagcgatattccactagtccaaccaccaggccatcaggacgtctctgagaggagacttgacacccagcggcctcaggtgacaatgtgggaaagagacgtgagtagtgatcgacaagaaccaggacggaggggccgtagctggggtctcgaaggctctcaagctctatcccagcaggcagaggtgattgtgcgccagctacaggaactgaggtggttggaggaagaggtgtggctgttgcgcgaaacgtcattacagcagaaaatgaggctggaggcacaggccatggagctagaggcactggcacgagccgaaaaagcagggcgcgccgaagccgagggactgcgggcggctcttgccggcgcggaggtggttagaaaaaatttggaggaggggcgccagcgcgaacttgaagaagttcagcgactgcaccaagagcagctttcaagtctcacacaagcacatgaagaggccctctcttcacttacgtcaaaggccgagggcctggagaagagtctgtcttccttagagactcgaagagccggagaagctaaggagctcgccgaagcgcaacgggaagcagaactgctgagaaaacagctctccaagacccaggaggacttggaggctcaagtgaccttagtggagaacttgcgaaaatacgtcggagagcaggtgccctcagaggtccactcccagacttgggagctcgaaaggcaaaagctgttggagacaatgcagcacctccaggaggaccgggattctctccacgccactgccgagctgctccaggtgcgggtgcagagtctcacgcatattctggccctgcaggaagaggagctcacaagaaaagttcaaccttcagactcgctggaacccgaatttacgagaaagtgccagtccctcctaaaccggtggagggagaaagtcttcgccctgatggtgcagctcaaggctcaggaactggagcacagtgacagcgtaaaacagctcaagggacaggtggcgagcttgcaagaaaaggtcacttcccagtcccaggagcaggccatcctgcagaggagcctgcaggataaggccgccgaagttgaagtggagcgcatgggcgccaaggggttacaactggaactgtctagagcccaggaagcacgccgctggtggcagcaacagactgcttctgctgaggaacagcttagactggtcgtcaacgccgtttcttcatgtcccctgccccctcccgtcaccgacgtgtcattggaattgcagcagctgagagaggaacggaacaggctggacgccgaattgcagttgagcgcccgcctcatccagcaggaagtgggaagagccagagaacagggtgaagccgagagacagcaactatctaaggtggcccaacaactagaacaagaactccagcagactcaggaaagcctcgcctccctgggcttgcagctggaagtggcccgccagtgtcaacaggagtctaccgaggaagcagctagcctgcgccaggaactgactcagcagcaggaactgtacgggcaggcactccaagaaaaagtcgctgaggtggaaactcgccttagagagcagctcagcgacaccgaacgccgactgaacgaggcccggcgcgaacatgccaaggccgtagtgtccctgcgccaaatccagcgccgggcggcccaggagaaggagcgatcgcaagagctgcgccgccttcaagaagaagctcgcaaggaagaagggcagcgcctggcccggagactgcaggagctcgaacgagataagaaccttatgttagcaacgcttcagcaggaagggctcctctctcgttataagcagcagaggctgttgaccgtactgccaagtctgctggataaaaagaagtcagtggtctcatccccccgccctcccgagtgtagcgccagtgcccctgtggctgctgcagttcctacacgggagtcaataaagggaagcctatcagtcctcctggatgatctgcaggatttgagtgaggctatttccaaagaggaggccgtctgtcagggagacaacctagaccgatgcagttcttgtaaccctcagatgtccagttag

SEQ ID NO: 296902 - DNA, 2349 bp, Artificial Sequence
  derived and/or modified sequence
atgttcccccccagcggcagcaccggcctgatcccccccagccactttcaggcgcgtccattgtccacgttgccccggatggcgcctacttggttaagcgatattccactggtccaaccccctggacaccaggatgtctctgagaggagactggacacccagcgtccccaggtaactatgtgggagagggacgtctcaagtgacaggcaggaacccggtcgccgagggcgatcgtggggcctcgaaggctcgcaagctttatcacaacaggcagaggttattgttagacagctgcaggaactgcgatggcttgaagaggaggtgtggctgctgcgggaaaccagcctgcaacagaagatgagactcgaagcccaggcaatggaactggaagccttagcaagagcagagaaggctgggcgtgcggaagcagagggtcttagggctgcactcgcaggtgcagaggtggttaggaagaatctggaggaaggacgccaaagagaacttgaagaggtgcagagattgcatcaggaacaactaagcagtttaacacaggctcacgaggaagcattgtcatcccttacttctaaagcagaggggctggagaagagtctgagctctctggagacccgacgggcaggggaggctaaggagctcgcggaggctcaacgcgaggcggaactcctgcgaaagcagttatcaaaaactcaagaagacctcgaagcgcaggtgacgcttgtggagaacctccgcaagtacgtgggagagcaagtgccctccgaagtgcactctcaaacttgggagctagagcgccaaaagttacttgaaacgatgcagcacctgcaggaggatcgggacagtcttcacgctacagccgaattgctgcaggttcgagtacagtctttaactcacatcctcgcactgcaagaagaggagctgactaggaaagtccagccgagtgactcactggaacccgagttcacccgcaaatgtcagtctttactcaacaggtggcgagagaaagtcttcgccctgatggtgcagcttaaggctcaggagcttgaacactctgatagcgttaagcagctcaaagggcaggtagctagcttgcaggaaaaagtgactagccagtcacaggaacaggccatattgcagcggagcctgcaggataaggctgcagaggtagaagtggaacgcatgggcgctaaagggctccagctcgaattgagccgggcgcaagaagctcgcagatggtggcaacaacagaccgccagtgccgaggaacagctcagattggtcgtgaacgccgttagctctagtcagatctggctggaaaccactatggcaaaggtcgaaggagccgcagcccagctgccaagtctgaacaataggctaagctacgcggtgcggaaggtgcacactattcggggactgatagctagaaagcttgccttagcacagctgcggcaggagtcctgcccacttcctccccccgtaaccgacgtgtcactggaactgcagcaactcagggaagaacgcaatcgactggacgctgaactacagctgagtgcgagattgatccagcaggaagtgggccgcgcccgagaacagggagaagccgagcgccaacagttatctaaggtggcccaacagttggaacaggagttgcaacagactcaggaatcccttgctagccttggattgcagctggaggtggcccgccagtgtcagcaggagtcaacagaagaggcggctagcctgagacaagagctcacgcagcagcaggaattatatggacaggcgctgcaggagaaggtggccgaagtggaaacaagactgagagagcagctcagtgacaccgagaggcgactcaatgaggcacgaagagagcacgcgaaggccgtcgtgtcccttagacagatacagcgccgagcagcccaggagaaagagagatctcaggagctcaggcgcttgcaggaggaagcccgcaaggaagagggacagaggctggcacgtaggttacaggaactggagagagataaaaatttaatgcttgccaccctccaacaggaaggcctgttgtcacggtacaagcagcaaagactccttacagtgctcccatcactgctcgataagaagaagagtgtggtatcgtcccctagacctccagaatgtagcgcctcagctcctgttgccgccgctgtgccaacaagggagtccataaaaggcagcctgtcagtgttgctggatgatctccaggacctgagcgaggcgatatccaaagaagaggcagtttgccagggggataacttagaccgttgtagcagctgcaatccgcagatgagttcgtag

SEQ ID NO: 296903 - DNA, 2190 bp, Artificial Sequence
  derived and/or modified sequence
atgttcccccccagcggcagcaccggcctgatcccccccagccacttccaggccaggccattgtctactctgcctcgcatggcacctacttggttgtctgacatccccctcgtccagccacccggtcaccaggatgtgagcgagaggcggctcgacactcaacgaccccaggtaacaatgtgggagagggatgtatccagcgatagacaggagcccggtagacggggaagatcttgggggttagaggggtcacaggcactgtcccagcaggctgaagtcatcgtgcgccagctgcaagagctgaggtggctggaggaagaggtctggctcctccgcgaaaccagcctgcagcagaaaatgaggttggaggcacaggccatggagctggaggcattggcaagggcggagaaggctggacgtgccgaggctgagggactcagagcagctttggctggggctgaggtggtcaggaagaacctggaagaaggaaggcagcgggagctagaggaggtccagagactccatcaggagcagctgtccagtctgacacaggcacacgaagaagccctgtccagcctcacctctaaggcagaggggctggagaagagtctcagcagtctggagactcgtcgcgctggcgaggcaaaggagttggcagaagcccagcgggaagccgagctgctgaggaagcagctgagtaagactcaggaagatcttgaagcgcaagtgacattggtggagaacctccgtaaatacgtaggagaacaggtgccttctgaagttcactctcagacatgggagctggaaaggcagaagctgctggagacaatgcaacacctgcaggaagatcgcgattctctgcacgccactgcagagttgctgcaggtgagggtgcaatctctcacacacatcctggccctgcaggaggaggagctgacacggaaggtgcagccaagtgactcattagagccagagttcacccgtaaatgtcaatctctgctcaacaggtggcgggagaaagtgttcgccttgatggtccaactgaaagcccaggagctggagcactctgactccgtcaagcagctgaaagggcaggtcgcctctcttcaggagaaggtcacgtcccagtcacaggaacaggccatcctgcagcggagcttgcaggataaggctgcagaagtggaggtggaacgaatgggtgctaaaggtttgcagctggagctcagtagagctcaggaggcccgcaggtggtggcagcagcagaccgcatctgccgaggaacagctacggttggtggtaaacgcggtgagctcctgtcctcttcccccgccagttaccgacgtcagcctcgagttacagcagctccgggaggagcgtaatagactcgacgcagaactccagctctctgcccggttgattcagcaggaggtgggacgggcgcgggagcagggagaggctgagcgccaacaactttcaaaagtggctcagcagctggagcaggagttacagcaaacacaagagtccctcgcgtctctgggcctgcaactggaggtagcaaggcagtgtcagcaagaatccacagaggaggcagcctctttacggcaggaattaactcaacaacaggagttgtatggccaggccctgcaagagaaggtagcggaagttgagacccgtctgagggaacaactgagtgataccgaacgccgtttgaacgaagccagaagggagcacgctaaagcagtggtatctctcaggcagattcaacgacgagccgcacaagaaaaggagaggtcacaggaattgcgcaggctccaggaggaagctcggaaagaagagggccaacgtctcgccagacgactgcaagagctggaaagggacaaaaatctaatgctggccactctccaacaagagggtcttctctcgaggtataagcagcaacggcttctcaccgtgttaccatctctgctcgacaaaaaaaagtctgtggtttcgagtccacgaccaccagaatgctccgcttcggctccagtggccgcagccgtgccaacgcgtgagagcatcaaggggtccctcagcgttctattggatgatttgcaggacttgagcgaggccattagcaaagaggaagctgtgtgccagggcgataacctcgaccggtgcagctcgtgtaacccccagatgagttcttag

SEQ ID NO: 296904 - DNA, 2349 bp, Artificial Sequence
  derived and/or modified sequence
atgttcccccccagcggcagcaccggcctgatcccccccagccactttcaggcccgcccactgtcaacgctacctaggatggcgccaacttggctgagcgacatcccactagttcagcctcctgggcatcaggacgtgagtgagagaaggctggatacccaacggcctcaagtgacaatgtgggagcgagatgtgtccagcgatagacaagaacctgggcggcggggccggtcctggggcctcgagggctctcaggcgctgtctcaacaggccgaagtgattgtgcggcagcttcaggagttgagatggctggaggaggaggtgtggctcttgcgggaaacgtcgctccagcagaagatgagactggaagcgcaagccatggagctggaggcgttagcccgcgcagagaaggctggcagagctgaagcagagggcctgagggcagccctcgcaggagcagaggtggtgcggaaaaatcttgaggagggcaggcagcgagaactggaagaagttcaacggctgcaccaagagcagttgtcctcactcacccaggcacacgaagaggccctcagttctctgacctctaaggccgaagggttagaaaagagcctgtcctctcttgaaactagacgcgccggtgaggccaaggagctcgccgaggctcagcgcgaggcagagctacttcggaaacaattgtcaaagacccaagaagacctagaagcccaagtgactctggtggagaacttaagaaagtacgtgggcgagcaggtgccctccgaagtgcactcccagacttgggagctcgaaaggcagaagctgttggaaaccatgcagcatctgcaggaggatagggacagcctgcatgccactgccgagctgctgcaggtcagagttcagagcttgacccatatcttagccttgcaggaggaggagctgactagaaaagtgcaaccaagcgactccctggagcctgagttcaccagaaagtgccaaagtctgttgaaccggtggagggaaaaagtgttcgcacttatggttcagttaaaggctcaggaactggagcactccgatagtgtaaagcagctcaagggccaagtcgcctcgctccaagaaaaagtaacatcacagtcccaagagcaggccattctccagcggagtctgcaggacaaggccgcagaggtcgaggtcgaacgtatgggagccaaggggctccagctggagctgagtcgagcacaagaggcaagaaggtggtggcagcagcagaccgcctctgccgaagaacagctgaggttagtggtgaacgccgtttcttcatcccagatctggcttgagacgactatggcaaaagtcgaaggcgcagccgctcaactgccaagtctgaacaatcggttgtcctacgctgtgcgtaaggtgcacactattcgcggtctaattgcccgcaaattagcactggctcagttgaggcaggaatcctgtccattgcccccacccgtgaccgatgtatccctagaactgcaacagttgcgggaggagcggaatcgattagacgctgagctgcagttatcagcacggctcatccagcaggaggtaggccgcgctagagagcagggcgaggccgagaggcagcagctctccaaagttgctcagcaacttgagcaggaactgcagcagactcaggagtctttggcctctttgggactgcagctcgaagtggcccgtcagtgccagcaggaatccacagaggaggctgcaagcctcagacaagagttgactcaacagcaggagctgtatggccaagctctacaggaaaaggtcgcagaggtggaaacgcgcctccgggagcagttgtccgacactgaaaggagactgaatgaggctcgccgggagcacgccaaagccgtcgttagcctgaggcaaattcagaggagggcagcacaggagaaggaacgttcccaggaattacgccgcttgcaggaggaggcccgtaaggaggagggccagcggctggctcggcgcttacaggaattagagagagacaagaacctcatgctggcaacactccagcaggaaggtctcctgtcccggtacaaacagcagcgtcttcttactgtcttgccctcgctgctggacaaaaaaaagagcgtggtgtcttccccacggccacccgaatgttcggcttcagcaccggtggcggcggccgtgccgactcgagagagcattaaggggtcgctgtctgttctgttggatgaccttcaggacctctccgaggccatctctaaagaagaagctgtatgccagggtgataatctggacagatgtagctcatgtaaccctcagatgagttcatag

SEQ ID NO: 296905 - DNA, 2349 bp, Artificial Sequence
  derived and/or modified sequence
atgttcccccccagcggcagcaccggcctgatcccccccagccactttcaggcacgccctctcagcactcttcctcggatggctccaacatggctgagcgatatccctcttgtgcagccacccggccatcaggacgtgtccgagcgccggcttgacactcagcggcctcaggttacgatgtgggaaagagacgtaagctccgacagacaggagcctggccggcgagggagatcttggggtctcgaagggagccaggccctgagccagcaagccgaggttatcgtacgccagcttcaggaacttcggtggctggaggaagaggtatggctgttgcgcgaaacttcgctccaacagaagatgcggcttgaagcgcaggcaatggaattagaagccttagcgagggcagagaaagccggcagagccgaggctgagggccttcgggctgccctcgcaggggcagaagtagtacgcaagaacctggaagaaggccggcagcgcgagttagaggaggtgcagcggctgcaccaggaacagctttctagtctcacacaggcccacgaagaagctctgagctcactcacctccaaggctgaaggcctggaaaagtccctgtctagtctggagacaagacgcgctggtgaagcaaaggaattggccgaagcacaaagagaggccgaactgctgagaaaacagctgagcaaaacccaggaggacctggaagcccaggtgaccctggtggagaacctgcgcaagtacgtcggcgagcaggttccttcggaggtacacagccagacctgggagctggaaagacagaaactcctggagactatgcagcacctgcaggaggacagggactctctgcacgccacagctgagctccttcaggttcgcgttcaatctctgacgcatattttagccctgcaagaagaggaactaaccaggaaggtgcaaccatcagacagcttggagccagagttcactcggaaatgccagtctttattaaatagatggagggaaaaggtgtttgctttaatggtgcagttaaaggcacaggagctggaacattccgacagcgtgaagcagctaaagggccaggtcgcctccttgcaggagaaagtgacctcacagtcccaagaacaggccattctacagagatcgcttcaagataaggccgctgaggtggaagtggaacgcatgggtgcaaaggggctacagctagagttgagccgcgctcaggaggccagaaggtggtggcagcagcaaacagccagtgccgaagagcagctccgacttgttgtgaacgccgtgagttccagtcagatctggctagagaccacgatggccaaggttgaaggtgccgccgcccagctgccttcactgaacaatcggctaagttatgccgtgcggaaagtccacaccattcgcggactcattgccagaaagctcgcactcgcacagctgcgtcaggaatcgtgcccactcccccctcccgtgactgacgtttccttggaactgcagcagcttagagaggagagaaaccgcttggatgcggagctgcagctctcagccaggcttatacaacaagaggtgggacgggctcgtgaacagggcgaagctgagcgacaacagctgagtaaggtcgctcagcagttggagcaggagcttcagcaaacccaggagtccctggcttccctggggctgcagctggaagtggctcggcagtgtcaacaagaatcaaccgaagaagctgccagtctgcgacaggaactgactcagcagcaagagttgtatggacaagcattgcaagagaaagttgctgaggtcgaaaccagacttcgtgaacagctatccgacacggaacggcgcctgaacgaagcgaggcgcgagcatgcgaaggccgtcgtgtccctgcgtcaaattcagagacgtgccgcccaggagaaggagcgcagtcaggagctccgtaggctgcaggaggaggcccgtaaagaggagggacagcgcctggctcgacgcctccaagagttggagagggacaaaaacctgatgttagcaaccttgcagcaggaaggtctcctgagccgttataaacagcagagactgctgaccgtcctgccaagtctcctggacaaaaaaaaaagcgtcgtgtcctcaccaagaccccctgaatgcagtgcctctgcgcctgtcgccgccgcagtcccaacgagagagtctattaagggatctctgagcgtgctactggacgacctgcaggatctgtccgaggctatcagcaaggaggaagcggtttgccagggagataacctcgatcggtgtagctcctgcaacccacaaatgagctcatag

SEQ ID NO: 296906 - DNA, 2349 bp, Artificial Sequence
  derived and/or modified sequence
atgttcccgccttccggcagcaccggcctcataccaccgtcacactttcaggcaaggcccctctctaccctgccgagaatggccccaacctggctctctgacattcccctggtgcaaccgcctggacaccaggatgtatctgaaagacgcctggacacacagagaccccaggtgaccatgtgggaacgtgacgtgagctccgaccggcaggagcctggtcggaggggcaggagctggggtctagagggatcccaggccttatctcagcaggcagaggtcattgtgagacagctgcaagaactgaggtggttagaagaagaagtctggctgttaagagaaacttcattgcagcaaaagatgcgcctggaggcccaggccatggaactcgaagccctcgctcgcgcagaaaaggccggtcgcgcagaggctgaaggcctgcgcgctgctctggcgggtgctgaagtcgtgaggaagaacttggaagaggggcgtcagcgagagctcgaagaagtgcagagattgcatcaggagcagcttagtagcttaacccaagcacacgaggaggcccttagttccctgacaagtaaggcagagggactagagaagtctctgtcctcacttgaaacacgacgcgctggagaggccaaagaactggcagaggctcaaagggaagcagaacttctccggaagcagctatccaaaacccaggaggatctggaggcacaagtgaccctagtcgagaatttgcgaaagtatgtgggtgaacaggtgccgagtgaggtgcactcccaaacctgggagctagagaggcagaaacttctggagacaatgcagcacctgcaggaggatagggattctctgcatgccaccgcagaactattacaagtgagggtccagtcactgactcatatcctggccttgcaggaagaggaactaaccagaaaagttcagccgagcgattctctagagccggagtttacaaggaaatgccagtccctcctcaaccgttggcgggaaaaggtttttgctcttatggtgcagttaaaagcccaggagctggagcactccgactcggtcaagcagctgaaaggacaggtggcctcccttcaagaaaaggttacgagtcaaagtcaggagcaggctatactccaacgcagtctgcaggataaggccgcagaggtggaggtagagcggatgggcgctaaaggacttcagttagaactctcgcgcgcacaggaagcaaggcgttggtggcagcagcaaacggcgagcgcagaggaacagttgcgcctcgtcgtcaacgcagtgtcgtcttctcagatttggctggaaaccactatggctaaagtcgagggggcagctgctcagttgccttcccttaataatcgattgagttacgccgttcgaaaagtgcacaccatcaggggtctgatagcaaggaaactggccctggcgcagttgcgtcaggagtcttgtcccctgccaccacctgttaccgatgtcagcctggagctgcagcagttacgagaggaacggaaccggctcgacgccgaactgcagctttccgcccgactcattcaacaagaagtgggaagggccagagagcagggagaggcagagcgccagcagttatcaaaggtggcccagcagttggaacaggaactgcagcagacccaggaatctctcgctagtctaggccttcagctcgaggtagcacgtcagtgccagcaggagtcgacagaagaggctgcgtcgctgaggcaggaacttacccaacagcaggagctgtatgggcaagctctgcaggaaaaggtggctgaggtggaaacaagactgagagagcagctttcagatacagagagacgcctgaatgaggcacgacgggagcatgcaaaagccgtggtgagcttaaggcagatccagcgacgggcagcgcaggaaaaggagcgatctcaggagctgcggaggctgcaggaggaggcccgaaaggaggagggacaaaggctcgctcgccgtctgcaggagctcgagcgtgacaaaaacttaatgttagcaacactgcagcaagaggggttgctgagccggtacaagcagcaacggttattgacagtgctgccctcccttctggataaaaagaagagtgtggtgtcgtctccaagacctccagagtgtagcgctagtgcacccgtcgctgcagcagtgcctacccgggaaagcatcaaggggtccctgtccgtgctgctggacgacctgcaggatctgtctgaggcaatctctaaagaagaggccgtgtgccaaggagacaacttagaccgatgttcaagttgtaacccacagatgagctcttag

SEQ ID NO: 296907 - DNA, 2190 bp, Artificial Sequence
  derived and/or modified sequence
atgtttccgccttctgggtctaccggactgattccgccttcacacttccaagctcggcctctgtctaccctccctaggatggccccaacctggctgtcggacatccctctcgtgcagcccccaggacaccaagacgtgagcgagcgaagactcgatacccagagaccgcaggttacgatgtgggaacgggatgtcagctccgatcgtcaggagccagggaggcggggacgtagctgggggctcgaaggatcgcaagccttgtctcagcaagctgaggtaattgtgcggcagctgcaggagctccggtggttggaggaggaagtgtggcttctgcgcgaaactagtctgcagcagaaaatgcggttggaggcccaagccatggagctggaagctctggctcgcgctgaaaaggccggtcgggctgaggcagaaggcctgcgcgctgcattagcgggagctgaggtggtgcggaaaaatctggaggaaggcagacagagggaattggaggaggtgcagaggctccaccaggaacagttgagcagcttgacacaggcccacgaggaagccctcagttccctgacatctaaagctgaagggctggagaaaagtctctcttccttggagacgaggagagccggagaagccaaggagctggctgaggctcagcgggaagcagagctgctgcgtaagcagttgtccaagacacaggaggatttagaggcgcaggtcactctagtggagaatctgagaaagtatgtcggtgaacaggtcccctccgaagtgcatagccagacttgggaattagagagacagaagctgctggagactatgcaacatcttcaggaggacagggactctctacacgccacagccgagctcctccaggtgagagtacagagtctgacgcacatcttagcactccaggaagaagagcttacgaggaaggtgcagcctagcgattctttggagcccgagtttacgaggaaatgtcaatcattgctgaatcgctggagggaaaaagttttcgccttgatggttcaattgaaggcacaagagttggagcattctgacagcgtaaagcagctgaaaggacaagtcgcgagtcttcaggagaaggtgactagccaatcccaggaacaagctatccttcagcggagcttgcaggataaagccgcagaagtagaagtggagaggatgggcgcaaaaggtttacagctggagctgtcgcgagctcaggaggctagaaggtggtggcagcagcagacagctagcgctgaggagcagctccggctggtggtgaatgctgtgtccagttgtccactaccccctcccgtgaccgacgtgagcctggagctgcagcaactcagagaagagcggaatcgactggatgcagaacttcagctctctgcacgtctgatacagcaggaagttggacgtgccagggaacagggggaggcagaaagacagcagttgagtaaagtggcacaacagttggagcaggagctacagcagacgcaggagagcctcgcgtccctggggctgcagctagaggtggctagacagtgtcagcaggagtctacagaagaggcagcctctctccggcaggagctgacccaacaacaggagctgtacggacaggccctgcaggaaaaggtggctgaagtggaaactagattgcgggagcagctcagcgatacggaacgcaggctcaatgaggccagacgggagcatgcgaaggccgtggttagcctgcggcagatacagagaagagccgctcaggagaaggagagatctcaggagctacgccgactgcaggaggaagcccgtaaagaagaagggcagaggctggccagacggctgcaggagcttgagagggacaaaaacctcatgctggcaaccctgcagcaggaaggcctgctgagccgctacaaacagcagcgattgctgacggtgctccccagcctgctggataagaagaaatcagtggttagctctccccgaccaccagaatgttcagccagcgcccctgtggcagccgctgtccccacacgcgagagcatcaagggtagtctgagtgtactgttagacgacctgcaggatctctccgaggccatcagcaaggaagaggcagtttgccagggcgacaacttagatcggtgcagcagttgcaatccacagatgtcaagttag

SEQ ID NO: 296908 - DNA, 2349 bp, Artificial Sequence
  derived and/or modified sequence
atgtttcctccgagcggatccactggccttatccccccaagtcactttcaagcccgtccactgtctacgctacctcggatggccccaacctggctaagtgacataccacttgttcaaccacccggtcatcaggacgtatcagagcgtaggctggatacacagagaccccaggtaaccatgtgggaaagggacgtttcgagtgaccgccaggagccgggacgaaggggtcgctcatggggtcttgagggctcacaggccctcagccagcaggcagaggtcatagtgcgccagttgcaggaattgaggtggctcgaggaggaggtttggctccttcgagagacctcacttcagcagaaaatgagactggaggctcaggcgatggagctggaagccctggccagggccgagaaggccggaagggccgaagctgagggccttcgagcggcactcgcaggagccgaggtggttcggaaaaatctcgaagaggggagacagcgggagctcgaggaggtgcagagactccatcaagagcagctttcctcactgacgcaagcccacgaggaggccctgagcagcctgactagtaaggctgaaggcctcgagaagtctctgtcatctctcgaaaccaggcgcgctggcgaagcaaaggaattggccgaagctcaaagggaggccgagctgctccgcaagcagctgtctaagacacaggaagacctggaagcacaagtgactctggtcgagaacctgagaaagtatgtgggcgagcaggttcctagcgaggttcatagccagacatgggagctcgagaggcagaagctcctcgaaactatgcagcacctgcaggaggatagagactccctccacgctacagcagagcttctacaggtgcgggtgcagtctctcactcacatcttggcattacaagaagaggagctcacccggaaagttcagccttccgatagcctggagccggaatttaccaggaagtgccagtctctgctgaatagatggcgggaaaaagtgttcgctctcatggtacagctgaaggctcaagaactagagcattccgactccgtcaagcagttaaaaggtcaggttgccagtctgcaagagaaggtgacatcacagtcacaggaacaggcgatcctgcagcgctcactgcaggacaaagcagcggaggtggaagtggaaagaatgggagccaagggcctgcagttggagttatctcgtgctcaggaggccagacgttggtggcagcaacagacggcatctgctgaggagcagctcaggctggtagtcaatgctgtcagcagcagtcagatctggctggagacgactatggctaaggtggagggagcggcagcacagctgccatcacttaacaacaggcttagttacgctgtgcgtaaggtgcacaccatacgcggtcttatagcacgcaagctagctctggcccagctccggcaggagagctgccccctgccgccaccagtgaccgacgtcagcttagagctccagcagctgcgggaggagaggaatcgcttggacgctgagctccagctgtcagcacggttgatccaacaagaggtgggccgtgccagggagcagggcgaggctgagcgacagcagctctccaaagtcgcccagcagctggagcaggagctccagcagactcaggagagccttgcctcactcggattgcagttagaagtggctcggcaatgccagcaggagtccaccgaagaagctgcaagcttaagacaagaactaacccagcagcaggagctgtacgggcaagctctccaggagaaagtggcagaggtcgagaccagactgagggagcagctttcagacaccgaacgacgacttaacgaagctaggcgggaacatgccaaggcagtggtttccctgaggcagattcagcgacgtgcagctcaagagaaagaacgttcacaggagctcaggagactccaagaggaagctagaaaagaagaaggccagcgacttgctcgacgcctgcaggagttagagcgggataagaacctgatgctggccacactgcagcaagagggactcctatctaggtataagcagcagcgactgcttactgttctcccatcactcctggacaaaaagaaatctgtcgtctctagccctagaccacccgaatgctcagctagtgctccggtcgccgctgctgtgcccacacgggaatctattaaaggaagcctcagcgtactgcttgacgacctgcaagatctctctgaggctatatcaaaggaggaggctgtatgtcaaggcgataacctggatcgatgcagttcctgtaacccgcaaatgagttcctag

SEQ ID NO: 296909 - DNA, 2190 bp, Artificial Sequence
  derived and/or modified sequence
atgttccctccatctggttctacgggccttattcccccaagtcattttcaggcgcgacccctgagcaccctgcccagaatggctcccacgtggctttcagacatacccctcgtgcagcctcccggtcaccaggacgtgtcagagcgcagactggacacccaacgtcctcaggtgaccatgtgggaaagggacgtctcaagcgaccgtcaggaacccggtaggagagggaggagctggggtctggaaggttcccaggcactcagccagcaggctgaggtgatcgtacggcagctgcaggaactgcggtggcttgaggaagaggtgtggctcctccgagagacatccttgcaacagaaaatgcggttagaggcccaagcaatggaactcgaagccctcgcccgagctgagaaggctgggcgtgccgaggcggaagggttgcgcgcagccctggcgggagctgaggtggtgcgcaaaaacctggaagagggtcggcagagggaattggaggaagtgcagcggttacaccaggagcagctttcttccctgacccaggctcatgaagaggctctgtcgagtctcacaagcaaggccgaaggactggaaaagtccctgtcaagcctcgagactagacgtgcaggggaagccaaagagcttgccgaggcgcagagagaggcagagctcttgaggaagcagttgagcaaaacacaggaggatctcgaagcccaggttaccctcgtagaaaacctaaggaaatatgtgggcgaacaggtgccctccgaagttcactctcaaacctgggagctggaacgtcagaagcttctcgaaacaatgcagcatcttcaagaggatcgggattccttgcatgccaccgcagagctgctgcaggttcgcgtacagagcctgactcatatcctcgccctgcaagaggaagagttaacccgtaaggtgcagccctccgactctcttgagcctgaattcacccgtaagtgccagtccctcttgaatcggtggcgagagaaggtgtttgcactcatggtgcagctcaaagcacaagagcttgagcactccgactccgttaagcagcttaaagggcaagtggcttcactccaggaaaaagtaacctctcagtcccaggagcaggcaatactacaacgctccttgcaggataaggcagcagaggtggaggtggagcggatgggagccaaggggctgcagctggaactcagtagggcccaagaggcaaggaggtggtggcaacagcagaccgcatctgccgaggaacagctaagacttgtggtgaacgcagtttctagttgccccctaccaccaccagtaacagacgtgtctcttgagctgcagcaactccgcgaagagcgcaacagattggatgccgagttgcaattatccgctcggctcatccagcaggaagtcggacgagccagggagcaaggcgaggcagagcggcaacagctttcaaaagttgctcagcaattagaacaggaattgcaacagactcaagagtccctcgcctctcttggcctgcaactggaggtggcccgacagtgccagcaggaaagcaccgaagaggccgcttccttgcgccaagaattgacacagcaacaagaactttacggccaggcactgcaggagaaagttgcggaggtggagacacgtctcagggagcagctgagcgatactgaacggaggctgaatgaagcaagacgcgaacacgctaaagctgtggtaagcctccgccagattcagagacgagcggctcaagaaaaagaacggagccaggaactgcggcgactacaggaggaagcgcgaaaagaagagggccaaagactggctcgcaggctgcaagagcttgaacgggacaaaaatctcatgcttgctacacttcaacaggaaggcttgctgagtcggtacaaacaacagaggcttttaacagtactgccttccctgctggataagaagaaaagtgttgtaagctcacctagacctccagaatgcagcgcttctgctcctgtagcggctgccgttccaacaagagaatccataaagggatcactctcagttcttctagatgatctccaagatctgagtgaggcgattagtaaggaagaagccgtctgtcaaggcgataacctagaccgctgctcctcttgtaacccccagatgtcttcctag

SEQ ID NO: 296910 - DNA, 2349 bp, Artificial Sequence
  derived and/or modified sequence
atgttccctccatccggttccaccgggctcatccccccttcccatttccaggccagaccgttgtccaccctgccccgtatggcccctacgtggctcagtgatattcccttagtacaaccgcctggccaccaggatgtgtcagaaaggcgtctggatacccaacggccacaggtaaccatgtgggagcgggacgtctcaagcgacagacaggagccgggacggaggggaaggtcttggggactcgagggcagtcaagcattaagccagcaggcggaggtcatcgtccgacagctacaagagcttagatggcttgaagaagaagtttggctgttaagggagacatcgctacaacagaaaatgagactcgaggctcaggcaatggagctcgaagctttggccagggcagaaaaggccggaagggccgaggctgagggtctgcgcgcagccctggccggagctgaggtggtgaggaaaaatctggaagaaggcagacagcgcgagctcgaagaggtacagaggctgcatcaggaacaactgtcctctctgacacaggcccatgaagaggctctatctagtcttactagcaaggccgagggccttgagaaaagcctgagctctctcgaaacccgccgtgcgggagaggccaaagagctggccgaggcacaacgggaagccgaactgctacgcaaacagctgtctaagacccaggaggacctggaggcgcaggtgaccttggtcgagaatttaaggaagtacgtcggcgagcaggttccctcagaagtccactcacagacctgggagttggagcgccaaaagctgttggagacaatgcaacatctgcaggaggaccgggattcacttcatgcgactgctgagttgctgcaagtgcgcgtacagagtcttacacatatccttgccctgcaggaagaggagctgaccagaaaggtgcagcccagcgattctttggaaccagagtttaccaggaagtgccagtcattgctgaatcggtggcgcgagaaggtattcgctctgatggtccagctcaaggcacaagagctagaacatagcgactcagtgaaacagctcaaaggccaagttgccagcttgcaggagaaggtcacgagccagtctcaggagcaggcaatcctacagaggtcactccaagacaaagccgctgaggtagaggtggagagaatgggtgctaagggattgcagttggagctgagtcgagctcaggaagctcgcaggtggtggcagcagcagactgcgtcggcagaagaacagttgagattagtggtcaacgcagtttctagcagccagatctggctggagaccacaatggccaaggttgaaggcgctgcagctcaactgcccagcttgaacaaccggttgagctacgcggtgagaaaggtgcatacaatccggggtttgatcgctcgcaaactggctttagctcagctgcggcaggagtcgtgtcccctgccccctcctgtcactgatgttagcttagagctgcagcagctgcgcgaggaacgcaatcggttggatgcagaactccagctgtctgccagactgattcagcaagaggtggggcgagcaagagaacagggggaggccgaacggcagcaattgtctaaggtcgcccagcagctcgagcaggagttgcagcagactcaggaaagcctcgcttcactaggccttcaactggaggtggccaggcagtgtcagcaagagtccacagaggaagccgcatcattgcgacaggagctgacacagcagcaggagctctatggccaggcactccaagaaaaggtcgcagaggtggaaacccgactgcgtgaacagctttctgacaccgagagaaggctcaatgaggctaggcgagagcacgccaaggcagttgtgtccctccgccagattcaaagaagggcagcgcaggaaaaggaaagatcacaggagttacggcgtctccaagaggaagcaaggaaggaagaaggtcagcggcttgcgagacggttacaggagctggagcgggataaaaacctgatgctggccacactccaacaagagggcttgctgtccaggtacaaacagcagcgactcctaaccgtgctgcccagcttactggataagaaaaaatccgtcgtgtccagtcccaggcccccagaatgtagcgcctcggcgcctgtggccgctgcagtacccacccgggagtccataaaaggctctctgtccgtattgctcgatgatttgcaggacctgtcagaagcaatctccaaggaagaggccgtttgccagggcgacaatttggaccgttgttcctcttgcaatccgcagatgtctagctag

SEQ ID NO: 296911 - DNA, 2349 bp, Artificial Sequence
  derived and/or modified sequence
atgtttcctccttcagggtctacaggccttatcccaccgagccacttccaagccagaccactgagcaccttaccaaggatggcacccacctggctgtcagacatcccattagtgcagccacccggacatcaggatgttagcgagcgtcgactcgatacccaaagaccgcaagtaacaatgtgggaacgagatgtcagttcagaccgacaggagccaggaaggcgtggtaggtcttggggattggaaggcagccaggctttgagccaacaagccgaagtaattgttcggcagctccaagagctccggtggctcgaggaagaagtgtggttactgagagagacctctcttcaacagaagatgcgactggaggcacaggctatggaactggaggcactggccagggcagagaaagctggtcgcgcagaggctgaaggcctgcgggctgccctggctggggcagaagtggttcgtaagaatctcgaagaggggcgacagcgcgaattggaggaggtgcagcggcttcatcaggagcagctgagctccctgacccaagctcatgaggaagcactgtcaagtcttaccagcaaagctgaggggctggagaaatctctgagcagtctggagacccgaagggcaggcgaagccaaggagctggccgaagcgcagagggaggcggaattattacgaaagcagctctcaaagacacaggaggatctcgaggctcaggtcacactggtggaaaatctgcggaagtacgttggagaacaggtcccctctgaagtgcattcccagacgtgggaattggagcgccagaagttactggaaacgatgcagcatctgcaggaggatagggacagcctacacgctactgccgaacttctgcaagtgcgggttcagtcactgacacacattttggccctccaggaggaggagctgaccagaaaggtgcaacctagcgatagtctggagcccgagttcactcgtaagtgtcagtctttgctcaacaggtggagagagaaggtgttcgccttaatggtccagctgaaagcccaagagttggaacattctgacagcgtgaagcagctaaaagggcaggtcgccagtttgcaagaaaaagtaactagccagtcccaggagcaggctattttgcagcgcagcctccaagacaaggcagcggaggtggaagtagaaagaatgggtgcaaaaggtctgcagttagagctgtcacgagcacaggaagcccgtcgatggtggcagcaacagacggcgagcgccgaggagcagttgcggcttgtggttaacgctgtctcttcaagccagatatggctggagaccaccatggccaaggtggaaggtgcagccgcacagctgccatctctgaacaatcggctgagctacgctgtccgcaaagttcacacgataaggggccttatagcccgaaagctcgccttagcccagctcaggcaggaatcttgtcccctgccacccccagttactgacgtctcactcgagctgcagcagctgcgcgaggaaagaaacaggttggatgccgaactgcaactgtccgcacgactgattcagcaggaggtggggcgtgcccgtgaacagggagaggccgagaggcaacagttgtctaaagtggcacagcagctcgaacaggagctgcagcaaacccaggagtccctggcttctctgggccttcaactcgaagtcgctcggcagtgtcagcaagagtccaccgaagaggcagccagcctgcggcaggaacttactcagcagcaggagctctatgggcaggcactgcaggagaaggtggctgaagtcgagactagattaagagaacagttgtcagataccgaacggaggctcaacgaagccaggagagagcacgccaaagccgttgtatcgctgaggcaaattcagcgacgggctgctcaagagaaggaaagatcacaggagctgcgacgcctccaggaagaggcacggaaagaggagggacagagactggctcgtagactacaagagctggaaagggacaagaaccttatgctggccaccctgcagcaggagggattgctctcgcgttacaaacagcagaggctgctgaccgtcctgccttcgcttctggataaaaagaagagtgtcgttagttcacctcgcccacccgagtgctcggccagcgcccctgttgctgccgctgtcccgacaagggagtccattaaaggaagcttgtctgtcctgctggacgatctccaggacctgtccgaagctatctctaaagaagaagctgtctgccagggcgacaatctggatagatgtagcagctgcaacccccaaatgtcctcatag

SEQ ID NO: 296912 - DNA, 4168 bp, Artificial Sequence
  derived and/or modified sequence
atttaaacgggagacggcgcgatgcctggcactcggtgcgccttccgcggaccgggcgacccagtgcacggccgccgcgtcactctcggtcccgctgaccccgcgccgagccccggcggctctggccgcggccgcactcagcgccacgcgtcgaaagcgcaggccccgaggacccgccgcactgacagtatgagccgcacagcctacacggtgggagccctgcttctcctcttggggaccctgctgccggctgctgaagggaaaaagaaagggtcccaaggtgccatccccccgccagacaaggcccagcacaatgactcagagcagactcagtcgccccagcagcctggctccaggaaccgggggcggggccaagggcggggcactgccatgcccggggaggaggtgctggagtccagccaagaggccctgcatgtgacggagcgcaaatacctgaagcgagactggtgcaaaacccagccgcttaagcagaccatccacgaggaaggctgcaacagtcgcaccatcatcaaccgcttctgttacggccagtgcaactctttctacatccccaggcacatccggaaggaggaaggttcctttcagtcctgctccttctgcaagcccaagaaattcactaccatgatggtcacactcaactgccctgaactacagccacctaccaagaagaagagagtcacacgtgtgaagcagtgtcgttgcatatccatcgatttggattaagccaaatccaggtgcacccagcatgtcctaggaatgcagccccaggaagtcccagacctaaaacaaccagattcttacttggcttaaacctagaggccagaagaacccccagctgcctcctggcaggagcctgcttgtgcgtagttcgtgtgcatgagtgtggatgggtgcctgtgggtgtttttagacaccagagaaaacacagtctctgctagagagcactccctattttgtaaacatatctgctttaatggggatgtaccagaaacccacctcaccccggctcacatctaaaggggcggggccgtggtctggttctgactttgtgtttttgtgccctcctggggaccagaatctcctttcggaatgaatgttcatggaagaggctcctctgagggcaagagacctgttttagtgctgcattcgacatggaaaagtccttttaacctgtgcttgcatcctcctttcctcctcctcctcacaatccatctcttcttaagttgatagtgactatgtcagtctaatctcttgtttgccaaggttcctaaattaattcacttaaccatgatgcaaatgtttttcattttgtgaagaccctccagactctgggagaggctggtgtgggcaaggacaagcaggatagtggagtgagaaagggagggtggagggtgaggccaaatcaggtccagcaaaagtcagtagggacattgcagaagcttgaaaggccaataccagaacacaggctgatgcttctgagaaagtcttttcctagtatttaacagaacccaagtgaacagaggagaaatgagattgccagaaagtgattaactttggccgttgcaatctgctcaaacctaacaccaaactgaaaacataaatactgaccactcctatgttcggacccaagcaagttagctaaaccaaaccaactcctctgctttgtccctcaggtggaaaagagaggtagtttagaactctctgcataggggtgggaattaatcaaaaacctcagaggctgaaattcctaatacctttcctttatcgtggttatagtcagctcatttccattccactatttcccataatgcttctgagagccactaacttgattgataaagatcctgcctctgctgagtgtacctgacagtagtctaagatgagagagtttagggactactctgttttagcaagagatattttgggggtctttttgttttaactattgtcaggagattgggctaaagagaagacgacgagagtaaggaaataaagggaattgcctctggctagagagtagttaggtgttaatacctggtagagatgtaagggatatgacctccctttctttatgtgctcactgaggatctgaggggaccctgttaggagagcatagcatcatgatgtattagctgttcatctgctactggttggatggacataactattgtaactattcagtatttactggtaggcactgtcctctgattaaacttggcctactggcaatggctacttaggattgatctaagggccaaagtgcagggtgggtgaactttattgtactttggatttggttaacctgttttcttcaagcctgaggttttatatacaaactccctgaatactctttttgccttgtatcttctcagcctcctagccaagtcctatgtaatatggaaaacaaacactgcagacttgagattcagttgccgatcaaggctctggcattcagagaacccttgcaactcgagaagctgtttttatttcgtttttgttttgatccagtgctctcccatctaacaactaaacaggagccatttcaaggcgggagatattttaaacacccaaaatgttgggtctgattttcaaacttttaaactcactactgatgattctcacgctaggcgaatttgtccaaacacatagtgtgtgtgttttgtatacactgtatgaccccaccccaaatctttgtattgtccacattctccaacaataaagcacagagtggatttaattaagcacacaaatgctaaggcagaattttgagggtgggagagaagaaaagggaaagaagctgaaaatgtaaaaccacaccagggaggaaaaatgacattcagaaccagcaaacactgaatttctcttgttgttttaactctgccacaagaatgcaatttcgttaacggagatgacttaagttggcagcagtaatcttcttttaggagcttgtaccacagtcttgcacataagtgcagatttggctcaagtaaagagaatttcctcaacactaacttcactgggataatcagcagcgtaactaccctaaaagcatatcactagccaaagagggaaatatctgttcttcttactgtgcctatattaagactagtacaaatgtggtgtgtcttccaactttcattgaaaatgccatatctataccatattttattcgagtcactgatgatgtaatgatatattttttcattattatagtagaatatttttatggcaagatatttgtggtcttgatcatacctattaaaataatgccaaacaccaaatatgaattttatgatgtacactttgtgcttggcattaaaagaaaaaaacacacatcctggaagtctgtaagttgttttttgttactgtaggtcttcaaagttaagagtgtaagtgaaaaatctggaggagaggataatttccactgtgtggaatgtgaatagttaaatgaaaagttatggttatttaatgtaattattacttcaaatcctttggtcactgtgatttcaagcatgttttctttttctcctttatatgactttctctgagttgggcaaagaagaagctgacacaccgtatgttgttagagtcttttatctggtcaggggaaacaaaatcttgacccagctgaacatgtcttcctgagtcagtgcctgaatctttattttttaaattgaatgttccttaaaggttaacatttctaaagcaatattaagaaagactttaaatgttattttggaagacttacgatgcatgtatacaaacgaatagcagataatgatgactagttcacacataaagtccttttaaggagaaaatctaaaatgaaaagtggataaacagaacatttataagtgatcagttaatgcctaagagtgaaagtagttctattgacattcctcaagatatttaatatcaactgcattatgtattatgtctgcttaaatcatttaaaaacggcaaagaattatatagactatgaggtaccttgctgtgtaggaggatgaaaggggagttgatagtctcataaaactaatttggcttcaagtttcatgaatctgtaactagaatttaattttcaccccaataatgttctatatagcctttgctaaagagcaactaataaattaaacctattctttctgtg

SEQ ID NO: 296913 - DNA, 2648 bp, Artificial Sequence
  derived and/or modified sequence
actcggtgcgccttccgcggaccgggcgacccagtgcacggccgccgcgtcactctcggtcccgctgaccccgcgccgagccccggcggctctggccgcggccgcactcagcgccacgcgtcgaaagcgcaggccccgaggacccgccgcactgacagtatgagccgcacagcctacacggtgggagccctgcttctcctcttggggaccctgctgccggctgctgaagggaaaaagaaagggtcccaaggtgccatccccccgccagacaaggccctgcatgtgacggagcgcaaatacctgaagcgagactggtgcaaaacccagccgcttaagcagaccatccacgaggaaggctgcaacagtcgcaccatcatcaaccgcttctgttacggccagtgcaactctttctacatccccaggcacatccggaaggaggaaggttcctttcagtcctgctccttctgcaagcccaagaaattcactaccatgatggtcacactcaactgccctgaactacagccacctaccaagaagaagagagtcacacgtgtgaagcagtgtcgttgcatatccatcgatttggattaagccaaatccaggtgcacccagcatgtcctaggaatgcagccccaggaagtcccagacctaaaacaaccagattcttacttggcttaaacctagaggccagaagaacccccagctgcctcctggcaggagcctgcttgtgcgtagttcgtgtgcatgagtgtggatgggtgcctgtgggtgtttttagacaccagagaaaacacagtctctgctagagagcactccctattttgtaaacatatctgctttaatggggatgtaccagaaacccacctcaccccggctcacatctaaaggggcggggccgtggtctggttctgactttgtgtttttgtgccctcctggggaccagaatctcctttcggaatgaatgttcatggaagaggctcctctgagggcaagagacctgttttagtgctgcattcgacatggaaaagtccttttaacctgtgcttgcatcctcctttcctcctcctcctcacaatccatctcttcttaagttgatagtgactatgtcagtctaatctcttgtttgccaaggttcctaaattaattcacttaaccatgatgcaaatgtttttcattttgtgaagaccctccagactctgggagaggctggtgtgggcaaggacaagcaggatagtggagtgagaaagggagggtggagggtgaggccaaatcaggtccagcaaaagtcagtagggacattgcagaagcttgaaaggccaataccagaacacaggctgatgcttctgagaaagtcttttcctagtatttaacagaacccaagtgaacagaggagaaatgagattgccagaaagtgattaactttggccgttgcaatctgctcaaacctaacaccaaactgaaaacataaatactgaccactcctatgttcggacccaagcaagttagctaaaccaaaccaactcctctgctttgtccctcaggtggaaaagagaggtagtttagaactctctgcataggggtgggaattaatcaaaaacctcagaggctgaaattcctaatacctttcctttatcgtggttatagtcagctcatttccattccactatttcccataatgcttctgagagccactaacttgattgataaagatcctgcctctgctgagtgtacctgacagtagtctaagatgagagagtttagggactactctgttttagcaagagatattttgggggtctttttgttttaactattgtcaggagattgggctaaagagaagacgacgagagtaaggaaataaagggaattgcctctggctagagagtagttaggtgttaatacctggtagagatgtaagggatatgacctccctttctttatgtgctcactgaggatctgaggggaccctgttaggagagcatagcatcatgatgtattagctgttcatctgctactggttggatggacataactattgtaactattcagtatttactggtaggcactgtcctctgattaaacttggcctactggcaatggctacttaggattgatctaagggccaaagtgcagggtgggtgaactttattgtactttggatttggttaacctgttttcttcaagcctgaggttttatatacaaactccctgaatactctttttgccttgtatcttctcagcctcctagccaagtcctatgtaatatggaaaacaaacactgcagacttgagattcagttgccgatcaaggctctggcattcagagaacccttgcaactcgagaagctgtttttatttcgtttttgttttgatccagtgctctcccatctaacaactaaacaggagccatttcaaggcgggagatattttaaacacccaaaatgttgggtctgattttcaaacttttaaactcactactgatgattctcacgctaggcgaatttgtccaaacacatagtgtgtgtgttttgtatacactgtatgaccccaccccaaatctttgtattgtccacattctccaacaataaagcacagagtggatttaattaagcacacaaatgctaaggcagaattttgagggtgggagag

SEQ ID NO: 296914 - protein, 737 aa, Artificial Sequence
  derived and/or modified sequence
MAHRKLESVGSGMLDHRVRPGPVPHSQEPESEDMELPLEGYVPEGLELAALRPESPAPEEQECHNHSPDGDSSSDYVNNTSEEEDYDEGLPEEEEGITYYIRYCPEDDSYLEGMDCNGEEYLAHSAHPVDTDECQEAVEEWTDSAGPHPHGHEAEGSQDYPDGQLPIPEDEPSVLEAHDQEEDGHYCASKEGYQDYYPEEANGNTGASPYRLRRGDGDLEDQEEDIDQIVAEIKMSLSMTSITSASEASPEHGPEPGPEDSVEACPPIKASCSPSRHEARPKSLNLLPEAKHPGDPQRGFKPKTRTPEERLKWPHEQVCNGLEQPRKQQRSDLNGPVDNNNIPETKKVASFPSFVAVPGPCEPEDLIDGIIFAANYLGSTQLLSERNPSKNIRMMQAQEAVSRVKNSEGDAQTLTEVDLFISTQRIKVLNADTQETMMDHALRTISYIADIGNIVVLMARRRMPRSASQDCIETTPGAQEGKKQYKMICHVFESEDAQLIAQSIGQAFSVAYQEFLRANGINPEDLSQKEYSDIINTQEMYNDDLIHFSNSENCKELQLEKHKGEILGVVVVESGWGSILPTVILANMMNGGPAARSGKLSIGDQIMSINGTSLVGLPLATCQGIIKGLKNQTQVKLNIVSCPPVTTVLIKRPDLKYQLGFSVQNGIICSLMRGGIAERGGVRVGHRIIEINGQSVVATAHEKIVQALSNSVGEIHMKTMPAAMFRLLTGQETPLYI

SEQ ID NO: 296915 - DNA, 2214 bp, Artificial Sequence
  derived and/or modified sequence
atggcacatcgaaagctcgagtcagtggggagtggaatgttggatcaccgggtgcgccctgggccggtgccccattctcaggagcctgagagcgaggatatggagctgccactggaaggatatgtgcctgagggcctggagttggcagctctgcgtccggagagtccagccccagaagaacaggagtgccacaaccacagccctgacggggacagcagttccgactacgttaataacaccagcgaagaagaggactacgatgagggcttacccgaagaggaggaggggatcacctactacatcaggtattgccctgaggacgactcctaccttgagggaatggattgcaatggcgaagagtacctggcgcactccgcccaccccgtagacacagatgagtgccaggaagcagttgaggagtggacggatagcgctggcccccacccgcatggacacgaggcagagggatcacaggattaccccgacggacagctgcccattcctgaggacgaaccgtccgtgctggaagctcatgaccaggaagaagatggacactactgcgcatccaaggaaggttaccaggattattaccctgaagaggccaatgggaataccggcgcctccccctataggctgcggcgcggagacggagacttagaggaccaggaggaggatatcgaccaaattgtggcagagattaagatgagccttagcatgacttctattacatccgcttccgaggcgtcccccgagcatgggcccgagcccggcccagaggattcggtggaggcttgcccccctatcaaggctagctgcagtccaagtcggcatgaagctaggccaaagtctctcaatttgctgcccgaagccaaacaccccggcgaccctcaaaggggctttaagcctaagaccagaacaccagaagagagactcaagtggccccacgaacaggtctgtaacggcctggagcaacccaggaagcaacaaagatcagatcttaacgggccagtggataataataacattccggaaacgaaaaaggtggcatcttttccatcctttgtggcggtgcccgggccctgcgaaccagaagatctgatcgatgggataatcttcgctgcgaattacctgggaagcactcagctgttgagcgaaaggaatccctcaaagaacatccgcatgatgcaggcacaggaagcggtgtcacgggtaaaaaatagcgagggagatgcgcagactctcacggaagtcgacctgttcatttccacacaacgaattaaggttttaaatgcggacacccaggagactatgatggaccatgccctgcgcacaatatcatacatcgcagacatcggtaatatagtggttctcatggctaggcgacggatgccccggtcagctagccaggattgcattgagacaacaccaggcgctcaggaagggaaaaaacagtataagatgatttgccacgtattcgaaagcgaggacgctcagctaatcgcgcaatccattggccaagctttcagcgtggcctaccaggagtttctgcgcgccaatggcattaaccccgaggacctgagccagaaggagtattctgatattatcaatactcaggaaatgtataacgatgacctcatccatttttccaatagcgaaaactgcaaggagctgcagttagagaagcataagggcgaaattctcggcgtggtggtggtcgaatctggctggggctcaatcttgccaaccgtgattctcgccaatatgatgaatggagggcccgcagctcggtctggtaaacttagcataggcgaccagatcatgagcattaatggaacatccctggtcggactgccgctggccacctgtcagggtattatcaagggtctgaagaaccaaacacaggtcaagttaaacatcgtgagctgcccccctgtgactacagtactaatcaagcgtcctgacctaaaataccaattgggattctcagtacagaacggcattatatgtagcctgatgcggggcggaatcgccgagcggggcggggtacgggttggacacagaatcatcgagatcaacggtcagtcagttgttgcgactgctcatgaaaaaatcgtacaggccctgagcaactcagtcggtgagattcacatgaagactatgcccgctgcaatgtttaggctccttacagggcaggaaacacccctatatatctag

SEQ ID NO: 296916 - DNA, 2214 bp, Artificial Sequence
  derived and/or modified sequence
atggcccacagaaaactggaaagcgtggggtctggtatgcttgatcacagggtgcggcctggtccagttccccacagccaggaacccgagagcgaagacatggaactcccccttgagggctatgtacccgagggtctagaactggctgctctgagaccggagagcccagcgcccgaggagcaagaatgccataaccactctcctgatggggacagtagtagcgactacgtcaacaatacctcagaggaggaggattacgacgagggactgccagaagaggaagagggtatcacatattacatccggtattgtcccgaagacgatagctatcttgagggcatggattgcaatggggaggagtacctcgctcacagcgcgcatcccgtcgacacagacgaatgccaggaggccgtcgaggagtggacagattctgcaggcccgcatccacacggacacgaagccgaaggttcacaagattaccctgacgggcaattgccaattcctgaagatgagccatcagtgctggaagcacatgaccaagaggaagatgggcattattgcgcgtccaaggaaggataccaggactattatcctgaagaggcgaatgggaacactggggcttccccatatcgactgcgccgaggcgatggcgacctcgaggatcaggaggaggacatcgatcagatcgtagcggaaattaaaatgtcgctttctatgactagtattacaagcgcgagcgaagccagccccgagcatggaccagaacctggacccgaagatagcgtggaagcctgccctcccatcaaagcttcatgctcaccatctcgccacgaagcaagacccaagtcactcaacctgcttccagaagccaaacatcctggagatcctcagcgcggcttcaagccaaaaacacgtacgccggaagaacggctgaaatggccacacgagcaggtatgcaatgggctggaacagcctaggaagcagcagagatcagatttgaacggtccagtggacaacaataacatacccgaaacaaagaaagtagcttccttcccatccttcgtggctgtacccggtccttgtgagccagaggatctcatagatggaattattttcgctgcaaattatctaggctcaacccagttgctgtccgagcgcaaccccagcaaaaatattaggatgatgcaggcacaggaagcagtgtcacgagtgaaaaatagtgaaggggacgcgcaaactcttacggaagtcgacttatttatctctactcaaagaatcaaggtgctgaacgcggatacacaggaaaccatgatggaccatgcattaagaacaatatcttatatcgccgacattggaaacatagtggtcctcatggctaggaggcggatgccacgtagcgcgtcccaggactgcattgaaacaactcccggcgcgcaggagggtaagaagcaatacaagatgatttgccacgttttcgaatcagaagacgcacaactgatcgcccagagcatcgggcaggccttctcagttgcctatcaggagtttctgagagcaaatgggataaatcccgaggatctgtcccaaaaagagtacagcgacataattaatactcaggaaatgtacaatgacgatctaatccacttttctaactcggaaaactgtaaggagctgcagctggagaaacataagggggaaatcctgggcgtggtggttgttgagtcggggtgggggagcatactgcccactgtgattttagctaatatgatgaacggcggtccggccgctcgaagcggcaaattgagtatcggcgatcagatcatgtccatcaacgggacttcgctggtaggtctgcctcttgcaacatgccagggtatcattaagggcctgaaaaatcagacgcaggtgaagctaaatattgtaagctgccctccagttacaaccgtcttgatcaaaagacctgatcttaaatatcagttgggattctccgtgcaaaatgggattatctgtagcctcatgaggggcggcattgccgagcgcgggggggtcagagtaggacacagaatcattgagataaacggacagtctgtggtggctaccgcccacgaaaagatcgtgcaagcactttcaaactctgtgggggaaatacatatgaaaaccatgcctgccgctatgttccgacttttgacgggccaggagacacccctctacatttag

SEQ ID NO: 296917 - DNA, 2214 bp, Artificial Sequence
  derived and/or modified sequence
atggcccacaggaagctggagagcgtgggcagcggcatgctggaccaccgggtgcggcccggccctgtgccccacagccaggagcctgagagcgaggacatggagctgcccctggagggctacgtgcctgagggcctggagctggccgccctgcggcctgagagccctgcccctgaggagcaggagtgccacaaccacagcccagatggagacagcagcagtgactatgtgaacaacaccagcgaggaggaggactatgatgagggcctgcctgaggaggaggagggcatcacctactacatccgctactgcccagaagatgacagctacctggagggcatggactgcaatggagaggagtacctggcccacagcgcccaccctgtggacacagatgagtgccaggaggccgtggaggagtggacagacagcgctggcccccacccccacggccacgaggccgagggcagccaggactacccagatggccagctgcccatcccagaagatgagcccagcgtgctggaggcccatgaccaggaggaggatggccactactgtgccagcaaggagggctaccaggactactacccagaggaggccaacggcaacacaggagccagcccctaccgcctgcggagaggagatggagacctggaggaccaggaggaggacatcgaccagatcgtggccgagatcaagatgagcctgtccatgaccagcatcaccagcgccagcgaggccagccctgagcacggccctgagcccggcccagaagattctgtggaggcctgcccccccatcaaggccagctgcagccccagcagacatgaggcccggcccaagagcctgaacctgctgcctgaggccaagcaccctggggacccccagaggggcttcaagcccaagaccaggaccccagaggagcggctgaagtggccccatgagcaggtgtgcaatggcctggagcagcccaggaagcagcagaggagtgacctgaatggacctgtggacaacaacaacatccctgagaccaagaaggtggccagcttccccagctttgtggccgtgcccggcccctgtgagcctgaggacctgattgatggcatcatctttgctgccaactacctgggcagcacccagctgctgtctgagaggaaccccagcaagaacatccgcatgatgcaggcccaggaggccgtgtcccgggtgaagaacagtgaaggagatgcccagaccctgacagaggtggacctcttcatcagcacccagaggatcaaggtgctgaatgctgacacccaggagaccatgatggaccacgccctgcggaccatctcctacatcgctgacatcggcaacatcgtggtgctgatggcccggcggaggatgcccaggtctgccagccaggactgcatcgagaccacccctggggcccaggagggcaagaagcagtacaagatgatctgccacgtgtttgaaagtgaagatgcccagctgattgcccagagcatcggccaggccttctctgtggcctaccaggagttcctgcgggccaacggcatcaaccctgaggacctgagccagaaggagtacagcgacatcatcaacacccaggagatgtacaatgatgacctgatccacttcagcaacagcgagaactgcaaggagctgcagctggagaagcacaagggggagatcctgggcgtggtggtggtggagagcggctggggcagcatcctgcccaccgtcatcctggccaacatgatgaatggaggccctgctgcccggagcggcaagctgagcatcggggaccagatcatgagcatcaatggcaccagcctggtgggcctgcccctggccacctgccagggcatcatcaagggcctgaagaaccagacccaggtgaagctgaacatcgtgtcctgcccccctgtgaccaccgtgctgatcaagaggccagacctgaagtaccagctgggcttctctgtgcagaatggcatcatctgcagcctgatgaggggcggcattgctgagcggggcggcgtgcgggtgggccaccgcatcatcgagatcaatggccagagcgtggtggccacagcccacgagaagatcgtgcaggccctgagcaacagcgtgggggagatccacatgaagaccatgcctgctgccatgttccggctgctgaccggccaggagacccccctgtacatctag

SEQ ID NO: 296918 - DNA, 2214 bp, Artificial Sequence
  derived and/or modified sequence
atggcccaccggaagctggagagcgtgggcagcggcatgctggaccatcgagtaaggcccgggccagtgcctcacagtcaggagcccgagagcgaggacatggagctaccactggaaggctacgtgccagagggcctcgaactggccgccttaaggcccgagtcccccgccccagaagaacaggagtgccataaccattcccccgacggcgactcctcaagtgattacgtgaacaatactagcgaagaagaagactatgacgaaggactgccagaggaagaggaggggattacttactatattcgttactgcccagaagatgatagttacttggagggtatggattgtaatggagaggaatacctagcacacagtgcccatcctgtggataccgatgaatgtcaggaggcagtagaggaatggactgactctgccgggccacacccacatggacacgaggcagaaggcagccaagactaccccgatggccaactccctatccctgaagacgagccctcagtcctggaggctcacgaccaggaagaagatggacactactgcgccagcaaggaaggatatcaggactattaccccgaagaggcaaatggcaatactggtgccagtccctatcggcttcggcgaggagacggtgacctggaggaccaggaagaagatatcgaccagattgtcgccgaaattaaaatgagcctgtccatgactagcatcacaagtgcgtcagaagctagtcccgagcatggtcccgaacccgggcctgaggattccgtggaggcttgtcctccaatcaaggccagctgctcaccgagtcggcacgaggcgcgacctaagtccctgaacttgcttcctgaagccaagcaccccggcgatccccagcgtgggtttaagccaaaaacccgcacacctgaagaacgactcaaatggccacacgaacaggtctgcaatgggttggagcagccacgcaaacaacaacgctcagatctgaacggtcccgtcgacaacaacaacatccccgagacaaagaaggtggcctcctttccttcttttgtagccgtaccgggtccttgtgaacctgaggatctgattgacggaattatttttgccgccaattatctgggatccactcaattgctgtccgaaagaaatccctccaaaaatattaggatgatgcaggcccaagaagctgtgagcagggtaaaaaactccgaaggagatgcacaaaccctaaccgaagtcgatctcttcatttccacccaaagaatcaaggtgctcaatgccgacacccaggagacgatgatggatcacgcgttgcgcaccatctcatatatagcagatattggaaacatcgtagttctcatggctcggaggcgaatgccccgtagcgcctctcaggattgcattgaaaccacgcccggagcacaggaaggcaaaaagcagtacaagatgatatgccatgtcttcgagtctgaagacgcccagctgatcgcccagtcaatcgggcaggccttttccgtggcctaccaggagtttcttagggctaacgggatcaatccagaggatctatcacagaaagagtacagtgacatcatcaacacccaggagatgtataatgacgaccttatccacttcagtaattccgaaaactgcaaagagctccagttggaaaagcacaaaggggaaattctcggtgtggtagtggttgagagcggctgggggtccatcctacccactgttatcctggccaacatgatgaatggaggccccgcggcccggtctggaaaactttctatcggtgatcagatcatgagtattaacggcacaagcttagtgggtctgcctttggccacatgccagggcatcataaaaggtctcaagaaccagacacaggtcaagctgaacatcgtctcatgccctcccgttacgacagttcttataaaacgacctgatttaaagtatcagctggggttcagtgtccagaacggcattatatgcagcctcatgaggggaggcatcgcagaaagaggcggcgtccgcgtagggcataggatcattgaaataaatggtcagagcgttgtggctacagcccacgagaaaattgtgcaagctctttccaactctgttggggagattcacatgaaaactatgccagccgctatgttcagattgttgacaggtcaggaaaccccgctatacatttag

SEQ ID NO: 296919 - DNA, 2214 bp, Artificial Sequence
  derived and/or modified sequence
atggcccaccggaagctggagagcgtgggcagcggcatgctggaccacagagtgcgtcctggacccgtcccgcacagccaggagccagagtctgaggatatggaattaccactggaaggatacgtgcctgaaggcctcgagctggctgctttgcgtcccgagtcccctgctcctgaagagcaggagtgccacaatcactcacccgatggagacagcagctccgattacgtgaacaacacaagtgaagaagaagactatgatgaaggtcttcctgaggaggaggagggcatcacttattacataaggtattgtccagaggacgattcttatctggagggcatggattgtaatggcgaggagtacctggcacacagtgcccaccctgtggatacagacgaatgtcaggaggccgttgaggagtggactgattccgctggaccccatccacatggccatgaagctgagggcagccaggactatcctgatggccagctgccgattcccgaagatgaaccttcggtccttgaagcacatgatcaggaggaggatggccattattgcgcatcgaaagagggctatcaagattactatcccgaagaagccaatggcaacacaggcgcctccccttatcgcctgagaaggggcgatggcgatttagaggatcaggaggaggatatagaccagatcgttgctgagataaagatgtctctctctatgacatccattactagcgctagcgaggcaagtcccgagcatggtcccgagcctgggccggaggatagcgtggaagcatgcccccccattaaggcctcttgtagccctagcaggcatgaggcccggcccaagtcccttaacctcctacccgaggctaagcatcctggggaccctcagagaggattcaagcctaagacaagaactccagaggagaggcttaaatggccccacgagcaggtatgcaacgggcttgaacagcccaggaaacagcagcgcagtgacctaaacgggccagtggataataacaatattcccgagacaaagaaggtcgcatcctttcctagtttcgtcgccgtgccaggcccctgtgaaccagaggacctgatcgatggcatcattttcgcagctaattatttggggtcaacacagctgctgtccgagcgcaacccaagtaagaatattaggatgatgcaggcacaggaggccgtatctagagtgaagaattcggagggtgatgcgcagacccttactgaagtggacttatttatctctacccagcggattaaagttctaaatgctgacactcaggaaactatgatggaccacgccctgcgcaccatctcttatatcgctgacatcgggaacatagtcgttctgatggcgcggaggaggatgcctagatcagcaagtcaagactgcattgaaactacaccaggcgcccaggagggcaaaaaacaatacaaaatgatatgtcacgtgttcgagtccgaggatgcccagttgatcgctcagtcaattggccaggcttttagcgtggcctaccaggagtttcttagagcaaacggtatcaatccggaggatcttagccagaaggaatatagcgatataatcaacacacaagaaatgtacaacgatgatctgatccacttcagtaattctgaaaattgtaaagagctccagctggaaaaacataaaggtgagattctgggggttgttgtggtcgaatcaggatggggatctatcctgcccacggttattctggcaaatatgatgaacggcgggcctgcagccaggagtggtaaattgtcgatcggagaccagatcatgagtataaatggcacatcactggtggggctgccactcgcaacctgccagggcatcataaaagggttgaagaatcagacgcaggtcaagctgaacatcgtgagctgtccaccagttaccaccgtcctcattaaacggcctgaccttaagtaccagctgggattctctgtccagaatggcatcatctgttctctgatgagaggaggcattgctgagcgtggaggggttcgagttggccaccgaatcatcgagattaacggccaatcagtggttgccaccgcccatgaaaagattgtgcaagctctcagcaactcagtgggcgagatacacatgaagaccatgccagccgccatgttcagattgctgaccggacaggagacaccactctacatttag

SEQ ID NO: 296920 - DNA, 3599 bp, Artificial Sequence
  derived and/or modified sequence
cagtctcctgaatatttacgcgttgctgaatctcctgtggacaaaccaccaataggccaggactgtcctgtggacagacggggtgagcctcttcttgtgtctggagattctgaaaagatttgatcaccaggagatttttcgggacattaccaaaccactcattttagtggctgcctccgggtgatgatggctgtgtgaacgactgccatggcccaccggaagcttgagagcgtggggagcggcatgttggaccatagggtgagaccaggtcctgtccctcacagccaggagcccgagagcgaggacatggagctgcccttggagggctatgtgcccgagggcctggagctggctgccctgcggccagagagccccgcgccagaggaacaggagtgccacaaccacagccccgatggggactccagctctgactacgtgaacaacacctctgaggaggaggactatgacgagggcctccctgaggaggaggagggcatcacctactacatccgctactgccctgaggacgacagctacctagagggcatggactgcaacggggaggagtacctggcccacagtgcacaccctgtggacactgatgagtgccaggaggcggtggaggagtggacggactcggcgggcccgcacccccacggccacgaggctgaaggcagccaggactacccagacggccaactgcccattccggaggatgagccctccgtccttgaggcccatgaccaggaagaagatggtcactactgtgccagcaaagagggctaccaggactactaccccgaggaggccaacgggaacaccggcgcctccccctaccgcctgaggcgtggggatggggacctggaggaccaggaggaggacattgaccagatcgtggcagagatcaagatgagtctgagcatgaccagcatcaccagcgccagtgaggccagccccgagcatgggcctgagccagggcctgaggactctgtagaggcctgcccacccatcaaggccagctgcagccccagcaggcacgaggcgaggcccaagtcgctgaacctccttcccgaggccaagcaccccggagacccccagagaggcttcaagcccaagaccaggaccccagaagagaggctgaagtggccccacgagcaggtttgcaatggtctggagcagccaaggaagcagcagcgctctgatctcaatggacctgttgacaataacaacattccagagacaaagaaggtggcatcatttccaagttttgtggctgttccagggccctgcgaaccagaagacctcatcgacgggatcatctttgctgccaattacctggggtccacccagctgctatcagaacggaacccttccaaaaacatcagaatgatgcaagcgcaggaggccgtcagccgggtcaagaattctgagggggatgcccagacgctgacggaagtggacctcttcatttccacccagaggatcaaggttttaaatgcagacacgcaggaaaccatgatggaccacgccttgcgtaccatctcctacatcgccgacattgggaacattgtagtgctgatggccagacgccgcatgccccggtcagcctctcaggactgcatcgagaccacgcccggggcccaggaaggcaagaagcagtataagatgatctgccatgtgttcgagtcggaggatgcccagctcatcgcccagtctatcggccaggccttcagcgtggcctaccaggagttcctgcgagccaatggcatcaaccccgaagacttgagccagaaggaatacagcgacatcatcaacacccaggagatgtacaacgacgacctcatccacttctcaaactcggagaactgcaaggagctgcagctggagaagcacaagggcgagatcctgggcgtggtggtggtggagtcgggctggggctccatcctgcccacggtgatcctggccaacatgatgaatggcggcccggctgcccgctcggggaagctgagcatcggggaccagatcatgtccatcaatggcaccagcctggtggggctgcccctcgccacctgccaaggcatcatcaagggcctgaagaaccagacacaggtgaagctcaacattgtcagctgtcccccggtcaccacggtccttatcaagcggccagacctcaagtaccagctgggcttcagcgtgcagaatggaattatctgcagcctcatgagagggggcattgctgagcgagggggcgtccgtgtgggccaccgcatcatcgagatcaacgggcagagcgtggtggccacagcccacgagaagatagtccaagctctgtccaactcggtcggagagatccacatgaagaccatgcccgccgccatgttcaggctcctcacgggtcaggagaccccgctgtacatctaggccaccccagcctggccacgcagccaggacaccgggcagggccgcccgggcccagaggagctgggagccgggccgcagacttgaccccgacgccacagcccagccacggacgctggctccccaaagggtgtgccctcaccacccacttgatttttttcattttgccaaaaaggggtatgtctttatcaaaggagagtcacagaacaaatgtttgtttgtaaagcgttccaagtattttgccacgttctggactgtcttctccctgcacaagccagggtgtgtctcggtagctgtgcgtggtgtggagtgtgtgtctttcctccctgaagctgtgcggagcgaactggcgcctccgagggacgcggctcccggggcagggcagccgtcacccctgcctcccgcccccttggctgggacgtctggggtcctgtggggcccccacaatggtcccaaacagctgcctctgccactgactgcagggacacgggcagcctggctcccaggacacgacttgtaatgaaagtttggggacatgtgattgattgattgattgtaaataaaggatgatggccacaacatgaaaactccatatttatttagatgctattattactgtttggacttttattttggcaggcttttttccagactctagggttttccaatgtgactaatgaccacacctgcctctcccgtcgtctcttctgggcaccctcccacccggctgcatacccgggcagggctcccacagagacaaggagggcacaggtgtctgccccctctttaaaatcgatctacacacatccacgcacatgcgaccccgaggaaacgaaacccactctagaaaacgcgaccttggccgcacctaaagcagccagccgtgagtgcagaccccttggccagcgtggcgcagtggccctgagcagtagtggcatgtgtgtagatcaagtcggatctagtccagctcggttcattagcgatccatgtaatctgacgtcatcttgtctcgaagtctctttttttggcccaggccttgaagaatacactgtgacttaagaagccttaccacgcagtaactaaagctttaggatgactgtattcgaggagtgccgtgtgttgcatgcagctacccgtaggaagacttcgcgcatatcactaataaacctgaagtcgtgatg

SEQ ID NO: 296921 - DNA, 3349 bp, Artificial Sequence
  derived and/or modified sequence
gcccggcagccgcaggccggtgcgggatgcgccccgcagccgcgccgcgtgcgcccggcagaggcggccctgcgtgccgtacgctgcgtccggggcgcgcccgccgctattcgggaagctattcagcttcccgggctcattagcagtcgcggtgtgcggctcggcgcgggctcacaaagagctcggcctcgcggactgagccggcggcagcggggcggggacggcggcgtacccgggcagcccagcgccctggccaggcggagggagctgttcatcctctgggggctgctgggccagaaatatctcttacctgataatgtcaggcatcagaggttcctgtttcgtggtctcctgaatatttacgcgttgctgaatctcctgtggacaaaccaccaataggccaggactgtcctgtggacagacggggtgagcctcttcttgtgtctggagattctgaaaagatttgatcaccaggagatttttcgggacattaccaaaccactcattttagtggctgcctccgggtgatgatggctgtgtgaacgactgccatggcccaccggaagcttgagagcgtggggagcggcatgttggaccatagggtgagaccaggtcctgtccctcacagccaggagcccgagagcgaggacatggagctgcccttggagggctatgtgcccgagggcctggagctggctgccctgcggccagagagccccgcgccagaggaacaggagtgccacaaccacagccccgatggggactccagctctgactacgtgaacaacacctctgaggaggaggactatgacgagggcctccctgaggaggaggagggcatcacctactacatccgctactgccctgaggacgacagctacctagagggcatggactgcaacggggaggagtacctggcccacagtgcacaccctgtggacactgatgagtgccaggaggcggtggaggagtggacggactcggcgggcccgcacccccacggccacgaggctgaaggcagccaggactacccagacggccaactgcccattccggaggatgagccctccgtccttgaggcccatgaccaggaagaagatggtcactactgtgccagcaaagagggctaccaggactactaccccgaggaggccaacgggaacaccggcgcctccccctaccgcctgaggcgtggggatggggacctggaggaccaggaggaggacattgaccagatcgtggcagagatcaagatgagtctgagcatgaccagcatcaccagcgccagtgaggccagccccgagcatgggcctgagccagggcctgaggactctgtagaggcctgcccacccatcaaggccagctgcagccccagcaggcacgaggcgaggcccaagtcgctgaacctccttcccgaggccaagcaccccggagacccccagagaggcttcaagcccaagaccaggaccccagaagagaggctgaagtggccccacgagcaggtttgcaatggtctggagcagccaaggaagcagcagcgctctgatctcaatggacctgttgacaataacaacattccagagacaaagaaggtggcatcatttccaagttttgtggctgttccagggccctgcgaaccagaagacctcatcgacgggatcatctttgctgccaattacctggggtccacccagctgctatcagaacggaacccttccaaaaacatcagaatgatgcaagcgcaggaggccgtcagccgggtcaagaattctgagggggatgcccagacgctgacggaagtggacctcttcatttccacccagaggatcaaggttttaaatgcagacacgcaggaaaccatgatggaccacgccttgcgtaccatctcctacatcgccgacattgggaacattgtagtgctgatggccagacgccgcatgccccggtcagcctctcaggactgcatcgagaccacgcccggggcccaggaaggcaagaagcagtataagatgatctgccatgtgttcgagtcggaggatgcccagctcatcgcccagtctatcggccaggccttcagcgtggcctaccaggagttcctgcgagccaatggcatcaaccccgaagacttgagccagaaggaatacagcgacatcatcaacacccaggagatgtacaacgacgacctcatccacttctcaaactcggagaactgcaaggagctgcagctggagaagcacaagggcgagatcctgggcgtggtggtggtggagtcgggctggggctccatcctgcccacggtgatcctggccaacatgatgaatggcggcccggctgcccgctcggggaagctgagcatcggggaccagatcatgtccatcaatggcaccagcctggtggggctgcccctcgccacctgccaaggcatcatcaagggcctgaagaaccagacacaggtgaagctcaacattgtcagctgtcccccggtcaccacggtccttatcaagcggccagacctcaagtaccagctgggcttcagcgtgcagaatggaattatctgcagcctcatgagagggggcattgctgagcgagggggcgtccgtgtgggccaccgcatcatcgagatcaacgggcagagcgtggtggccacagcccacgagaagatagtccaagctctgtccaactcggtcggagagatccacatgaagaccatgcccgccgccatgttcaggctcctcacgggtcaggagaccccgctgtacatctaggccaccccagcctggccacgcagccaggacaccgggcagggccgcccgggcccagaggagctgggagccgggccgcagacttgaccccgacgccacagcccagccacggacgctggctccccaaagggtgtgccctcaccacccacttgatttttttcattttgccaaaaaggggtatgtctttatcaaaggagagtcacagaacaaatgtttgtttgtaaagcgttccaagtattttgccacgttctggactgtcttctccctgcacaagccagggtgtgtctcggtagctgtgcgtggtgtggagtgtgtgtctttcctccctgaagctgtgcggagcgaactggcgcctccgagggacgcggctcccggggcagggcagccgtcacccctgcctcccgcccccttggctgggacgtctggggtcctgtggggcccccacaatggtcccaaacagctgcctctgccactgactgcagggacacgggcagcctggctcccaggacacgacttgtaatgaaagtttggggacatgtgattgattgattgattgtaaataaaggatgatggccacaacatgaaaa

SEQ ID NO: 296922 - DNA, 2214 bp, Artificial Sequence
  derived and/or modified sequence
atggcccacagaaagctggagagcgtgggatcagggatgctggaccatagggtgagacccggtcccgtgccccactcccaggaacctgagagtgaggatatggaactgccattggaagggtacgtgcccgaaggcctggagttggcagcactgcgccctgagagtccagcacctgaagaacaggaatgccacaatcattctcccgatggcgactcctccagcgactatgtcaacaacactagcgaggaagaagattacgatgaaggactccccgaagaagaagaagggatcacttactacattaggtattgtcccgaagacgatagttatttggagggaatggattgcaatggggaagaatatcttgctcacagtgcacatcccgtcgacacagacgaatgccaggaggccgttgaagaatggactgatagtgccggtcctcatccgcacggccacgaagccgaagggagccaggattatcccgatggtcagcttccaatccccgaagacgaaccttccgtcctggaggcccatgaccaggaggaggatggacactactgcgcctcaaaggagggctaccaggactattatcctgaagaggcaaacggtaacacaggagcctcaccctaccgactgagaaggggagatggagacctagaggatcaggaggaagacatcgaccaaattgttgccgagataaaaatgtccttatccatgacatctattacctccgccagcgaagcctccccggaacacggacccgaaccaggcccagaggactctgtcgaagcctgccccccaattaaagcaagttgttctccgagccggcatgaagcacggccaaagtctctcaacctgctgccagaagccaaacatcctggcgacccccagagaggattcaagccaaagacaagaacacccgaagaaagattgaagtggccccacgagcaggtgtgcaatggactggaacagccccgtaagcagcagcggtccgaccttaatggaccagtagacaacaacaacatccctgaaaccaaaaaggtagcgtcttttccaagctttgttgccgtgcccggtccatgcgagccagaggatctgattgacggtatcatcttcgcagccaactacctgggttctacacagctactatccgaaaggaatcctagtaagaacatccgaatgatgcaggcccaggaagctgtgagtcgagtaaaaaattcggagggagatgctcagacgcttactgaggtggatctctttatctccacccagcgtattaaggttctaaatgctgacacacaggagaccatgatggaccacgcgctgcggacaatttcctatatagccgatatcgggaatattgttgttctgatggccaggaggcgcatgccaaggtctgctagccaggattgcatcgaaaccaccccaggtgctcaagaaggaaagaaacagtacaaaatgatctgccatgtgttcgaatcggaggacgcgcaactgatagctcagtcaattggacaagccttctcagtggcctatcaggaattcctgcgggcaaatggcatcaaccctgaagacctgagccagaaggagtacagcgacattatcaacactcaagagatgtataatgatgatctgatccacttctccaatagcgagaactgtaaggagctacaattggagaagcataagggggagatcctcggagttgtcgtagtggagagcggatggggatccatactcccaaccgtaatactggccaatatgatgaacgggggacctgcggcacgttcgggcaaattgtccataggcgatcagattatgtcaattaacggcacctccctggtcggtttgcctttggctacctgccaaggcatcataaaggggttgaaaaaccagacacaggttaaactgaatatagtttcatgtcctccagtgaccacagtgctgattaagagacccgatttgaaatatcaactaggattctctgttcagaatggtatcatctgctcactgatgcgcggaggcatagcggaaaggggcggagtccgtgtggggcatcggataatcgaaatcaatggtcagagtgtagttgctacggcccacgagaaaatcgtgcaggcattgagtaactctgtgggcgagatccatatgaaaaccatgcccgctgcaatgttccgcctgctcaccggacaagagaccccattgtacatctag

SEQ ID NO: 296923 - DNA, 2214 bp, Artificial Sequence
  derived and/or modified sequence
atggcccaccgcaagctggagtctgtgggctcgggaatgcttgaccaccgtgttagaccaggacctgtgccgcactctcaggaaccagagtctgaagacatggaattgcctcttgaggggtatgtgcccgaaggattggagctggctgctctgcgacctgagtcccccgcacctgaggaacaggaatgtcacaatcattcacctgacggggattcatcttctgattacgtgaataatacctcagaagaggaagattacgacgaggggcttcctgaagaagaggaaggtatcacctactatatcagatattgtccagaggatgatagttatctggagggcatggattgtaatggggaggagtacctggcccactctgcgcatcccgtcgacactgatgagtgtcaggaagccgttgaggaatggactgactccgccggacctcacccccacggtcacgaggcagaaggcagtcaggattacccagacggccaactgcccatccccgaagacgagcctagcgtcttagaagcacacgaccaggaggaggacggccattactgcgctagcaaagagggatatcaagattattatccagaggaggcaaacggcaacactggagcttccccctaccgtctcagacgcggagatggcgatctggaagaccaggaagaggacatcgaccagatcgtagcagaaattaagatgagcctgagcatgaccagtataactagtgccagtgaagcctcccccgaacatggacccgagccagggccagaagactcagtggaggcctgtccccctatcaaagcctcttgcagccctagcagacacgaggcgaggccaaaatcccttaacttgctccctgaagcaaaacacccaggcgatccacagcgtggattcaagccaaaaaccagaacccctgaggagagactcaagtggccccatgaacaggtatgtaacggcctggaacagccccgaaaacagcagcgcagtgacctcaacgggcctgttgataacaacaacattcccgaaacaaaaaaggttgcaagcttccccagcttcgtcgcggtacccggtccatgcgaacctgaggatctgatcgatggcattatctttgcggctaactatctgggctccactcagctgctttcagaacgcaacccgagtaaaaatatcaggatgatgcaggctcaagaggccgtttctagggttaagaattcagaaggtgacgcacagacactgactgaggtggacctcttcatatccacacaacgcatcaaggtgctcaacgctgacactcaggagacaatgatggaccacgccctgagaaccatatcgtacatagctgatattggaaatattgtggtattgatggcccgacgcaggatgcctcgaagcgcatctcaagactgcattgaaaccactcccggagctcaagagggcaagaagcagtacaagatgatctgccacgtgttcgaaagcgaagatgcccagctaatcgcacagtctattggtcaggctttcagtgtcgcttatcaggaatttctgcgagcaaatggtatcaatcctgaggatttgagccaaaaggagtattcagacattatcaatactcaggagatgtataacgatgaccttatccacttctctaacagcgagaattgcaaagagctccagctggagaagcacaaaggcgaaatccttggcgtcgtggtcgtagaatctggctgggggtccatactgcctaccgttatcctggctaacatgatgaatggaggtcccgctgccaggagcgggaaactgtccattggggaccagatcatgtccatcaacggtacttccctcgtgggactgcccctcgcaacttgccaagggataattaagggcctgaaaaatcagacgcaggtgaaactgaacatcgtgagctgtccccctgtgaccacggtgctaattaaacggcctgatctgaagtatcagctgggcttcagtgtgcagaacggtatcatatgtagcctcatgagagggggtattgcagagcggggaggagtaagagtgggtcacaggatcatcgagatcaatggacagtcagtcgtggccactgcgcacgagaagattgtgcaggccttgtccaattctgttggtgagatccacatgaagacgatgccggcagctatgttccgactgttaactggacaagaaacccccctttatatctag

SEQ ID NO: 296924 - DNA, 2214 bp, Artificial Sequence
  derived and/or modified sequence
atggcccacagaaagctggagagcgtgggcagcggcatgctggaccacagagtgagacccggccccgtgccccacagccaggagcccgagagcgaggacatggagctgcccctggagggctacgtgcccgagggcctggagctggccgccctgagacccgagagccccgcccccgaggagcaggagtgccacaaccacagccccgacggcgacagcagcagcgactacgtgaacaacaccagcgaggaggaggactacgacgagggcctgcccgaggaggaggagggcatcacctactacatcagatactgccccgaggacgacagctacctggagggcatggactgcaacggcgaggagtacctggcccacagcgcccaccccgtggacaccgacgagtgccaggaggccgtggaggagtggaccgacagcgccggcccccacccccacggccacgaggccgagggcagccaggactaccccgacggccagctgcccatccccgaggacgagcccagcgtgctggaggcccacgaccaggaggaggacggccactactgcgccagcaaggagggctaccaggactactaccccgaggaggccaacggcaacaccggcgccagcccctacagactgagaagaggcgacggcgacctggaggaccaggaggaggacatcgaccagatcgtggccgagatcaagatgagcctgagcatgaccagcatcaccagcgccagcgaggccagccccgagcacggccccgagcccggccccgaggacagcgtggaggcctgcccccccatcaaggccagctgcagccccagcagacacgaggccagacccaagagcctgaacctgctgcccgaggccaagcaccccggcgacccccagagaggcttcaagcccaagaccagaacccccgaggagagactgaagtggccccacgagcaggtgtgcaacggcctggagcagcccagaaagcagcagagaagcgacctgaacggccccgtggacaacaacaacatccccgagaccaagaaggtggccagcttccccagcttcgtggccgtgcccggcccctgcgagcccgaggacctgatcgacggcatcatcttcgccgccaactacctgggcagcacccagctgctgagcgagagaaaccccagcaagaacatcagaatgatgcaggcccaggaggccgtgagcagagtgaagaacagcgagggcgacgcccagaccctgaccgaggtggacctgttcatcagcacccagagaatcaaggtgctgaacgccgacacccaggagaccatgatggaccacgccctgagaaccatcagctacatcgccgacatcggcaacatcgtggtgctgatggccagaagaagaatgcccagaagcgccagccaggactgcatcgagaccacccccggcgcccaggagggcaagaagcagtacaagatgatctgccacgtgttcgagagcgaggacgcccagctgatcgcccagagcatcggccaggccttcagcgtggcctaccaggagttcctgagagccaacggcatcaaccccgaggacctgagccagaaggagtacagcgacatcatcaacacccaggagatgtacaacgacgacctgatccacttcagcaacagcgagaactgcaaggagctgcagctggagaagcacaagggcgagatcctgggcgtggtggtggtggagagcggctggggcagcatcctgcccaccgtgatcctggccaacatgatgaacggcggccccgccgccagaagcggcaagctgagcatcggcgaccagatcatgagcatcaacggcaccagcctggtgggcctgcccctggccacctgccagggcatcatcaagggcctgaagaaccagacccaggtgaagctgaacatcgtgagctgcccccccgtgaccaccgtgctgatcaagagacccgacctgaagtaccagctgggcttcagcgtgcagaacggcatcatctgcagcctgatgagaggcggcatcgccgagagaggcggcgtgagagtgggccacagaatcatcgagatcaacggccagagcgtggtggccaccgcccacgagaagatcgtgcaggccctgagcaacagcgtgggcgagatccacatgaagaccatgcccgccgccatgttcagactgctgaccggccaggagacccccctgtacatctag

SEQ ID NO: 296925 - DNA, 5247 bp, Artificial Sequence
  derived and/or modified sequence
atgagcgccagagccgccgccgccaagagcaccgccatggaggagaccgccatctgggagcagcacaccgtgaccctgcacagagcccccggcttcggcttcggcatcgccatcagcggcggcagagacaacccccacttccagagcggcgagaccagcatcgtgatcagcgacgtgctgaagggcggccccgccgagggccagctgcaggagaacgacagagtggccatggtgaacggcgtgagcatggacaacgtggagcacgccttcgccgtgcagcagctgagaaagagcggcaagaacgccaagatcaccatcagaagaaagaagaaggtgcagatccccgtgagcagacccgaccccgagcccgtgagcgacaacgaggaggacagctacgacgaggagatccacgaccccagaagcggcagaagcggcgtggtgaacagaagaagcgagaagatctggcccagagacagaagcgccagcagagagagaagcctgagccccagaagcgacagaagaagcgtggccagcagccagcccgccaagcccaccaaggtgaccctggtgaagagcagaaagaacgaggagtacggcctgagactggccagccacatcttcgtgaaggagatcagccaggacagcctggccgccagagacggcaacatccaggagggcgacgtggtgctgaagatcaacggcaccgtgaccgagaacatgagcctgaccgacgccaagaccctgatcgagagaagcaagggcaagctgaagatggtggtgcagagagacgagagagccaccctgctgaacgtgcccgacctgagcgacagcatccacagcgccaacgccagcgagagagacgacatcagcgagatccagagcctggccagcgaccacagcggcagaagccacgacagaccccccagaagaagcagaagcagaagccccgaccagagaagcgagcccagcgaccacagcagacacagcccccagcagcccagcaacggcagcctgagaagcagagacgaggagagaatcagcaagcccggcgccgtgagcacccccgtgaagcacgccgacgaccacacccccaagaccgtggaggaggtgaccgtggagagaaacgagaagcagacccccagcctgcccgagcccaagcccgtgtacgcccaggtgggccagcccgacgtggacctgcccgtgagccccagcgacggcgtgctgcccaacagcacccacgaggacggcatcctgagacccagcatgaagctggtgaagttcagaaagggcgacagcgtgggcctgagactggccggcggcaacgacgtgggcatcttcgtggccggcgtgctggaggacagccccgccgccaaggagggcctggaggagggcgaccagatcctgagagtgaacaacgtggacttcaccaacatcatcagagaggaggccgtgctgttcctgctggacctgcccaagggcgaggaggtgaccatcctggcccagaagaagaaggacgtgtacagaagaatcgtggagagcgacgtgggcgacagcttctacatcagaacccacttcgagtacgagaaggagagcccctacggcctgagcttcaacaagggcgaggtgttcagagtggtggacaccctgtacaacggcaagctgggcagctggctggccatcagaatcggcaagaaccacaaggaggtggagagaggcatcatccccaacaagaacagagccgagcagctggccagcgtgcagtacaccctgcccaagaccgccggcggcgacagagccgacttctggagattcagaggcctgagaagcagcaagagaaacctgagaaagagcagagaggacctgagcgcccagcccgtgcagaccaagttccccgcctacgagagagtggtgctgagagaggccggcttcctgagacccgtgaccatcttcggccccatcgccgacgtggccagagagaagctggccagagaggagcccgacatctaccagatcgccaagagcgagcccagagacgccggcaccgaccagagaagcagcggcatcatcagactgcacaccatcaagcagatcatcgaccaggacaagcacgccctgctggacgtgacccccaacgccgtggacagactgaactacgcccagtggtaccccatcgtggtgttcctgaaccccgacagcaagcagggcgtgaagaccatgagaatgagactgtgccccgagagcagaaagagcgccagaaagctgtacgagagaagccacaagctgagaaagaacaaccaccacctgttcaccaccaccatcaacctgaacagcatgaacgacggctggtacggcgccctgaaggaggccatccagcagcagcagaaccagctggtgtgggtgagcgagggcaaggccgacggcgccaccagcgacgacctggacctgcacgacgacagactgagctacctgagcgcccccggcagcgagtacagcatgtacagcaccgacagcagacacaccagcgactacgaggacaccgacaccgagggcggcgcctacaccgaccaggagctggacgagaccctgaacgacgaggtgggcaccccccccgagagcgccatcaccagaagcagcgagcccgtgagagaggacagcagcggcatgcaccacgagaaccagacctaccccccctacagcccccaggcccagccccagcccatccacagaatcgacagccccggcttcaagcccgccagccagcagaaggccgaggccagcagccccgtgccctacctgagccccgagaccaaccccgccagcagcaccagcgccgtgaaccacaacgtgaacctgaccaacgtgagactggaggagcccacccccgcccccagcaccagctacagcccccaggccgacagcctgagaacccccagcaccgaggccgcccacatcatgctgagagaccaggagcccagcctgagcagccacgtggaccccaccaaggtgtacagaaaggacccctaccccgaggagatgatgagacagaaccacgtgctgaagcagcccgccgtgagccaccccggccacagacccgacaaggagcccaacctgacctacgagccccagctgccctacgtggagaagcaggccagcagagacctggagcagcccacctacagatacgagagcagcagctacaccgaccagttcagcagaaactacgagcacagactgagatacgaggacagagtgcccatgtacgaggagcagtggagctactacgacgacaagcagccctaccccagcagaccccccttcgacaaccagcacagccaggacctggacagcagacagcaccccgaggagagcagcgagagaggctacttccccagattcgaggagcccgcccccctgagctacgacagcagacccagatacgagcaggcccccagagccagcgccctgagacacgaggagcagcccgcccccggctacgacacccacggcagactgagacccgaggcccagccccaccccagcgccggccccaagcccgccgagagcaagcagtacttcgagcagtacagcagaagctacgagcaggtgcccccccagggcttcaccagcagagccggccacttcgagcccctgcacggcgccgccgccgtgccccccctgatccccagcagccagcacaagcccgaggccctgcccagcaacaccaagcccctgccccccccccccacccagaccgaggaggaggaggaccccgccatgaagccccagagcgtgctgaccagagtgaagatgttcgagaacaagagaagcgccagcctggagaccaagaaggacgtgaacgacaccggcagcttcaagccccccgaggtggccagcaagcccagcggcgcccccatcatcggccccaagcccaccagccagaaccagttcagcgagcacgacaagaccctgtacagaatccccgagccccagaagccccagctgaagccccccgaggacatcgtgagaagcaaccactacgaccccgaggaggacgaggagtactacagaaagcagctgagctacttcgacagaagaagcttcgagaacaagccccccgcccacatcgccgccagccacctgagcgagcccgccaagcccgcccacagccagaaccagagcaacttcagcagctacagcagcaagggcaagccccccgaggccgacggcgtggacagaagcttcggcgagaagagatacgagcccatccaggccacccccccccccccccccctgcccagccagtacgcccagcccagccagcccgtgaccagcgccagcctgcacatccacagcaagggcgcccacggcgagggcaacagcgtgagcctggacttccagaacagcctggtgagcaagcccgaccccccccccagccagaacaagcccgccaccttcagaccccccaacagagaggacaccgcccaggccgccttctacccccagaagagcttccccgacaaggcccccgtgaacggcaccgagcagacccagaagaccgtgacccccgcctacaacagattcacccccaagccctacaccagcagcgccagacccttcgagagaaagttcgagagccccaagttcaaccacaacctgctgcccagcgagaccgcccacaagcccgacctgagcagcaagacccccaccagccccaagaccctggtgaagagccacagcctggcccagccccccgagttcgacagcggcgtggagaccttcagcatccacgccgagaagcccaagtaccagatcaacaacatcagcaccgtgcccaaggccatccccgtgagccccagcgccgtggaggaggacgaggacgaggacggccacaccgtggtggccaccgccagaggcatcttcaacagcaacggcggcgtgctgagcagcatcgagaccggcgtgagcatcatcatcccccagggcgccatccccgagggcgtggagcaggagatctacttcaaggtgtgcagagacaacagcatcctgccccccctggacaaggagaagggcgagaccctgctgagccccctggtgatgtgcggcccccacggcctgaagttcctgaagcccgtggagctgagactgccccactgcgaccccaagacctggcagaacaagtgcctgcccggcgaccccaactacctggtgggcgccaactgcgtgagcgtgctgatcgaccacttctag

SEQ ID NO: 296926 - DNA, 5247 bp, Artificial Sequence
  derived and/or modified sequence
atgtcagcacgcgcagccgctgctaagtccaccgcgatggaagagacagccatctgggaacagcacaccgtcaccctgcatcgggctccaggctttggcttcggcatcgccatatctggtgggagagacaatcctcattttcagtcgggcgagacttcaattgtgatctcggacgtgttgaagggcgggcctgcagaaggtcagctgcaggagaatgaccgggttgccatggttaacggggtcagcatggacaatgtcgagcacgccttcgcagtgcaacaactgaggaagagcggcaagaacgcgaagattaccattcggcggaaaaaaaaagtgcaaatccctgtttcccgtccagaccctgaaccagtgtcagacaatgaagaggattcttacgatgaagaaatacatgacccccgctcgggtagaagcggggttgtgaatcggcgtagcgaaaagatttggccccgggatcgttcagcaagccgggaacggagtcttagccctaggtccgaccgcaggagtgtcgcatcctcacagcctgccaaacccactaaagttaccctcgtcaagtcccggaagaatgaagaatacggccttcggctggcctctcatatattcgtgaaggagattagtcaggattcactggctgcccgcgacgggaacatccaggaaggcgacgtggttctgaagatcaacgggaccgtgaccgagaacatgagtctcactgatgcaaaaacgttaatcgagaggagcaaggggaagctgaaaatggtggtccagcgggacgagagagccaccctgcttaacgtacccgacctgagtgactccatccacagtgctaacgcatccgagcgggatgacatttctgagattcagtcactggcctcggatcattccggcagatcacatgatcggcctcctcgacgaagtcgatcccggtcaccagatcagcgtagtgagccatcagaccactctcggcacagtcctcagcagcctagtaatggaagtctaaggagtcgggatgaggaacgtatctccaaaccaggagcggtaagtactcccgtaaagcacgcggacgaccacactccaaagacagttgaagaagtaaccgtcgagcgaaatgagaaacagacaccttctctccccgagccaaaacccgtgtatgcgcaggtgggccagcctgacgtcgacttgccggtcagccctagtgacggtgtgcttcctaattccacccacgaagacggtattttacgcccttctatgaagcttgtaaaatttagaaagggggacagcgtggggcttaggctcgccggcggaaacgatgtgggtatatttgtggcaggcgttctcgaagactctcccgcggccaaggaaggtcttgaagagggcgatcagattctgagagtgaacaacgtggatttcacaaatatcattagagaggaagctgtcctgttcctgctcgacttacctaagggcgaggaggtaactattctggctcagaagaaaaaggacgtatatagacgtatcgtcgaatccgacgtgggtgattctttctatatccgaactcatttcgagtacgaaaaagaaagtccttatggactctcttttaataaaggcgaagtgttccgcgttgtcgacactctgtataatgggaaactcggatcgtggctcgcaatccgtataggtaagaaccataaagaggtcgaaagaggcatcattcccaacaaaaatcgcgccgagcaactcgccagcgtccaatacactcttcccaagaccgccggtggtgatcgggcagacttttggcgctttcgggggctgaggagtagcaagcggaaccttaggaagagtcgtgaggacctgtctgcccagccggtgcaaactaagttccccgcctacgagagagttgttctaagagaagctggcttcctaagacccgtgaccatattcggcccgatcgcagatgtggcgcgggagaagctggccagagaagagcccgacatctaccagatcgccaagtcagagccccgggatgctggaacggaccagaggagcagtggaataattaggctgcacacaattaaacagattatcgatcaggataagcacgcactgctggatgtaacccctaacgcagttgatcgccttaactacgcccagtggtatccaattgtggttttcttgaatcctgattcgaagcagggagtgaagactatgaggatgaggttatgccctgaatcacgtaaaagcgcaagaaagctttacgaacggtcccataaattgagaaaaaacaatcatcacttgttcaccacgacgattaatctcaactccatgaatgacggctggtacggcgctctgaaagaagccatacagcagcagcagaatcagctcgtttgggtgtccgaaggcaaagccgatggggccacaagcgacgatctcgatctccacgatgataggttgtcctatcttagcgccccaggatcagagtacagcatgtacagcaccgatagtcgacatacctcagattacgaggatacggatactgagggaggggcgtacaccgatcaggagctagacgagactctcaatgacgaggtggggaccccacccgaatctgctattacccggagctccgaaccagtgcgggaggacagctcaggcatgcaccatgagaatcaaacctacccaccatactccccccaggctcagccacaaccaatccaccggatagactctccgggattcaagcccgcctcacagcagaaagcagaggcatcctcccctgtgccatacctcagtcccgagacgaacccagcaagcagtacgagcgccgtcaatcacaacgtcaacctgacgaacgttcgcctggaagagcccacacccgctcctagcaccagttattcacctcaggccgattcgctgcggacaccgagtaccgaagcagcacatatcatgctccgtgaccaagagccgtccctcagtagccacgtggatcccactaaggtgtatcgcaaggatccttatcccgaggagatgatgaggcaaaatcacgtactgaaacagcctgctgtatcacaccccggtcacagacccgataaggagccaaatttgacttacgaaccccagctgccctacgtggaaaaacaggcctcaagggacctggaacagcccacctatcgctatgaatcctcttcttacacagatcagttcagcagaaattacgaacacagactccgatacgaggatagggtgccgatgtacgaggagcaatggtcttactatgatgacaagcagccatacccctccagaccacctttcgacaatcagcactctcaggatctggacagcaggcaacacccagaagagtcatctgaaagaggatattttccacggttcgaggagccagccccactgagctacgatagcagaccgaggtatgagcaggctccccgcgcaagtgcccttcgacacgaagaacagccagctcccggctacgatacccacggaaggcttcgtccggaggcacagcctcatcccagtgccggccctaaaccagcagagagcaagcaatatttcgagcaatactcccgctcctatgagcaggtcccaccccagggcttcacttcccgggccgggcattttgaacctttgcacggagccgctgccgtccctccactgattccatcaagccagcacaagcccgaggccctgccctcgaataccaagccactccccccacctccaactcagacagaggaggaggaggatccggctatgaaacctcagagcgtccttacgagagtgaaaatgtttgagaacaaaagatctgcatcgctagaaactaagaaagatgtgaatgataccggaagcttcaagcctcccgaggtcgcctccaagccatccggggctccaatcattggcccaaaaccaacctcacaaaatcagtttagcgagcatgataagactctgtaccgtattccggaacctcagaaaccacagctcaagccccctgaggatattgtaagatccaatcattacgatcctgaggaggacgaagagtattacagaaagcagcttagctacttcgaccgtcgcagctttgagaataagccgcccgctcatattgccgccagtcacctcagtgaaccagcaaaacctgcgcactctcagaaccagagcaatttttcaagttacagcagcaaaggaaaaccacccgaagcagacggcgtggatcgctcctttggagaaaagcgctatgagcccatccaagctacaccccccccaccccccctccccagtcagtacgcgcagccatcacagccagtaacctcagccagcctccacatccacagtaaaggcgcccacggcgaaggcaacagtgtgtcgctcgacttccagaattccttggtcagcaaacccgaccctcccccatcacagaacaagcctgcaacattcaggcccccaaaccgggaggataccgcccaggcagccttctacccacagaaatcctttcccgataaggctcccgtgaacggaactgagcaaacccagaaaacagtaactcctgcatacaaccggtttactcccaagccttacaccagcagcgcgaggcctttcgagcgcaaattcgagtccccaaaattcaaccacaacctacttcccagcgagacggctcataaacccgacctgtcctccaagacaccgacaagccctaagactttggtgaaaagtcactcgctggcacaacccccagagtttgactcaggagtggaaaccttttctatccacgccgagaagcccaagtaccagatcaataatatctcaacagttcctaaggccatccccgtctccccttctgccgtcgaggaggacgaagatgaggacggtcatactgtggtagcaaccgccaggggtatcttcaatagcaacgggggggtgctcagctcaattgagactggcgttagcatcataatcccacagggtgccatcccagaaggcgttgagcaggagatctacttcaaggtgtgtagagacaacagcatcctgcctcccctagacaaagaaaaaggggagacactgttgagccctttagtcatgtgtggaccacacggcctcaaatttctgaagcctgtagagttaagactgcctcattgcgacccaaagacatggcagaataagtgcttgcctggcgacccaaactacctcgtcggtgccaattgcgtgtcggttctgatcgaccatttctag

SEQ ID NO: 296927 - DNA, 5247 bp, Artificial Sequence
  derived and/or modified sequence
atgtctgcccgggctgctgctgccaagagcacagccatggaggagacagccatctgggagcagcacacagtgaccctgcaccgggcccctggcttcggcttcggcatcgccatcagcggcggccgggacaacccccacttccagagcggggagaccagcatcgtcatcagtgatgtgctgaagggcggccctgctgagggccagctgcaggagaatgacagagtggccatggtgaatggagtgtccatggacaacgtggagcacgcctttgctgtgcagcagctgaggaagagcggcaagaatgccaagatcaccatccggaggaagaagaaggtgcagatccctgtgtccaggccagaccctgagcctgtgtctgacaatgaagaagattcctatgatgaggagatccatgaccccaggagcggccgcagcggcgtggtgaacagaagaagtgagaagatctggccccgggacagaagtgccagccgggagaggagcctgagccccaggagtgacagaagatctgtggccagcagccagcctgccaagcccaccaaggtgaccctggtgaagagcaggaagaatgaggagtatggcctgcggctggccagccacatctttgtgaaggagatcagccaggacagcctggccgccagagatggcaacatccaggagggagatgtggtgctgaagatcaatggaacagtgacagagaacatgagcctgacagatgccaagaccctgattgaaagaagcaagggcaagctgaagatggtggtgcagagagatgagcgggccaccctgctgaatgtgcctgacctgagtgacagcatccacagcgccaatgccagcgagagagatgacatcagcgagatccagagcctggccagtgaccacagcggccgcagccatgaccggcccccaagaagaagccgcagccgcagcccagaccagaggtctgagcccagcgaccacagccgccacagcccccagcagcccagcaatggcagcctgcggagcagagatgaggagcgcatcagcaagccaggagctgtgtccacccctgtgaagcatgctgatgaccacacccccaagacagtggaggaggtgacagtggagagaaatgagaagcagacccccagcctgcctgagcccaagcctgtgtatgcccaggtgggccagccagatgtggacctgcctgtgagccccagtgatggagtgctgcccaacagcacccatgaagatggcatcctgcggcccagcatgaagctggtgaagttcagaaaaggagacagcgtgggcctgcggctggccggcggcaatgatgtgggcatctttgtggccggcgtgctggaggacagccctgctgccaaggagggcctggaggagggggaccagatcctgcgggtgaacaacgtggacttcaccaacatcatccgggaggaggccgtgctcttcctgctggacctgcccaagggggaggaggtgaccatcctggcccagaagaagaaggatgtgtaccgccgcatcgtggagagtgatgtgggggacagcttctacatccgcacccactttgaatatgagaaggagagcccctacggcctgtccttcaacaagggggaggtgttccgggtggtggacaccctgtacaacgggaagctgggctcctggctggccatccgcatcggcaagaaccacaaggaggtggagcggggcatcatccccaacaagaacagagctgagcagctggcctctgtgcagtacaccctgcccaagacagctggaggagacagagctgacttctggaggttccggggcctgcggagcagcaagaggaacctgaggaagagccgggaggacctgagcgcccagcctgtgcagaccaagtttcctgcctatgagcgggtggtgctgcgggaggccggcttcctgcggcctgtgaccatcttcggccccatcgcagatgtggcccgggagaagctggcccgggaggagccagacatctaccagatcgccaagtctgagcccagagatgctggaacagaccagaggagcagcggcatcatccggctgcacaccatcaagcagatcatcgaccaggacaagcacgccctgctggatgtgaccccaaatgctgtggaccggctgaactatgcccagtggtaccccatcgtggtgttcctgaacccagacagcaagcagggcgtgaagaccatgaggatgaggctgtgcccagagagcaggaagagcgccaggaagctgtatgaaagaagccacaagctgaggaagaacaaccaccacctgttcaccaccaccatcaacctgaacagcatgaatgatggctggtatggagccctgaaggaggccatccagcagcagcagaaccagctggtgtgggtgtctgagggcaaggcagatggagccaccagtgatgacctggacctgcatgatgaccggctgagctacctgagcgcccctggcagcgagtacagcatgtacagcacagacagccgccacaccagtgactatgaggacacagacacagagggcggggcctacacagaccaggagctggatgagaccctgaatgatgaggtgggcaccccacctgagagcgccatcaccaggagcagcgagcctgtgcgggaggacagcagcggcatgcaccacgagaaccagacctacccaccctacagcccccaggcccagccccagcccatccacagaattgacagccctggcttcaagccagccagccagcagaaggccgaggccagcagccctgtgccctacctgagccctgagaccaacccagccagcagcaccagcgctgtgaaccacaacgtgaacctgaccaacgtgcggctggaggagcccaccccagcccccagcaccagctacagcccccaggccgacagcctgcggacccccagcacagaagctgcccacatcatgctgcgggaccaggagcccagcctgagcagccacgtggaccccaccaaggtgtacaggaaggacccctacccagaggagatgatgaggcagaaccacgtgctgaagcagcctgctgtgagccaccctggccacaggccagacaaggagcccaacctgacctatgagccccagctgccctacgtggagaagcaggccagccgggacctggagcagcccacctaccgctatgagagcagcagctacacagaccagttcagcaggaactatgagcaccggctgcgctatgaagatagagtgcccatgtatgaggagcagtggagctactatgatgacaagcagccctaccccagccggcccccatttgacaaccagcacagccaggacctggacagccggcagcaccctgaggagagcagcgagcggggctacttccccaggtttgaggagcccgcccccctgtcctatgacagccggcccaggtatgagcaggccccccgggccagcgccctgcggcatgaggagcagcctgcccctggctatgacacccacggccgcctgcggcctgaggcccagccccaccccagcgctggccccaagccagctgagagcaagcagtactttgagcagtacagccgctcctatgagcaggtgcccccccagggcttcaccagcagagctggccactttgagcccctgcacggggctgctgctgtgcccccactcatccccagcagccagcacaagccagaggccctgcccagcaacaccaagcccctgcccccaccacccacccagacagaggaggaggaggaccctgccatgaagccccagagcgtgctgaccagggtgaagatgtttgagaacaagaggtctgccagcctggagaccaagaaggatgtgaatgacaccggcagcttcaagcccccagaggtggccagcaagcccagcggggcccccatcatcggccccaagcccaccagccagaaccagttcagcgagcatgacaagaccctgtaccgcatccctgagccccagaagccccagctgaagcccccagaggacatcgtgcgcagcaaccactatgaccctgaggaggatgaggagtactacaggaagcagctgagctactttgaccggcgcagctttgagaacaagcccccagcccacatcgccgccagccacctgtctgagcccgccaagccagcccacagccagaaccagagcaacttcagcagctacagcagcaagggcaagcccccagaggctgatggagtggacaggagctttggagagaagagatatgagcccatccaggccaccccacctcctccacccctgcccagccagtatgcccagcccagccagcctgtgaccagcgccagcctgcacatccacagcaagggggcccatggagagggcaacagcgtgtccctggacttccagaacagcctggtgtccaagccagaccccccacccagccagaacaagccagccaccttccggccccccaaccgggaggacacagcccaggccgccttctacccccagaagagcttcccagacaaggcccctgtgaatggaacagagcagacccagaagacagtgaccccagcctacaaccgcttcacccccaagccctacaccagcagcgcccggccctttgagaggaagtttgagagccccaagttcaaccacaacctgctgcccagcgagacagcccacaagccagacctgagcagcaagacccccaccagccccaagaccctggtgaagagccacagcctggcccagcccccagagtttgacagcggcgtggagaccttcagcatccatgctgagaagcccaagtaccagatcaacaacatcagcacagtgcccaaggccatccctgtgagccccagcgctgtggaggaggatgaagatgaagatggccacacagtggtggccacagcccggggcatcttcaacagcaatggaggagtgctgagcagcattgagaccggggtgtccatcatcatcccccagggcgccatccctgagggcgtggagcaggagatctacttcaaggtgtgccgggacaacagcatcctgccccccctggacaaggagaagggggagaccctgctgagccccctggtgatgtgtggcccccacggcctgaagttcctgaagcctgtggagctgcggctgccccactgtgaccccaagacctggcagaacaagtgcctgcccggggaccccaactacctggtgggcgccaactgtgtgtctgtgctgattgaccacttctag

SEQ ID NO: 296928 - DNA, 5247 bp, Artificial Sequence
  derived and/or modified sequence
atgagcgcccgggccgccgccgccaagagcaccgccatggaggagaccgccatctgggagcaacacacagtcactctccaccgggcccctggcttcggtttcgggattgcgatcagcgggggcagggacaatcctcacttccagtctggggagacctccattgttatcagcgatgtgctaaaagggggcccagccgaggggcaactacaggagaacgaccgagtagccatggtgaacggcgtttctatggataacgtggaacacgctttcgcagtacaacaactgaggaaatcaggcaagaacgccaagattaccatccgaaggaaaaaaaaggtccagattccagtctccagacctgaccccgaacctgtcagtgataatgaggaggactcatatgatgaggagatccatgacccaagaagcggccggtctggggtggtgaatcggaggtcagaaaagatctggcctcgcgacaggagtgccagcagagagcggagcctaagccccagatccgatagacgcagcgtggcatcatctcagcctgccaaacccacaaaggtcaccctggtcaaaagccgcaaaaatgaagaatacggcctcaggctggcgagtcatatatttgttaaagaaattagccaggacagccttgccgcacgggacggaaacatacaggaaggcgacgtggtgctgaagattaatgggacagtgacggagaacatgtccctcactgatgccaagaccctgattgagcgctccaaaggtaagctgaagatggtagtccagagggacgagcgagctactctgctgaatgtccctgacctctcagactccattcactccgccaatgcatctgagcgtgatgacatatccgagattcaaagcctcgcgagtgatcacagtggccggtcacacgaccgaccaccccggaggagcaggtctcgtagccccgaccagcggtctgaaccaagcgatcatagcaggcactcaccccagcagccaagtaacgggtctctgcggagtcgtgacgaagagcgcatatctaaaccaggggccgtgtccacccccgtgaagcacgccgatgatcatacacccaagacggtggaagaggtgacagtagagcgcaacgaaaagcagacccccagtctaccggagcccaaacctgtctacgcacaggtagggcagccagatgtggacttacctgtttcaccctcagacggcgtattacccaactcaacccacgaggatggcatcctgagacctagtatgaaattggtgaagttccggaaaggtgattctgtgggcttgagattggccgggggaaacgatgtgggaatttttgtggctggcgtccttgaggactcaccagcagcgaaagaaggcctggaagaaggggaccagattctccgtgtcaacaatgtggattttactaacataattagggaagaggctgttctgtttctgctcgatctgccaaagggcgaggaagtcacgattttggcccagaaaaaaaaagacgtgtaccggaggatagtggaaagtgatgtgggggactcattctacatccgaacacattttgagtatgagaaggagagtccttacgggttgtcctttaataaaggagaggtgtttcgcgtggtggatactttatacaatggaaaactgggatcatggctagctatacggattggcaaaaatcataaggaagtggagagaggaatcattccaaacaaaaaccgcgcggagcagcttgccagcgtccaatacaccctccctaaaacggcaggcggggaccgcgcagatttctggcggtttcgaggactccgatcaagtaaacgcaatttacgcaaaagccgggaagatttgtccgcccagcctgtacagacaaagttccccgcctacgagcgggtggtcctgcgcgaggccggttttctgcgccccgtcactatttttgggccaatagccgatgtggccagagaaaagctcgccagggaggaaccagatatctaccagatcgccaaatcagaacctcgggatgcagggacagaccaacgtagcagcggaattatcaggctgcatacaatcaagcagataatcgaccaggacaagcacgcattgctagatgtgaccccgaatgctgtggaccgactgaactatgctcagtggtatccaatcgtcgtgttccttaacccagacagcaagcagggggtcaagaccatgcgcatgcggctgtgtccggaaagtcgaaagagtgctagaaagctttacgaaagatctcacaaactccgcaagaacaaccaccatctttttaccactacaataaacctaaattccatgaacgatggatggtatggagcattgaaggaggctatccagcagcaacagaaccagctggtatgggtgagcgagggtaaggcagatggtgcaacaagcgacgaccttgatctgcacgacgaccgtctaagctacctgtccgcacccggtagtgagtactccatgtattcaactgattcgcgtcacaccagtgactacgaggataccgatactgaggggggcgcctacactgatcaggaactggacgagactctcaacgacgaagtggggacacctcccgaaagtgcgatcaccagatcctccgaaccagtgcgagaggattcgtcaggaatgcaccacgagaatcagacgtatccgccctacagtccgcaggcccagccccaacctatccaccggattgacagcccaggatttaagcctgcctcccagcaaaaggcagaagcctcctcacccgttccatacctctctccggaaactaatccagcatcttcaacttcggccgtgaaccataatgtcaacttgaccaacgtgagactggaggaaccaactccagcaccttcaacctcctattctcctcaggccgattccttgcggactccttcaacagaagctgcacacatcatgctgcgtgatcaggaaccaagcctctcttcacacgtggaccccaccaaagtgtatcgtaaggacccataccccgaggagatgatgcgccagaaccacgtgcttaagcaacctgccgtgtctcaccccgggcatcgtcctgacaaggaaccaaatctgacctatgaaccgcaactcccttacgtcgaaaaacaggccagtcgcgacctggagcaacccacttaccgctatgaaagctcttcttacacagatcaatttagcagaaattatgagcaccgtctgagatatgaagacagagtgccaatgtatgaggaacagtggagctattacgacgacaaacagccctatccctcaagaccaccttttgacaaccaacactcccaggatctagattctcgacagcaccctgaggagtcctctgaaagagggtacttcccccgtttcgaggaacctgcacccctgagctacgatagccggccgcggtatgaacaggctccccgggcctcagccctccggcatgaagaacagcccgctcctggctacgatacccacggcagactccgccccgaagcccaacctcacccctcagcggggcctaaacccgccgaatctaagcagtactttgaacagtattctcgcagctatgaacaggtgccacctcaggggttcacatccagggcagggcatttcgagccgttgcacggtgctgccgccgttcctccactgataccaagtagtcaacataaaccagaagcactaccaagcaataccaaacctctgccccctcctcctactcagactgaggaagaggaggaccccgctatgaagccccaatcagtgctaactagggtgaaaatgttcgagaacaagagatcggccagcctagaaacaaaaaaagacgtaaatgataccgggagtttcaaaccacccgaagtggccagcaagcccagtggagcaccgattatcggacccaaacccacttcacagaaccagtttagcgaacacgacaagaccttataccgtatccccgaaccacagaagccacagctgaagccaccggaagatatagttagaagcaatcattacgacccagaggaagacgaggagtactaccgaaaacagctgtcctactttgaccggagatcatttgaaaacaagccgcccgcgcatatagccgcatctcatctctctgagcccgccaagccagcccactctcagaatcagagtaacttcagtagctattccagcaagggaaaacctcctgaggccgacggagtagaccgctcattcggagagaaacgatatgaacccatccaggctactcctccaccacccccactgccatctcagtacgcccagccaagccagccagtcaccagcgcttctctacatatccatagcaaaggcgctcacggagaaggcaactccgtcagcctcgatttccagaactcactggttagcaaacccgatccgcctccaagccaaaataaacccgctactttcagaccaccaaatcgtgaagacacagcacaggctgcattttacccccagaagtcttttccagataaagccccagtcaatggtaccgagcaaacacagaaaacagtgactcccgcttacaacaggttcacacccaaaccctatacttcttctgctcgccccttcgagcggaaatttgaatcccctaagttcaatcacaacctgctgcccagtgaaacagcccacaaacctgatctgtcatctaaaactcccaccagcccgaagacattagtgaaatctcactccctggcccagccccctgaatttgatagcggggttgagaccttctcaatccacgctgaaaagcctaagtatcagattaataacatctcaaccgtacccaaagcaatccccgtgtctccaagcgccgtggaggaagacgaggatgaggatggccataccgttgtcgccaccgcacgcgggatttttaattctaacggcggcgtgttatcctccatcgagacaggggtgtccattatcatcccgcagggagcaatccctgaaggtgtagagcaggagatttattttaaggtgtgcagagacaactctatattaccccctttggacaaagaaaagggggagacactgctgtcacccctcgtcatgtgcggccctcatggactaaagttcctcaagcctgtggagctccggcttcctcactgtgaccccaaaacatggcagaacaaatgtctgccaggagatccgaattatcttgttggggcgaattgtgtatccgtgcttatcgaccatttctag

SEQ ID NO: 296929 - DNA, 5246 bp, Artificial Sequence
  derived and/or modified sequence
atgtcagctcgggctgctgctgctaaatctactgctatggaggagaccgcgatttgggaacaacataccgttactttgcacagagcccctgggttcgggtttggtatagctatttcgggcggacgagataatccacactttcaatccggggagacctccatcgtgatctccgatgtgctaaaagggggtcctgccgagggacagcttcaggagaacgatagagtagccatggtgaatggggtctccatggacaatgtcgagcatgccttcgcagtacaacagttgaggaaaagcggtaagaacgctaaaatcactatccgcaggaagaagaaagtgcagatccccgtcagcagaccagatcctgaaccagtgagcgataacgaagaggacagttatgatgaagagatccacgaccctagatcaggcaggagcggcgtcgtcaacagaaggtcagaaaagatatggccacgcgacaggtcagcttcacgtgaaaggagcttgagtccccgatcagataggaggagcgtggcttcttcccagccggctaagcccaccaaggtgactctggtcaaatccaggaaaaacgaagagtacggactgcgattggcatcacatatctttgtcaaggaaatttcccaggactctctcgccgctagggacggaaacatccaggagggcgacgtggtgctgaaaattaatggaacggttacagagaacatgtcactcaccgatgcaaaaactctgattgaacgatcaaagggcaagctgaaaatggttgtccagcgtgatgagcgggctaccctcttgaatgttcccgatctgagcgattcaattcacagcgccaacgcttctgaacgagatgacatctcagagattcagtcactggcatcagaccactccggcagatctcatgaccggccaccgagacggagcaggtcccgctctcctgatcagcggtcagagccttctgatcactcacgtcacagcccccagcagccttccaatggcagccttcggtctagagacgaggagaggatttctaagcccggagcagtgtctacccccgtgaaacacgccgatgaccacacgcctaagacagtcgaggaagttacagtcgaacggaatgaaaagcaaactccgtctctgcctgaacctaaacccgtgtacgctcaggtcggtcagccggacgtcgacctgcccgtgagtccatcagacggtgtactgccaaacagtactcatgaagatgggattctccgcccatccatgaagctcgtaaaatttagaaaaggggacagcgtcgggcttcgtttagccggagggaatgatgtgggtatattcgtcgctggcgttttagaagacagccccgcagctaaagagggtctggaggagggcgaccagatcctgcgggttaacaatgtggacttcacaaatattatcagagaggaggcggtgctgttcctgttagacctgcccaaaggagaggaagtcacaattttagctcagaagaagaaggatgtgtacaggcgcatcgtagagtccgacgtgggcgacagtttctatattagaactcattttgaatatgaaaaggagtcaccttacggtctgtcattcaacaaaggcgaggtgttccgagttgtggatactctctataatggaaagttgggcagttggctggcaatccggatcggaaagaatcacaaagaagtggagagagggatcattcctaacaaaaatcgcgcagagcagttggcctcggtgcagtacaccctccccaaaacagccggaggagacagagcggacttctggagattcagaggtcttcggagctccaagaggaacctgcgcaagagccgggaggacctgtccgcccaacctgtgcagacaaagtttcctgcctatgagcgtgtggttctgcgtgaagcgggatttctccgccctgtgaccatctttggacccatcgcggatgtggccagagagaagttggcaagagaagagcccgacatctatcagatagcaaaaagtgaaccacgggacgccggtactgatcaacgctcatctggaatcatccggctgcacacgatcaaacaaataattgatcaggacaagcatgccctgctcgacgtgacgcctaacgccgtagacagattgaactacgctcagtggtacccaatagtggtcttcctcaatccagactccaagcagggagtcaagaccatgcgcatgcgactctgtcctgagagcaggaaaagcgcccgaaaattgtacgaacgctctcataagcttcggaagaacaatcatcacctgtttaccaccaccatcaacctgaattccatgaacgacgggtggtacggggctctgaaagaagccatacaacaacagcagaatcagttagtatgggtgtctgaaggaaaggccgatggagcaacctctgatgacctggatttacatgacgatagactgtcctatttaagcgccccaggtagcgagtactctatgtatagtacagacagccggcatactagcgactacgaggacaccgacactgaaggaggtgcttatacggaccaggagcttgacgaaacactgaatgatgaagtgggaacgccccctgagtcagcaattacacgctcctccgagcctgtgcgagaagactctagcgggatgcaccacgagaaccaaacctatccgccatatagcccccaggcccagccgcagcccatccacagaatagacagcccagggtttaaacccgctagccagcaaaaggcggaggctagtagcccagtgccctacctgtcacctgagacaaaccctgccagttccacatcagcagtcaaccataacgtgaatctaaccaatgtgaggcttgaagaaccaacccccgctccctccacatcgtacagcccccaggcagattctctccggacaccaagtaccgaggcggcacatataatgctgcgcgatcaggagccaagcctttcttctcatgtggaccccactaaggtgtaccgtaaagacccctaccctgaggagatgatgcggcagaaccacgtgctcaaacagcccgctgtcagtcatcctggacacagacctgacaaggagcccaacctcacgtacgaaccccagttaccctatgtggagaaacaggcttcgagggacctggagcagcctacatatagatatgaaagctcctcctatactgaccagttcagtagaaactatgaacacagactccgatacgaggatagggttccaatgtacgaggaacagtggagctattacgatgacaagcaaccatatccgagcaggccaccgtttgataaccaacattcccaggatcttgactccaggcaacatcctgaagaatctagcgaaaggggatactttccacggtttgaggaacctgctcctttgagctacgacagtcgcccacggtatgagcaggcccctcgcgcttccgccctgagacacgaggagcaacccgctccaggctacgacacccacggcaggctgaggcctgaggcccaacctcacccaagcgctggcccaaagcccgctgaaagcaaacagtatttcgagcagtattcccgttcttacgagcaggtgcccccacaggggtttacgtcccgcgcaggacattttgaacctctccacggagctgccgctgtaccccctctcattccttccagtcagcacaagccggaggcactgcccagcaacactaaaccacttccaccgcctcccacacagacagaggaagaagaggaccccgcaatgaagcctcagtctgtattgaccagggtcaaaatgtttgaaaataagcgctcagcctcactggagacgaaaaaggacgtgaatgacacagggagcttcaagcctcctgaagtcgcctcaaagccctccggggctccaattatcggtcctaaacctaccagtcagaatcagttcagcgaacatgacaaaacactctacaggattcccgagccccagaagccccagctcaagcccccagaggacattgtgcggagtaaccactatgacccggaggaggacgaagaatactaccgaaagcagttatcctacttcgaccgccgatcctttgagaataaacctcccgcacatatcgcggcaagccatctctctgaacctgcaaagcccgctcactcacaaaaccaatctaatttctcctcttattcctccaagggcaagcctcctgaagccgacggcgtggataggtcctttggggagaagaggtatgagcccatacaagctacgcccccaccacctcctctgccaagtcagtatgcacagccttctcagccagtcacatccgcctccctgcacatacactccaagggcgcacatggcgaaggaaatagcgtgtctctggattttcagaattctctcgtttccaaacctgatccaccccctagccagaataaacccgcaaccttccggcctcctaatcgggaagataccgctcaagccgctttctacccccagaaatcctttcctgacaaggcacccgtgaacggaactgagcagactcagaagactgtgactcccgcatacaaccgcttcacccccaaaccatataccagctcagcaaggccattcgagcggaagtttgagagcccgaagtttaatcacaacctgctgccttctgaaacagctcataaacctgatctgtcttccaagacccccacgtctcccaagaccttggtcaaatcccatagcttggcccagccaccagagtttgactccggagtggaaacgtttagcatccatgccgagaagccgaagtatcagattaacaacatctctacagtgccgaaggccatacccgttagcccatccgcagttgaagaagacgaagatgaagacggacacacagtcgtggccactgccagagggatctttaattctaacggtggcgtgctgagctcaatcgaaacaggcgttagcatcattattccgcaaggagccatacctgagggggtggaacaagaaatctattttaaagtgtgtagggacaattccatactgccacctctggataaagaaaagggcgagactctcctgagcccactggtgatgtgtggacctcacggcttaaaattcctcaaaccagtggaactgagactgccccactgcgatccaaagacctggcaaaataagtgcttacccggtgacccaaactatctggtcggcgctaactgcgtgtccgtcctgatcgatcattttta

SEQ ID NO: 296930 - DNA, 7950 bp, Artificial Sequence
  derived and/or modified sequence
cgggcatgctcagtgggccgggccggcaggtttgcgtggccgctgagttgccggcgccggctgagccagcggacgccgcgttccttggcggccgccggttcccgggaagttacgtggcgaagccggcttccgaggagacgccgggaggccacgggtgctgctgacgggcgggcgaccgggcgaggccgacgtggccgggctgcgaaagctgcgggaggccgagtgggtggccgcgctcggagggaggtgccggtcgggcgcgccccgtggagaagacccgggcggggcgggcgcttcccggacttttgtccgagttgaattccctccccctgggccgggcccttccggccgcccccgcccgtgccccgctcgctctcgggagatgtttatttgggctgtggcgtgaggagcgggcgggccagcgccgcggagtttcgggtccgaggagcctcgcgcggcgctggagagagacaagatgtccgccagagctgcggccgccaagagcacagcaatggaggaaacagctatatgggaacaacatacagtgacgcttcacagggctcctggatttggatttggaattgcaatatctggtggacgagataatcctcattttcagagtggggaaacgtcaatagtgatttcagatgtgctgaaaggaggaccagctgaaggacagctacaggaaaatgaccgagttgcaatggttaacggagtttcaatggataatgttgaacatgcttttgctgttcagcaactaaggaaaagtgggaaaaatgcaaaaattacaattagaaggaagaagaaagttcaaataccagtaagtcgtcctgatcctgaaccagtatctgataatgaagaagatagttatgatgaggaaatacatgatccaagaagtggccggagtggtgtggttaacagaaggagtgagaagatttggccgagggatagaagtgcaagtagagagaggagcttgtccccgcggtcagacaggcggtcagtggcttccagccagcctgctaaacctactaaagtcacactggtgaaatcccggaaaaatgaagaatatggtcttcgattggcaagccatatatttgttaaggaaatttcacaagatagtttggcagcaagagatggcaatattcaagaaggtgatgttgtattgaagataaatggtactgtgacagaaaatatgtcattgacagatgcaaagacattgatagaaaggtctaaaggcaaattaaaaatggtagttcaaagagatgaacgggctacgctattgaatgtccctgatctttctgacagcatccactctgctaatgcctctgagagagacgacatttcagaaattcagtcactggcatcagatcattctggtcgatcacacgataggcctccccgccgcagccggtcacgatctcctgaccagcggtcagagccttctgatcattccaggcactcgccgcagcagccaagcaatggcagtctccggagtagagatgaagagagaatttctaaacctggggctgtctcaactcctgtaaagcatgctgatgatcacacacctaaaacagtggaagaagttacagttgaaagaaatgagaaacaaacaccttctcttccagaaccaaagcctgtgtatgcccaagttgggcaaccagatgtggatttacctgtcagtccatctgatggtgtcctacctaattcaactcatgaagatgggattcttcggcccagcatgaaattggtaaaattcagaaaaggagatagtgtgggtttgcggctggctggtggaaatgatgttggaatatttgtagctggcgttctagaagatagccctgcagccaaggaaggcttagaggaaggtgatcaaattctcagggtaaacaacgtagattttacaaatatcataagagaagaagccgtccttttcctgcttgacctccctaaaggagaagaagtgaccatattggctcagaagaagaaggatgtttatcgtcgcattgtagaatcagatgtaggagattctttctatattagaacccattttgaatatgaaaaggaatctccctatggacttagttttaacaaaggagaggtgttccgtgttgtggataccttgtacaatggaaaactgggctcttggcttgctattcgaattggtaaaaatcataaggaggtagaacgaggcatcatccctaataagaacagagctgagcagctagccagtgtacagtatacacttccaaaaacagcaggcggagaccgtgctgacttctggagattcagaggtcttcgcagctccaagagaaatcttcgaaaaagcagagaggatttgtccgctcagcctgttcaaacaaagtttccagcttatgaaagagtggttcttcgagaagctggatttctgaggcctgtaaccatttttggaccaatagctgatgttgccagagaaaagctggcaagagaagaaccagatatttatcaaattgcaaagagtgaaccacgagacgctggaactgaccaacgtagctctggcattattcgcctgcatacaataaagcaaatcatagatcaagacaaacatgctttattagatgtaacaccaaatgcagttgatcgtcttaactatgcccagtggtatccaattgttgtatttcttaaccctgattctaagcaaggagtaaaaacaatgagaatgaggttatgtccagaatctcggaaaagtgccaggaagttatacgagcgatctcataaacttcgtaaaaataatcaccatctttttacaactacaattaacttaaattcaatgaatgatggttggtatggtgcgctgaaagaagcaattcaacaacagcaaaaccagctggtatgggtttccgagggaaaggcggatggtgctacaagtgatgaccttgatttgcatgatgatcgtctgtcctacctgtcagctccaggtagtgaatactcaatgtatagcacggacagtagacacacttctgactatgaagacacagacacagaaggcggggcctacactgatcaagaactagatgaaactcttaatgatgaggttgggactccaccggagtctgccattacacggtcctctgagcctgtaagagaggactcctctggaatgcatcatgaaaaccaaacatatcctccttactcaccacaagcgcagccacaaccaattcatagaatagactcccctggatttaagccagcctctcaacagaaagcagaagcttcatctccagtcccttacctttcgcctgaaacaaacccagcatcatcaacctctgctgttaatcataatgtaaatttaactaatgtcagactggaggagcccaccccagctccttccacctcttactcaccacaagctgattctttaagaacaccaagtactgaggcagctcacataatgctaagagatcaagaaccatcattgtcgtcgcatgtagatccaacaaaggtgtatagaaaggatccatatcccgaggaaatgatgaggcagaaccatgttttgaaacagccagccgttagtcacccagggcacaggccagacaaagagcctaatctgacctatgaaccccaactcccatacgtagagaaacaagccagcagagacctcgagcagcccacatacagatacgagtcctcaagctatacggaccagttttctcgaaactatgaacatcgtctgcgatacgaagatcgcgtccccatgtatgaagaacagtggtcatattatgatgacaaacagccctacccatctcggccaccttttgataatcagcactctcaagaccttgactccagacagcatcccgaagagtcctcagaacgagggtactttccacgttttgaagagccagcccctctgtcttacgacagcagaccacgttacgaacaggcacctagagcatccgccctgcggcacgaagagcagccagctcctgggtatgacacacatggtagactcagaccggaagcccagccccacccttcagcagggcccaagcctgcagagtccaagcagtattttgagcaatattcacgcagttacgagcaagtaccaccccaaggatttacctctagagcaggtcattttgagcctctccatggtgctgcagctgtccctccgctgataccttcatctcagcataagccagaagctctgccttcaaacaccaaaccactgcctccacccccaactcaaaccgaagaagaggaagatccagcaatgaagccacagtctgtactcaccagagttaagatgtttgaaaacaaaagatctgcatccttagagaccaagaaggatgtaaatgacactggcagttttaagcctccagaagtagcatctaaaccttcaggtgctcccatcattggtcccaaacccacttctcagaatcaattcagtgaacatgacaaaactctgtacaggatcccagaacctcaaaaacctcaactgaagccacctgaagatattgttcggtccaatcattatgaccctgaagaagatgaagaatattatcgaaaacagctgtcatactttgaccgaagaagttttgagaataagcctcctgcacacattgccgccagccatctctccgagcctgcaaagccagcgcattctcagaatcaatcaaatttttctagttattcttcaaagggaaagcctcctgaagctgatggtgtggatagatcatttggcgagaaacgctatgaacccatccaggccactccccctcctcctccattgccctcgcagtatgcccagccatctcagcctgtcaccagcgcgtctctccacatacattctaagggagcacatggtgaaggtaattcagtgtcattggattttcagaattccttagtgtccaaaccagacccacctccatctcagaataagccagcaactttcagaccaccaaaccgagaagatactgctcaggcagctttctatccccagaaaagttttccagataaagccccagttaatggaactgaacagactcagaaaacagtcactccagcatacaatcgattcacaccaaaaccatatacaagttctgcccgaccatttgaacgcaagtttgaaagtcctaaattcaatcacaatcttctgccaagtgaaactgcacataaacctgacttgtcttcaaaaactcccacttctccaaaaactcttgtgaaatcgcacagtttggcacagcctcctgagtttgacagtggagttgaaactttctctatccatgcagagaagcctaaatatcaaataaataatatcagcacagtgcctaaagctattcctgtgagtccttcagctgtggaagaggatgaagatgaagatggtcatactgtggtggccacagcccgaggcatatttaacagcaatgggggcgtgctgagttccatagaaactggtgttagtataattatccctcaaggagccattcccgaaggagttgagcaggaaatctatttcaaggtctgccgggacaacagcatccttccacctttagataaagagaaaggtgaaacactgctgagtcctttggtgatgtgtggtccccatggcctcaagttcctgaagcctgtggagctgcgcttaccacactgtgatcctaaaacctggcaaaacaagtgtcttcccggagatccaaattatctcgttggagcaaactgtgtttctgtccttattgaccacttttaactcttgaaatataggaacttaaataatgtgaaactggattaaacttaatctaaatggaaccactctatcaagtattataccttttttagagttgatactacagtttgttagtatgaggcatttgtttgaactgataaagatgagtgagcatgcccctgaaccatggtcggaaaacatgctacacactgcatgtttgtgattgacgggactgttggtattggctagaggttcaaagatattttgctttgtgatttttgtaatttttttatcgtcactgcttaacttcacatattgatttccgttaaaataccagccagtaaatgggggtgcatttgaggtctgttctttccaaagtacactgtttcaaactttactatggccctggcctagcatacgtacacattttattttattatgcatgaagtaatatgcacacattttttaaatgcacctggaatatataaccagtgttgtggatttaacagaaatgtacagcaaggagatttacaactgggggagggtgaagtgaagacaatgacttactgtacatgaaaacacatttttcttagggaaggatacaaaagcatgtgagactggttccatggcctcttcagatctctaacttcaccatattaccacagacatactaaccagcagaaatgccttaccctcatgttcttaattcttagctcattctccttgtgttactaagtttttatggcttttgtgcattatctagatactgtatcatgacaaagactgagtacgttgtgcatttggtggtttcagaaatgtgttatcacccagaagaaaatagtggtgtgatttggggatatttttttcttttcttttcttttctttttttttttttttgacaaggggcagtggtggttttctgttctttctggctatgcatttgaaaattttgatgttttaaggatgcttgtacataatgcgtgcataccacttttgttcttggtttgtaaattaacttttataaactttaccttttttatacataaacaagaccacgtttctaaaggctacctttgtattctctcctgtacctcttgagccttgaactttgacctctgcagcaataaagcagcgtttctatgacacatgcaaggtcattttttttaagaaaaaggatgcacagagttgttacatttttaagtgctgcatttaaaagatacagttactcagaattctctagtttgattaaattcttgcaaagtatccctactgtaatttgtgatacaatgctgtgccctaaagtgtatttttttactaatagacaatttattatggcacatcagcacgatttctgtttagataatacaccactacattctgttaatcattaggtgtgactgaatttcttttgccgttattaaaaatctcaaatttctaaatctccaaaataaaactttttaaaataaagtgctggcttggtctgtttgcccactgttttctagtttcatgcagctttataatcctgttttaaaatcctgcacacaaatccctatcacccagcgtcacctaccacctcgtcgtctggtgttgcatgcagaatttctccccttggccagcatgtacagatgggtgggcagtgctcatctgaagggctcagactgaagtggggcagaaggacctggagacagagtgggagaaggcagcaggccgacttccccctgtgggtaaacacacacccctgcgtggagaaacacccctgcatggggacacacgtgcgtttgtgtgtgtgcgtgtaaccatttgtatatggttttattccccagataaatagcacgggcattgtttaatgtcacccacatttgggggaagaaaatgggtttagtgagcataaatattccattgtggacatcctacttacttaactgccacccctgttgacatttggattattgctatagtgtttcagtaaacacctttgtggactgaatccatctatgtggattttatttttttcatctttgttaaggtataatttacatagagtaagttactgtttttaaaatgtatagttcaaattttgacaaacacatactgtttatttaccacggttaatacatacaacagtttctttatcttctctaatcatttgtacccctttatactcaacccttcttccagcccctggcaggatgatctcttctgtttctatagttgcctttttgacagtgtcatataaatggaatcatacaata

SEQ ID NO: 296931 - DNA, 5007 bp, Artificial Sequence
  derived and/or modified sequence
atgagcgccagagccgccgccgccaagagcaccgccatggaggagaccgccatctgggagcagcacaccgtgaccctgcacagagcccccggcttcggcttcggcatcgccatcagcggcggcagagacaacccccacttccagagcggcgagaccagcatcgtgatcagcgacgtgctgaagggcggccccgccgagggccagctgcaggagaacgacagagtggccatggtgaacggcgtgagcatggacaacgtggagcacgccttcgccgtgcagcagctgagaaagagcggcaagaacgccaagatcaccatcagaagaaagaagaaggtgcagatccccgtgagcagacccgaccccgagcccgtgagcgacaacgaggaggacagctacgacgaggagatccacgaccccagaagcggcagaagcggcgtggtgaacagaagaagcgagaagatctggcccagagacagaagcgccagcagagagagaagcctgagccccagaagcgacagaagaagcgtggccagcagccagcccgccaagcccaccaaggtgaccctggtgaagagcagaaagaacgaggagtacggcctgagactggccagccacatcttcgtgaaggagatcagccaggacagcctggccgccagagacggcaacatccaggagggcgacgtggtgctgaagatcaacggcaccgtgaccgagaacatgagcctgaccgacgccaagaccctgatcgagagaagcaagggcaagctgaagatggtggtgcagagagacgagagagccaccctgctgaacgtgcccgacctgagcgacagcatccacagcgccaacgccagcgagagagacgacatcagcgagatccagagcctggccagcgaccacagcggcagaagccacgacagaccccccagaagaagcagaagcagaagccccgaccagagaagcgagcccagcgaccacagcagacacagcccccagcagcccagcaacggcagcctgagaagcagagacgaggagagaatcagcaagcccggcgccgtgagcacccccgtgaagcacgccgacgaccacacccccaagaccgtggaggaggtgaccgtggagagaaacgagaagcagacccccagcctgcccgagcccaagcccgtgtacgcccaggtgggccagcccgacgtggacctgcccgtgagccccagcgacggcgtgctgcccaacagcacccacgaggacggcatcctgagacccagcatgaagctggtgaagttcagaaagggcgacagcgtgggcctgagactggccggcggcaacgacgtgggcatcttcgtggccggcgtgctggaggacagccccgccgccaaggagggcctggaggagggcgaccagatcctgagagtgaacaacgtggacttcaccaacatcatcagagaggaggccgtgctgttcctgctggacctgcccaagggcgaggaggtgaccatcctggcccagaagaagaaggacgtgtacagaagaatcgtggagagcgacgtgggcgacagcttctacatcagaacccacttcgagtacgagaaggagagcccctacggcctgagcttcaacaagggcgaggtgttcagagtggtggacaccctgtacaacggcaagctgggcagctggctggccatcagaatcggcaagaaccacaaggaggtggagagaggcatcatccccaacaagaacagagccgagcagctggccagcgtgcagtacaccctgcccaagaccgccggcggcgacagagccgacttctggagattcagaggcctgagaagcagcaagagaaacctgagaaagagcagagaggacctgagcgcccagcccgtgcagaccaagttccccgcctacgagagagtggtgctgagagaggccggcttcctgagacccgtgaccatcttcggccccatcgccgacgtggccagagagaagctggccagagaggagcccgacatctaccagatcgccaagagcgagcccagagacgccggcaccgaccagagaagcagcggcatcatcagactgcacaccatcaagcagatcatcgaccaggacaagcacgccctgctggacgtgacccccaacgccgtggacagactgaactacgcccagtggtaccccatcgtggtgttcctgaaccccgacagcaagcagggcgtgaagaccatgagaatgagactgtgccccgagagcagaaagagcgccagaaagctgtacgagagaagccacaagctgagaaagaacaaccaccacctgttcaccaccaccatcaacctgaacagcatgaacgacggctggtacggcgccctgaaggaggccatccagcagcagcagaaccagctggtgtgggtgagcgagggcaaggccgacggcgccaccagcgacgacctggacctgcacgacgacagactgagctacctgagcgcccccggcagcgagtacagcatgtacagcaccgacagcagacacaccagcgactacgaggacaccgacaccgagggcggcgcctacaccgaccaggagctggacgagaccctgaacgacgaggtgggcaccccccccgagagcgccatcaccagaagcagcgagcccgtgagagaggacagcagcggcatgcaccacgagaaccagacctaccccccctacagcccccaggcccagccccagcccatccacagaatcgacagccccggcttcaagcccgccagccagcaggtgtacagaaaggacccctaccccgaggagatgatgagacagaaccacgtgctgaagcagcccgccgtgagccaccccggccacagacccgacaaggagcccaacctgacctacgagccccagctgccctacgtggagaagcaggccagcagagacctggagcagcccacctacagatacgagagcagcagctacaccgaccagttcagcagaaactacgagcacagactgagatacgaggacagagtgcccatgtacgaggagcagtggagctactacgacgacaagcagccctaccccagcagaccccccttcgacaaccagcacagccaggacctggacagcagacagcaccccgaggagagcagcgagagaggctacttccccagattcgaggagcccgcccccctgagctacgacagcagacccagatacgagcaggcccccagagccagcgccctgagacacgaggagcagcccgcccccggctacgacacccacggcagactgagacccgaggcccagccccaccccagcgccggccccaagcccgccgagagcaagcagtacttcgagcagtacagcagaagctacgagcaggtgcccccccagggcttcaccagcagagccggccacttcgagcccctgcacggcgccgccgccgtgccccccctgatccccagcagccagcacaagcccgaggccctgcccagcaacaccaagcccctgccccccccccccacccagaccgaggaggaggaggaccccgccatgaagccccagagcgtgctgaccagagtgaagatgttcgagaacaagagaagcgccagcctggagaccaagaaggacgtgaacgacaccggcagcttcaagccccccgaggtggccagcaagcccagcggcgcccccatcatcggccccaagcccaccagccagaaccagttcagcgagcacgacaagaccctgtacagaatccccgagccccagaagccccagctgaagccccccgaggacatcgtgagaagcaaccactacgaccccgaggaggacgaggagtactacagaaagcagctgagctacttcgacagaagaagcttcgagaacaagccccccgcccacatcgccgccagccacctgagcgagcccgccaagcccgcccacagccagaaccagagcaacttcagcagctacagcagcaagggcaagccccccgaggccgacggcgtggacagaagcttcggcgagaagagatacgagcccatccaggccacccccccccccccccccctgcccagccagtacgcccagcccagccagcccgtgaccagcgccagcctgcacatccacagcaagggcgcccacggcgagggcaacagcgtgagcctggacttccagaacagcctggtgagcaagcccgaccccccccccagccagaacaagcccgccaccttcagaccccccaacagagaggacaccgcccaggccgccttctacccccagaagagcttccccgacaaggcccccgtgaacggcaccgagcagacccagaagaccgtgacccccgcctacaacagattcacccccaagccctacaccagcagcgccagacccttcgagagaaagttcgagagccccaagttcaaccacaacctgctgcccagcgagaccgcccacaagcccgacctgagcagcaagacccccaccagccccaagaccctggtgaagagccacagcctggcccagccccccgagttcgacagcggcgtggagaccttcagcatccacgccgagaagcccaagtaccagatcaacaacatcagcaccgtgcccaaggccatccccgtgagccccagcgccgtggaggaggacgaggacgaggacggccacaccgtggtggccaccgccagaggcatcttcaacagcaacggcggcgtgctgagcagcatcgagaccggcgtgagcatcatcatcccccagggcgccatccccgagggcgtggagcaggagatctacttcaaggtgtgcagagacaacagcatcctgccccccctggacaaggagaagggcgagaccctgctgagccccctggtgatgtgcggcccccacggcctgaagttcctgaagcccgtggagctgagactgccccactgcgaccccaagacctggcagaacaagtgcctgcccggcgaccccaactacctggtgggcgccaactgcgtgagcgtgctgatcgaccacttctag

SEQ ID NO: 296932 - DNA, 5007 bp, Artificial Sequence
  derived and/or modified sequence
atgtcagccagagcagccgcagctaagtccaccgctatggaggagaccgctatttgggaacagcacactgtgaccttgcaccgggcccctggtttcggattcggaattgccatttcaggagggcgagacaacccccattttcagagcggagagacctccatcgttatttctgacgtgttgaagggtggaccagccgagggacagctgcaagagaacgatagagtggccatggtaaacggagtgtcaatggataacgtcgagcatgcttttgctgttcagcagctgcggaagtctgggaaaaacgctaagatcactatcagaagaaaaaaaaaggtccagattccggtttccagaccggacccagaaccagtcagcgacaacgaagaggacagctacgatgaagaaatccatgacccccgctccgggagaagtggtgtagtgaataggaggtccgaaaagatctggcctagggataggtccgcgtcgcgcgaacggtccctgagcccacgatccgaccgaaggagcgttgctagttctcagcctgccaaaccaaccaaggtgacactcgtcaagtcccgtaagaacgaagaatacggcttgagattggcatcccatattttcgtgaaggagatttcccaggatagtctcgccgcaagggacggcaatatacaagaaggcgatgtagttttaaaaattaacggcaccgtgactgagaacatgagcttgacagacgccaaaacactgattgaacggagcaaggggaagctcaaaatggtggtccagagggacgaacgggcaacactcttaaacgtgccagatctgtctgacagcattcatagcgcgaatgcatccgagagagatgatatctccgaaatccagtcgctggcatctgaccattccggccgttctcacgaccgtccaccccgcagaagcaggtctaggagcccagaccagcggagcgagccaagcgatcactcccgccattcgccacagcagccttcaaatgggtctcttaggtcgcgtgacgaagaacgcatctctaaaccaggcgcagtgtcaacccccgtgaagcacgccgacgatcatacaccaaagactgtagaagaggtcaccgtggagaggaacgagaagcagaccccctcactgccagagcctaagcctgtttatgcccaggtggggcagccagacgtagacctgccagtgtcaccaagcgacggggtgctcccaaatagcacacatgaagacggaatcctgagacctagtatgaaactcgttaagttcaggaaaggtgattctgtagggctacgactggccgggggtaatgatgtggggatttttgtcgccggggtgcttgaggattcccccgcggccaaagaaggactcgaagaaggggatcagatccttcgggtcaacaacgtggacttcaccaacattattagagaggaggctgtactcttcctgttagacttgcctaagggcgaggaggtaacaatcttggctcagaagaaaaaagacgtataccgacgcatcgtggagtcagacgtgggcgacagtttttacatccggactcactttgaatacgagaaagagagtccctacggactgtctttcaacaaaggggaggtattccgagtggtggatactttgtataacggcaagctgggatcctggttagctatccgaattggaaagaatcacaaagaagtcgagcgcggaattatccccaacaaaaaccgggcggaacagctggcatccgtgcaatatacgctcccaaagaccgccggaggagatcgggccgatttttggcgcttcaggggcctacgctcttccaagagaaatctgcgcaagtcccgcgaggatctcagtgctcagcccgtacagacaaaattcccggcctatgaacgggtagttctccgtgaagccggatttctgcgcccagtgacgatctttgggcccatcgctgacgtcgcccgagagaaactggcacgtgaagaacctgatatttatcaaatcgccaaaagcgaacctcgcgacgccgggaccgaccagagaagttccggcattatcaggctgcataccattaaacagattatcgaccaggataagcatgcccttctggacgttactcctaacgccgttgaccgactgaattacgcacagtggtatccaatcgtggtgttcctgaatccagacagcaagcagggggtgaagacaatgcgaatgcggctgtgtcccgagagtcggaaaagtgcacgcaagttgtatgagcgcagccataagctgcgaaagaacaaccatcacctgttcaccacaaccattaatctaaacagtatgaacgatggttggtacggagcactgaaggaggcaatccagcaacagcaaaatcagctggtttgggtttccgaaggaaaggcggatggagcaacatcagacgacctggatctccacgacgatcgcctgagttacctgagcgcaccggggtccgaatactccatgtactccactgatagccggcatacctcggattatgaggacaccgatacggagggtggggcatatactgatcaggaactggacgagactctgaacgacgaggtgggaacgcctcccgagagtgctattaccagatcttctgagcccgtgagagaagactcgtccgggatgcaccacgagaaccagacatatccaccttatagccctcaggcccaacctcaacccattcaccggattgattctcctggatttaagcctgccagccaacaggtctatcggaaggatccctatccggaagaaatgatgcgccagaatcacgtgctgaagcagcctgccgtgagccacccaggccatcgacctgataaggaacccaatttgacctatgagccacagctcccctatgtagagaagcaggcatccagggacctggaacagccaacctatagatacgaaagtagctcctacactgatcaattcagccgcaattatgaacatcgcctcaggtacgaagaccgcgtgccaatgtacgaagagcagtggtcctactatgacgacaaacagccctatcccagtcgaccaccttttgataatcagcacagtcaggatctggactctcgtcagcaccccgaggagtcaagcgagaggggttatttcccaaggttcgaagagccggcaccactcagctatgacagtcggcctaggtacgagcaggcgcctagggcatctgccttgcgccatgaagaacagcccgccccgggctatgacacacacggcaggctgagacccgaagcacagccccatcccagcgccgggccgaagcccgccgaatcaaaacaatactttgagcagtactcacgcagctatgagcaagtgcctccacagggcttcacctctcgggcaggccactttgagccgctgcacggagctgcagctgtgcccccgctgattccttcctcccagcataaaccagaagccttacctagcaacactaaacctctccctcccccacctacccagaccgaagaagaagaggacccagccatgaaaccacagtccgtgctgacccgagttaaaatgtttgaaaataagcgctctgccagcctggaaacaaaaaaagacgtcaatgatactggaagctttaaaccaccggaggtggctagcaagccaagtggcgcgccgattatcggcccaaagccaacttcccagaaccagttctctgaacatgataaaacactctacaggatcccagagcctcagaaaccccagctcaagcccccagaagatatcgtgcgttctaaccactacgatcctgaggaggacgaagaatactaccgaaagcagctcagttacttcgatagacgctcctttgagaataaaccgccggcccacatcgccgcttcacatttgtcggagcccgccaaacccgcccactctcagaatcagtcgaacttctctagctacagcagtaaggggaaaccccccgaggccgacggggtcgataggagcttcggcgaaaaaagatacgagcccattcaggccacaccccctccccccccactgccgtcccaatatgctcaacccagtcagcccgtgacatctgcaagcctgcacattcactccaagggggcccacggggaggggaatagtgtgtctctggacttccaaaactccctggtctcgaagcctgatccccctccatcacaaaataaacctgccacattcaggcctccgaacagagaggatactgctcaggccgccttttatcctcaaaagtccttcccggacaaagcaccagtgaatggtaccgagcagacccaaaagacagttacccccgcctacaatcgatttaccccaaaaccttacacctccagtgcccggccttttgagcggaagttcgagtctccgaagttcaatcacaatctgttgccatccgagacggcgcacaaaccagaccttagtagtaaaacccccacatcacccaaaactctggtgaagagtcactctttggcccagcccccagagttcgacagcggggtggaaacattctccatccacgctgaaaagccaaaatatcagatcaacaatattagcactgtgccaaaagctatcccggtgtctcctagtgccgtggaggaggacgaagacgaggacgggcatacagtcgtagcgacagccaggggaatctttaactctaacgggggagtgttgagtagtatagagacaggggtgtccattattattcctcagggggccattccagagggcgttgaacaggagatttactttaaggtgtgtcgagacaactccatcctaccaccgctggacaaggagaagggagagactttactgagccctttggttatgtgtggccctcacggactaaaatttcttaaaccagtggagctgagactcccccactgtgatcccaagacttggcaaaacaagtgtttgccaggcgaccccaattacctcgtgggagccaattgtgtgagtgtgctaattgaccatttttag

SEQ ID NO: 296933 - DNA, 5007 bp, Artificial Sequence
  derived and/or modified sequence
atgtctgcccgggctgctgctgccaagagcacagccatggaggagacagccatctgggagcagcacacagtgaccctgcaccgggcccctggcttcggcttcggcatcgccatcagcggcggccgggacaacccccacttccagagcggggagaccagcatcgtcatcagtgatgtgctgaagggcggccctgctgagggccagctgcaggagaatgacagagtggccatggtgaatggagtgtccatggacaacgtggagcacgcctttgctgtgcagcagctgaggaagagcggcaagaatgccaagatcaccatccggaggaagaagaaggtgcagatccctgtgtccaggccagaccctgagcctgtgtctgacaatgaagaagattcctatgatgaggagatccatgaccccaggagcggccgcagcggcgtggtgaacagaagaagtgagaagatctggccccgggacagaagtgccagccgggagaggagcctgagccccaggagtgacagaagatctgtggccagcagccagcctgccaagcccaccaaggtgaccctggtgaagagcaggaagaatgaggagtatggcctgcggctggccagccacatctttgtgaaggagatcagccaggacagcctggccgccagagatggcaacatccaggagggagatgtggtgctgaagatcaatggaacagtgacagagaacatgagcctgacagatgccaagaccctgattgaaagaagcaagggcaagctgaagatggtggtgcagagagatgagcgggccaccctgctgaatgtgcctgacctgagtgacagcatccacagcgccaatgccagcgagagagatgacatcagcgagatccagagcctggccagtgaccacagcggccgcagccatgaccggcccccaagaagaagccgcagccgcagcccagaccagaggtctgagcccagcgaccacagccgccacagcccccagcagcccagcaatggcagcctgcggagcagagatgaggagcgcatcagcaagccaggagctgtgtccacccctgtgaagcatgctgatgaccacacccccaagacagtggaggaggtgacagtggagagaaatgagaagcagacccccagcctgcctgagcccaagcctgtgtatgcccaggtgggccagccagatgtggacctgcctgtgagccccagtgatggagtgctgcccaacagcacccatgaagatggcatcctgcggcccagcatgaagctggtgaagttcagaaaaggagacagcgtgggcctgcggctggccggcggcaatgatgtgggcatctttgtggccggcgtgctggaggacagccctgctgccaaggagggcctggaggagggggaccagatcctgcgggtgaacaacgtggacttcaccaacatcatccgggaggaggccgtgctcttcctgctggacctgcccaagggggaggaggtgaccatcctggcccagaagaagaaggatgtgtaccgccgcatcgtggagagtgatgtgggggacagcttctacatccgcacccactttgaatatgagaaggagagcccctacggcctgtccttcaacaagggggaggtgttccgggtggtggacaccctgtacaacgggaagctgggctcctggctggccatccgcatcggcaagaaccacaaggaggtggagcggggcatcatccccaacaagaacagagctgagcagctggcctctgtgcagtacaccctgcccaagacagctggaggagacagagctgacttctggaggttccggggcctgcggagcagcaagaggaacctgaggaagagccgggaggacctgagcgcccagcctgtgcagaccaagtttcctgcctatgagcgggtggtgctgcgggaggccggcttcctgcggcctgtgaccatcttcggccccatcgcagatgtggcccgggagaagctggcccgggaggagccagacatctaccagatcgccaagtctgagcccagagatgctggaacagaccagaggagcagcggcatcatccggctgcacaccatcaagcagatcatcgaccaggacaagcacgccctgctggatgtgaccccaaatgctgtggaccggctgaactatgcccagtggtaccccatcgtggtgttcctgaacccagacagcaagcagggcgtgaagaccatgaggatgaggctgtgcccagagagcaggaagagcgccaggaagctgtatgaaagaagccacaagctgaggaagaacaaccaccacctgttcaccaccaccatcaacctgaacagcatgaatgatggctggtatggagccctgaaggaggccatccagcagcagcagaaccagctggtgtgggtgtctgagggcaaggcagatggagccaccagtgatgacctggacctgcatgatgaccggctgagctacctgagcgcccctggcagcgagtacagcatgtacagcacagacagccgccacaccagtgactatgaggacacagacacagagggcggggcctacacagaccaggagctggatgagaccctgaatgatgaggtgggcaccccacctgagagcgccatcaccaggagcagcgagcctgtgcgggaggacagcagcggcatgcaccacgagaaccagacctacccaccctacagcccccaggcccagccccagcccatccacagaattgacagccctggcttcaagccagccagccagcaggtgtacaggaaggacccctacccagaggagatgatgaggcagaaccacgtgctgaagcagcctgctgtgagccaccctggccacaggccagacaaggagcccaacctgacctatgagccccagctgccctacgtggagaagcaggccagccgggacctggagcagcccacctaccgctatgagagcagcagctacacagaccagttcagcaggaactatgagcaccggctgcgctatgaagatagagtgcccatgtatgaggagcagtggagctactatgatgacaagcagccctaccccagccggcccccatttgacaaccagcacagccaggacctggacagccggcagcaccctgaggagagcagcgagcggggctacttccccaggtttgaggagcccgcccccctgtcctatgacagccggcccaggtatgagcaggccccccgggccagcgccctgcggcatgaggagcagcctgcccctggctatgacacccacggccgcctgcggcctgaggcccagccccaccccagcgctggccccaagccagctgagagcaagcagtactttgagcagtacagccgctcctatgagcaggtgcccccccagggcttcaccagcagagctggccactttgagcccctgcacggggctgctgctgtgcccccactcatccccagcagccagcacaagccagaggccctgcccagcaacaccaagcccctgcccccaccacccacccagacagaggaggaggaggaccctgccatgaagccccagagcgtgctgaccagggtgaagatgtttgagaacaagaggtctgccagcctggagaccaagaaggatgtgaatgacaccggcagcttcaagcccccagaggtggccagcaagcccagcggggcccccatcatcggccccaagcccaccagccagaaccagttcagcgagcatgacaagaccctgtaccgcatccctgagccccagaagccccagctgaagcccccagaggacatcgtgcgcagcaaccactatgaccctgaggaggatgaggagtactacaggaagcagctgagctactttgaccggcgcagctttgagaacaagcccccagcccacatcgccgccagccacctgtctgagcccgccaagccagcccacagccagaaccagagcaacttcagcagctacagcagcaagggcaagcccccagaggctgatggagtggacaggagctttggagagaagagatatgagcccatccaggccaccccacctcctccacccctgcccagccagtatgcccagcccagccagcctgtgaccagcgccagcctgcacatccacagcaagggggcccatggagagggcaacagcgtgtccctggacttccagaacagcctggtgtccaagccagaccccccacccagccagaacaagccagccaccttccggccccccaaccgggaggacacagcccaggccgccttctacccccagaagagcttcccagacaaggcccctgtgaatggaacagagcagacccagaagacagtgaccccagcctacaaccgcttcacccccaagccctacaccagcagcgcccggccctttgagaggaagtttgagagccccaagttcaaccacaacctgctgcccagcgagacagcccacaagccagacctgagcagcaagacccccaccagccccaagaccctggtgaagagccacagcctggcccagcccccagagtttgacagcggcgtggagaccttcagcatccatgctgagaagcccaagtaccagatcaacaacatcagcacagtgcccaaggccatccctgtgagccccagcgctgtggaggaggatgaagatgaagatggccacacagtggtggccacagcccggggcatcttcaacagcaatggaggagtgctgagcagcattgagaccggggtgtccatcatcatcccccagggcgccatccctgagggcgtggagcaggagatctacttcaaggtgtgccgggacaacagcatcctgccccccctggacaaggagaagggggagaccctgctgagccccctggtgatgtgtggcccccacggcctgaagttcctgaagcctgtggagctgcggctgccccactgtgaccccaagacctggcagaacaagtgcctgcccggggaccccaactacctggtgggcgccaactgtgtgtctgtgctgattgaccacttctag

SEQ ID NO: 296934 - DNA, 5007 bp, Artificial Sequence
  derived and/or modified sequence
atgagcgcccgggccgccgccgccaagagcaccgccatggaggagaccgcaatttgggagcagcataccgtgaccctgcaccgggcacccggctttggattcggaatcgccattagcggggggcgcgacaatcctcatttccagtctggtgagacatccatcgtcatcagcgacgtcctgaaaggagggccagccgaggggcagctgcaggagaacgacagggttgccatggtcaatggagtgagtatggacaatgttgaacatgcgttcgcggtgcagcagctgcgtaagtccggaaagaatgctaagataactatcagacggaaaaaaaaggttcagatcccggtgtcccgaccggatccagagccagtgtctgataatgaagaggactcctacgacgaggaaatccacgatcctcggtcaggccgatcgggcgtggttaatcggcggtctgagaagatatggccacgggatcgctctgcttctcgggagaggtctctgtcacctcgttccgacagaaggagcgttgcctcctcccagccagcgaaaccaacgaaagtgaccctcgtaaagagcagaaaaaacgaggagtatgggttaaggttggcgtcacacattttcgtgaaggaaattagccaggacagtctagccgcacgggacggcaacatccaagagggtgatgtggtgctcaagatcaatggtaccgtgacagaaaacatgagtttgaccgacgcaaaaacactcattgaacggtctaaaggaaaacttaagatggtggtgcaaagagatgagagggccaccctgttgaatgtgcctgacctcagtgattctatccacagtgccaacgcgtctgagcgagacgacatctcagaaatccagtccctggctagtgatcacagtgggcggagtcacgaccggcccccccgacgatcccgctctaggagcccagaccagcgctccgaaccctccgaccacagcaggcacagtccacaacagcccagcaatggcagtctccgaagccgcgatgaggagcggatctccaagcctggcgctgttagtacgcctgtcaagcacgcagacgaccacacccctaagaccgtcgaggaggtcacagtggagagaaatgagaaacagacaccctccctgccagagcccaagcccgtgtatgcccaggtcggccagccagacgttgacttaccggtgtcaccatccgacggcgtgcttcccaactcaacacacgaggatggcatccttcggccatccatgaagctggtgaagttccggaagggggattcagtgggtctgcggcttgccggcggcaacgacgtaggaatctttgtggccggcgtgttagaagatagccctgccgcaaaggaggggcttgaagagggagaccagatcctccgggttaataacgtggatttcactaatattattcgcgaggaagctgtgctgtttcttcttgatctcccaaagggcgaggaagtaactatcctcgcccagaagaagaaggatgtgtaccgccgcatcgttgagtctgacgtgggcgatagtttctacatcaggacccactttgagtacgagaaagaatcaccctatgggctctcctttaacaaaggcgaggtattcagagtggtcgacaccctctataacggtaagcttgggagctggctggctatccgcattggtaagaaccacaaggaggtggaacgtggaatcatccctaataaaaatcgtgcagaacaactcgccagtgtgcagtacacactgcctaagactgccggtggcgaccgggcagacttttggaggttcagaggtctgagaagctcgaagaggaacctgcggaagtcccgggaggacctgagcgcgcagccagtgcagaccaagttccctgcgtacgaaagggtcgtgctgcgcgaggccggattccttcgacccgtgaccatctttggacctatcgcggacgtcgcccgggagaaacttgctagggaggaaccagatatttaccagattgcaaagtccgaaccccgtgacgcagggacggaccagcgatcatcgggaatcatcaggctgcacacaatcaagcagatcatagaccaggacaagcacgcactgctggacgtaacccccaacgcagtagacagacttaactatgctcaatggtaccctatcgtggtgttcctcaaccccgattccaagcagggcgtgaagaccatgcggatgcgactgtgcccagaatcgaggaaatctgccagaaaactttacgagcgtagtcacaaactgagaaaaaacaatcaccatctttttacaaccaccattaacctgaactccatgaatgacggctggtacggggcccttaaggaggcgattcaacagcaacaaaatcagcttgtgtgggtcagcgaggggaaagccgacggcgcaacttcagacgatctggatctgcacgacgacagattgagctatttatccgctcctgggagtgaatattcaatgtactctaccgatagccgccacacttctgattacgaagatactgacaccgagggaggcgcttacaccgaccaggagctggacgaaacccttaatgacgaggtgggcacaccccctgagtcagcaatcacacgctcatccgagcccgtgcgggaagacagttccgggatgcaccatgagaatcaaacataccccccctactctccccaagcgcagccacagcccattcataggattgattcacctgggtttaagcctgcctcccagcaagtgtatcggaaagatccttacccagaggagatgatgagacagaaccacgttcttaagcagcccgccgtgtcccaccccgggcaccggccggacaaagagccaaatctgacctatgaacctcagctgccatatgtagagaaacaagctagccgagatttggaacagcctacctaccgatacgagtcaagcagttacactgaccaattttcacgtaattacgagcaccgcttacggtatgaggaccgggtgcctatgtacgaagaacaatggtcttattacgacgataaacaaccttacccttcacgaccaccgttcgataaccagcacagccaggatctggattccaggcagcatccagaggagtcatccgagaggggttattttccacggttcgaagaacccgccccactgagttacgattccaggcccaggtatgagcaggcacctagagcttccgctttgcggcacgaagagcagcctgcccccggatacgacacacatgggcgccttaggcccgaagcacaaccacacccgtcagctggacccaagcccgcagagtccaaacagtacttcgagcagtactccagatcgtacgagcaggttccacctcagggcttcacatctagggccgggcattttgagccactgcacggcgccgccgccgtgccccctctaattcctagtagccagcacaaacctgaggctctgccgagcaatacaaagcctttaccgccacctccaacccagactgaggaagaggaagatcctgcaatgaagccccaatctgtcctgactagggtcaagatgttcgaaaacaagcggagcgctagcctggagaccaagaaggacgtgaacgatacaggctcttttaagccgccagaggttgccagcaagcctagtggggcgcccattattggtccgaaacccacttcacagaatcaattctcagaacacgacaagacactgtacaggattccagaacctcagaaaccccaattgaagcctcccgaggacatcgtgcgctctaatcattacgacccagaggaagatgaagagtactatagaaaacagcttagctacttcgatagaaggtcattcgaaaacaagcctccagcacacattgctgcttcccatctgtctgagcccgcgaaacctgcccatagccagaatcagagcaacttttcaagctacagcagcaaggggaaacctcccgaggcagatggtgttgatcggagcttcggagaaaaaaggtacgaaccaatccaagcaacccctccgccaccccccctgcccagtcagtacgcccaaccatcccagcctgtcacttcagccagtctgcacatccatagcaaaggagcccatggcgaaggaaactccgtaagcctggatttccaaaactctctggtgagcaaacctgatcccccaccatcgcaaaacaagcctgccacttttcggccaccaaacagggaggatacagcccaggccgcgttttacccccagaagagttttcctgacaaggctccagttaatgggaccgagcagacacaaaagactgtgacgcccgcctacaaccgtttcactcccaagccatataccagctcagcaagacctttcgaacggaaattcgaaagtcccaagttcaaccataatctgctgccatccgagacagcgcataagcctgatctcagctctaaaactcccaccagccccaagacactcgtgaagagtcacagcctggcccagccgcctgagtttgacagcggcgtcgaaacgttttccatccacgccgaaaagcccaaatatcagattaataacatctccacagtgccgaaggcaattcctgtgagtccttcagctgtcgaggaagatgaggatgaggacggtcacaccgtcgtagcgacagcccgggggatcttcaactctaatggcggcgtgttaagctctatcgagaccggcgtgtccatcataatcccccaaggcgcaataccagaaggagtggaacaggagatttactttaaggtgtgtagggataattccatcttgcctccactcgataaggaaaaaggggagacactactctctcctttggtcatgtgcggcccccacggtctcaagtttttaaaaccggtggagctgcggctccctcattgtgaccctaagacatggcagaataagtgcttaccgggcgatcctaattatctcgtgggggccaactgcgtctctgtgctcatagaccatttctag

SEQ ID NO: 296935 - DNA, 5007 bp, Artificial Sequence
  derived and/or modified sequence
atgtccgcaagagccgcagcagcaaagagcacagctatggaggagacagccatctgggagcagcataccgtcactctgcatcgtgccccaggcttcggtttcggcatcgcaatctcaggaggaagggacaacccgcatttccagagcggggagacttctatagtcatatctgatgtgctgaagggaggcccagccgaggggcagcttcaggaaaacgatcgtgttgccatggtcaacggcgtttcaatggacaacgtggaacatgcgtttgctgtgcaacaacttcgaaaatctggaaaaaatgccaaaatcacgattaggaggaagaaaaaggtccaaatacccgtgagccgaccagaccctgaaccagtgagcgacaacgaagaggatagttacgatgaggaaattcatgacccccgtagtggtagatctggagtggtcaaccgcaggtcagaaaaaatctggcccagggaccgttcagccagcagggaaagatccctgtccccccgaagcgataggcggagcgtcgcctcgagccaacctgccaagccaactaaggtcaccctggtgaagagcagaaagaacgaggaatacggcttacgccttgcttcacatatattcgttaaagagatttcacaggactctctggcagcacgcgacggcaacatccaagagggcgacgtggtgctgaagatcaatgggaccgtaaccgaaaacatgagcctgactgacgcgaaaactctgatcgaaagatcaaaaggcaagctaaaaatggtggtgcagcgggatgaacgggcaactcttttgaatgtgcccgatcttagtgacagtattcactctgccaatgctagcgagagggacgacatttcagagattcagagcttggcgtcagaccactcgggacgctcccacgatcgaccgccacgacgctcccgatccaggagcccggatcagcggagcgagccctcggaccattctcgacactccccgcagcaaccatccaacggttcactgcgttccagagatgaagagcgaatttctaaacctggcgctgtatccacaccggtcaagcatgccgatgaccacacacccaagaccgtagaagaggtgaccgtcgagcggaacgagaagcaaacgccctcactgcccgaaccaaagccggtctacgcccaggtggggcagccagacgtggaccttccagtttctcccagcgatggggtgctgcccaactctacgcacgaggatggcattctaaggcccagtatgaagctggtgaagttccggaagggggattccgtgggcttgcgacttgcaggcggaaacgacgttgggatttttgttgcaggcgtgctcgaggattcgccagccgcaaaggaaggtttggaggaaggagaccaaatcctgagagtaaacaatgtggacttcactaacatcattcgggaagaggctgttctcttcctcctggacctccctaaaggagaagaagtgacaattttagcccagaagaagaaggatgtctatcgacgcattgtcgagtcggacgtgggcgattctttctatattcgaacacactttgagtacgaaaaagagtccccatatgggctgtcctttaataaaggagaagtatttagagtagttgataccctgtacaatggaaagctcggctcttggctggccatcaggatcggcaaaaaccataaggaggttgaaaggggtatcattcctaataagaatagggctgagcagctcgctagtgtccagtatacactgcccaagactgctggcggagaccgtgctgacttttggcggtttagaggtctgaggtcttctaagaggaatctgaggaagtcccgcgaggacctgtctgctcagcccgtgcagaccaagttccccgcttatgagcgggtcgtcctgcgggaggccggattcctgagaccggttaccatctttggcccaatagcagatgtggcccgagaaaagttagcccgagaagagccagatatttaccagattgctaaaagcgaaccgagggatgccggtacggaccagcgctcttccggcatcatccgcctacataccattaagcagatcattgaccaggataaacatgccctgcttgacgtcacaccaaacgccgtcgacaggctcaattatgcacagtggtatcccattgttgtatttctcaacccggactccaagcagggagtgaagaccatgagaatgaggttatgtccagagtcacgcaagagcgcacgcaagttgtacgagcgatcacacaagctccgcaagaacaatcaccatctgttcactacaaccatcaatttgaacagcatgaatgatggctggtacggagcactcaaggaggccatccaacaacagcagaaccagcttgtttgggtgagtgaagggaaagccgacggagcaacctctgatgatctagacttacacgatgataggctttcatacctctccgcaccagggagtgagtattctatgtactcaacagacagtcggcatacaagcgactatgaggatacggacacggagggcggagcgtacacagaccaagagcttgacgagactctcaatgacgaggtcggaactcctccagagtcagccatcacccggtcatcggagcccgtcagagaggacagtagtggaatgcatcacgagaatcaaacctacccgccttattccccacaggctcagccccaacctatccataggatcgacagtccaggatttaagcctgcgtcacagcaggtctataggaaagacccatatcccgaggaaatgatgagacagaatcacgtgctcaagcaaccagcggtgtctcacccaggacatcggcctgacaaagaacccaacttgacctatgaaccccagctcccctatgtggagaagcaggcctcaagggacttggaacagcccacctacaggtacgagagctccagttatactgatcagttttctcggaactacgagcacaggctgcgctatgaagaccgagtaccaatgtatgaagaacagtggagttactacgatgataagcaaccttatcccagtcggcctccattcgataatcaacactcgcaggacctggattcaaggcaacacccagaggagagtagtgaaagaggctactttcccaggtttgaggaacctgcccctctgagctatgactcaaggccacgttatgaacaggcgccaagggccagcgcgttaagacacgaagaacagcccgctcctgggtacgacacacatggtagattgcgacctgaggcccagcctcatccgtccgcgggtcctaaaccagcagagagcaagcagtactttgaacaatacagtcggagttatgagcaggtgcccccacaggggtttacaagtcgggctggccattttgagccactacacggcgctgctgccgtgcctcccctcatacctagtagccagcacaagccggaagccctgccatcaaacaccaagcctctcccccctccacctacgcaaacagaagaggaggaggacccagccatgaagcctcagtccgttctcacccgcgtcaaaatgttcgagaacaagcggagcgcttctcttgaaacaaagaaagacgtcaatgacacaggcagttttaaaccaccagaggttgcttctaagccatcgggagcccctatcatcgggcctaaaccaactagccagaaccagtttagcgagcatgataagactctgtatagaataccagagccccaaaagccccaactcaagccacctgaagatatcgtgcggtccaatcactacgaccccgaggaggacgaagaatactatcgaaagcagctcagttattttgataggaggagcttcgagaataaacctcccgcacacatagctgcttcccacctttccgaacccgctaaaccagcacattctcagaatcaatctaatttttctagttactctagtaaaggcaaaccccctgaagccgacggtgtggataggtcattcggcgagaaaagatacgagcctattcaggccactccaccgccacctccactccctagtcaatacgcacagcccagtcagcccgtgacaagtgcctcattgcatattcactccaagggtgcgcacggagaaggcaactctgtatccctcgattttcaaaattcgctggtatctaagcccgatcctccaccttcgcaaaataaaccggctaccttccgaccgcctaatcgggaggacaccgctcaggccgcattttatcctcagaagagcttccctgacaaggccccagtaaacgggaccgagcagacccagaaaacggtgacccctgcctataaccgatttacccccaagccatacacctcttctgcaagaccctttgagagaaagtttgagtccccaaagttcaaccataacttgctgccaagtgagactgcgcacaagccggacctctcctccaaaactcctacctcccccaagaccttagttaaatcacacagccttgcccagcctcccgaattcgactccggggtggaaaccttcagtatacatgctgaaaagccaaaatatcagattaacaatatatctacagtaccaaaggctattccggtaagtcccagcgctgtcgaagaggacgaggatgaggacgggcatactgtcgtggccaccgcccgtggaatttttaattcaaatggtggggtgctaagcagcattgaaaccggtgtctctattataattccccagggggcaatcccggagggcgtcgagcaggagatatacttcaaagtctgtcgagataacagtatcctgcctccactagacaaagagaagggtgagacactgctgtccccccttgtgatgtgcggccctcatggattgaagttcctaaaacctgtggagctgaggctgccccactgcgaccctaaaacctggcagaataagtgcttacctggggatccaaactatctggttggagccaactgcgtgtccgtgctgatagatcacttctag

SEQ ID NO: 296936 - DNA, 5007 bp, Artificial Sequence
  derived and/or modified sequence
atgtccgccagagctgcggccgccaagagcacagcaatggaggaaacagctatatgggaacaacatacagtgacgcttcacagggctcctggatttggatttggaattgcaatatctggtggacgagataatcctcattttcagagtggggaaacgtcaatagtgatttcagatgtgctgaaaggaggaccagctgaaggacagctacaggaaaatgaccgagttgcaatggttaacggagtttcaatggataatgttgaacatgcttttgctgttcagcaactaaggaaaagtgggaaaaatgcaaaaattacaattagaaggaagaagaaagttcaaataccagtaagtcgtcctgatcctgaaccagtatctgataatgaagaagatagttatgatgaggaaatacatgatccaagaagtggccggagtggtgtggttaacagaaggagtgagaagatttggccgagggatagaagtgcaagtagagagaggagcttgtccccgcggtcagacaggcggtcagtggcttccagccagcctgctaaacctactaaagtcacactggtgaaatcccggaaaaatgaagaatatggtcttcgattggcaagccatatatttgttaaggaaatttcacaagatagtttggcagcaagagatggcaatattcaagaaggtgatgttgtattgaagataaatggtactgtgacagaaaatatgtcattgacagatgcaaagacattgatagaaaggtctaaaggcaaattaaaaatggtagttcaaagagatgaacgggctacgctattgaatgtccctgatctttctgacagcatccactctgctaatgcctctgagagagacgacatttcagaaattcagtcactggcatcagatcattctggtcgatcacacgataggcctccccgccgcagccggtcacgatctcctgaccagcggtcagagccttctgatcattccaggcactcgccgcagcagccaagcaatggcagtctccggagtagagatgaagagagaatttctaaacctggggctgtctcaactcctgtaaagcatgctgatgatcacacacctaaaacagtggaagaagttacagttgaaagaaatgagaaacaaacaccttctcttccagaaccaaagcctgtgtatgcccaagttgggcaaccagatgtggatttacctgtcagtccatctgatggtgtcctacctaattcaactcatgaagatgggattcttcggcccagcatgaaattggtaaaattcagaaaaggagatagtgtgggtttgcggctggctggtggaaatgatgttggaatatttgtagctggcgttctagaagatagccctgcagccaaggaaggcttagaggaaggtgatcaaattctcagggtaaacaacgtagattttacaaatatcataagagaagaagccgtccttttcctgcttgacctccctaaaggagaagaagtgaccatattggctcagaagaagaaggatgtttatcgtcgcattgtagaatcagatgtaggagattctttctatattagaacccattttgaatatgaaaaggaatctccctatggacttagttttaacaaaggagaggtgttccgtgttgtggataccttgtacaatggaaaactgggctcttggcttgctattcgaattggtaaaaatcataaggaggtagaacgaggcatcatccctaataagaacagagctgagcagctagccagtgtacagtatacacttccaaaaacagcaggcggagaccgtgctgacttctggagattcagaggtcttcgcagctccaagagaaatcttcgaaaaagcagagaggatttgtccgctcagcctgttcaaacaaagtttccagcttatgaaagagtggttcttcgagaagctggatttctgaggcctgtaaccatttttggaccaatagctgatgttgccagagaaaagctggcaagagaagaaccagatatttatcaaattgcaaagagtgaaccacgagacgctggaactgaccaacgtagctctggcattattcgcctgcatacaataaagcaaatcatagatcaagacaaacatgctttattagatgtaacaccaaatgcagttgatcgtcttaactatgcccagtggtatccaattgttgtatttcttaaccctgattctaagcaaggagtaaaaacaatgagaatgaggttatgtccagaatctcggaaaagtgccaggaagttatacgagcgatctcataaacttcgtaaaaataatcaccatctttttacaactacaattaacttaaattcaatgaatgatggttggtatggtgcgctgaaagaagcaattcaacaacagcaaaaccagctggtatgggtttccgagggaaaggcggatggtgctacaagtgatgaccttgatttgcatgatgatcgtctgtcctacctgtcagctccaggtagtgaatactcaatgtatagcacggacagtagacacacttctgactatgaagacacagacacagaaggcggggcctacactgatcaagaactagatgaaactcttaatgatgaggttgggactccaccggagtctgccattacacggtcctctgagcctgtaagagaggactcctctggaatgcatcatgaaaaccaaacatatcctccttactcaccacaagcgcagccacaaccaattcatagaatagactcccctggatttaagccagcctctcaacaggtgtatagaaaggatccatatcccgaggaaatgatgaggcagaaccatgttttgaaacagccagccgttagtcacccagggcacaggccagacaaagagcctaatctgacctatgaaccccaactcccatacgtagagaaacaagccagcagagacctcgagcagcccacatacagatacgagtcctcaagctatacggaccagttttctcgaaactatgaacatcgtctgcgatacgaagatcgcgtccccatgtatgaagaacagtggtcatattatgatgacaaacagccctacccatctcggccaccttttgataatcagcactctcaagaccttgactccagacagcatcccgaagagtcctcagaacgagggtactttccacgttttgaagagccagcccctctgtcttacgacagcagaccacgttacgaacaggcacctagagcatccgccctgcggcacgaagagcagccagctcctgggtatgacacacatggtagactcagaccggaagcccagccccacccttcagcagggcccaagcctgcagagtccaagcagtattttgagcaatattcacgcagttacgagcaagtaccaccccaaggatttacctctagagcaggtcattttgagcctctccatggtgctgcagctgtccctccgctgataccttcatctcagcataagccagaagctctgccttcaaacaccaaaccactgcctccacccccaactcaaaccgaagaagaggaagatccagcaatgaagccacagtctgtactcaccagagttaagatgtttgaaaacaaaagatctgcatccttagagaccaagaaggatgtaaatgacactggcagttttaagcctccagaagtagcatctaaaccttcaggtgctcccatcattggtcccaaacccacttctcagaatcaattcagtgaacatgacaaaactctgtacaggatcccagaacctcaaaaacctcaactgaagccacctgaagatattgttcggtccaatcattatgaccctgaagaagatgaagaatattatcgaaaacagctgtcatactttgaccgaagaagttttgagaataagcctcctgcacacattgccgccagccatctctccgagcctgcaaagccagcgcattctcagaatcaatcaaatttttctagttattcttcaaagggaaagcctcctgaagctgatggtgtggatagatcatttggcgagaaacgctatgaacccatccaggccactccccctcctcctccattgccctcgcagtatgcccagccatctcagcctgtcaccagcgcgtctctccacatacattctaagggagcacatggtgaaggtaattcagtgtcattggattttcagaattccttagtgtccaaaccagacccacctccatctcagaataagccagcaactttcagaccaccaaaccgagaagatactgctcaggcagctttctatccccagaaaagttttccagataaagccccagttaatggaactgaacagactcagaaaacagtcactccagcatacaatcgattcacaccaaaaccatatacaagttctgcccgaccatttgaacgcaagtttgaaagtcctaaattcaatcacaatcttctgccaagtgaaactgcacataaacctgacttgtcttcaaaaactcccacttctccaaaaactcttgtgaaatcgcacagtttggcacagcctcctgagtttgacagtggagttgaaactttctctatccatgcagagaagcctaaatatcaaataaataatatcagcacagtgcctaaagctattcctgtgagtccttcagctgtggaagaggatgaagatgaagatggtcatactgtggtggccacagcccgaggcatatttaacagcaatgggggcgtgctgagttccatagaaactggtgttagtataattatccctcaaggagccattcccgaaggagttgagcaggaaatctatttcaaggtctgccgggacaacagcatccttccacctttagataaagagaaaggtgaaacactgctgagtcctttggtgatgtgtggtccccatggcctcaagttcctgaagcctgtggagctgcgcttaccacactgtgatcctaaaacctggcaaaacaagtgtcttcccggagatccaaattatctcgttggagcaaactgtgtttctgtccttattgaccacttttaa

SEQ ID NO: 296937 - DNA, 3114 bp, Artificial Sequence
  derived and/or modified sequence
atgaccagcccccagctggagtggaccctgcagaccctgctggagcagctgaacgaggacgagctgaagagcttcaagagcctgctgtgggccttccccctggaggacgtgctgcagaagaccccctggagcgaggtggaggaggccgacggcaagaagctggccgagatcctggtgaacaccagcagcgagaactggatcagaaacgccaccgtgaacatcctggaggagatgaacctgaccgagctgtgcaagatggccaaggccgagatgatggaggacggccaggtgcaggagatcgacaaccccgagctgggcgacgccgaggaggacagcgagctggccaagcccggcgagaaggagggctggagaaacagcatggagaagcagagcctggtgtggaagaacaccttctggcagggcgacatcgacaacttccacgacgacgtgaccctgagaaaccagagattcatccccttcctgaaccccagaacccccagaaagctgaccccctacaccgtggtgctgcacggccccgccggcgtgggcaagaccaccctggccaagaagtgcatgctggactggaccgactgcaacctgagccccaccctgagatacgccttctacctgagctgcaaggagctgagcagaatgggcccctgcagcttcgccgagctgatcagcaaggactggcccgagctgcaggacgacatccccagcatcctggcccaggcccagagaatcctgttcgtggtggacggcctggacgagctgaaggtgccccccggcgccctgatccaggacatctgcggcgactgggagaagaagaagcccgtgcccgtgctgctgggcagcctgctgaagagaaagatgctgcccagagccgccctgctggtgaccaccagacccagagccctgagagacctgcagctgctggcccagcagcccatctacgtgagagtggagggcttcctggaggaggacagaagagcctacttcctgagacacttcggcgacgaggaccaggccatgagagccttcgagctgatgagaagcaacgccgccctgttccagctgggcagcgcccccgccgtgtgctggatcgtgtgcaccaccctgaagctgcagatggagaagggcgaggaccccgtgcccacctgcctgaccagaaccggcctgttcctgagattcctgtgcagcagattcccccagggcgcccagctgagaggcgccctgagaaccctgagcctgctggccgcccagggcctgtgggcccagatgagcgtgttccacagagaggacctggagagactgggcgtgcaggagagcgacctgagactgttcctggacggcgacatcctgagacaggacagagtgagcaagggctgctacagcttcatccacctgagcttccagcagttcctgaccgccctgttctacgccctggagaaggaggagggcgaggacagagacggccacgcctgggacatcggcgacgtgcagaagctgctgagcggcgaggagagactgaagaaccccgacctgatccaggtgggccacttcctgttcggcctggccaacgagaagagagccaaggagctggaggccaccttcggctgcagaatgagccccgacatcaagcaggagctgctgcagtgcaaggcccacctgcacgccaacaagcccctgagcgtgaccgacctgaaggaggtgctgggctgcctgtacgagagccaggaggaggagctggccaaggtggtggtggcccccttcaaggagatcagcatccacctgaccaacaccagcgaggtgatgcactgcagcttcagcctgaagcactgccaggacctgcagaagctgagcctgcaggtggccaagggcgtgttcctggagaactacatggacttcgagctggacatcgagttcgagagatgcacctacctgaccatccccaactgggccagacaggacctgagaagcctgagactgtggaccgacttctgcagcctgttcagcagcaacagcaacctgaagttcctggaggtgaagcagagcttcctgagcgacagcagcgtgagaatcctgtgcgaccacgtgaccagaagcacctgccacctgcagaaggtggagatcaagaacgtgacccccgacaccgcctacagagacttctgcctggccttcatcggcaagaagaccctgacccacctgaccctggccggccacatcgagtgggagagaaccatgatgctgatgctgtgcgacctgctgagaaaccacaagtgcaacctgcagtacctgagactgggcggccactgcgccacccccgagcagtgggccgagttcttctacgtgctgaaggccaaccagagcctgaagcacctgagactgagcgccaacgtgctgctggacgagggcgccatgctgctgtacaagaccatgaccagacccaagcacttcctgcagatgctgagcctggagaactgcagactgaccgaggccagctgcaaggacctggccgccgtgctggtggtgagcaagaagctgacccacctgtgcctggccaagaaccccatcggcgacaccggcgtgaagttcctgtgcgagggcctgagctaccccgactgcaagctgcagaccctggtgctgcagcagtgcagcatcaccaagctgggctgcagatacctgagcgaggccctgcaggaggcctgcagcctgaccaacctggacctgagcatcaaccagatcgccagaggcctgtggatcctgtgccaggccctggagaaccccaactgcaacctgaagcacctgagactgtggagctgcagcctgatgcccttctactgccagcacctgggcagcgccctgctgagcaaccagaagctggagaccctggacctgggccagaaccacctgtggaagagcggcatcatcaagctgttcggcgtgctgagacagagaaccggcagcctgaagatcctgagactgaagacctacgagaccaacctggagatcaagaagctgctggaggaggtgaaggagaagaaccccaagctgaccatcgactgcaacgccagcggcgccaccgcccccccctgctgcgacttcttctgctag

SEQ ID NO: 296938 - DNA, 3114 bp, Artificial Sequence
  derived and/or modified sequence
atgacatcgcctcagctcgagtggactctgcaaacccttctcgaacagctgaacgaggatgaacttaaatctttcaaaagtctgctgtgggcattccccctcgaggatgttctgcagaagactccctggagcgaagtggaagaggcagatggcaaaaagctggcagaaattctcgtgaacacatcaagcgagaattggatccgcaatgctacagtgaacatcctagaagaaatgaacctgacagagttgtgtaagatggctaaggccgaaatgatggaagacggccaagtgcaggagatcgacaacccagagcttggcgacgcagaggaagatagcgagttggctaagcccggagagaaggaaggttggcggaactcgatggaaaagcaatctctggtgtggaagaatacattttggcagggggatattgataattttcatgacgatgtgactctgcggaaccagagatttattcccttcctcaatccgcgtacccctcggaagttgacaccctacaccgtggtactccacggccccgctggtgttggcaaaacaaccctggcaaagaagtgtatgctggattggacagattgcaatctaagccctactctgagatacgcgttctatctgtcctgcaaagagctgtcccgcatggggccctgctccttcgcagaactgataagtaaagactggcccgaactccaggacgacattcctagcattcttgcccaagcccagcggatcttatttgtcgtggatggcttggatgagttgaaggtcccccctggcgccctcatccaggacatatgcggtgattgggaaaaaaaaaagccagtcccagtgctactcggttccttactgaagcgaaagatgctacccagagccgccctgttggtcacaacacgccctagagccctgagggacctccaattgttggcacagcaacccatctacgtgcgcgtggaggggtttctggaagaggatcggcgggcctatttcttgcgccactttggcgatgaagaccaagccatgcgtgcatttgaattgatgagaagcaatgctgcattgtttcagctgggctctgccccggcagtgtgttggatcgtatgcacaacgctcaaacttcagatggaaaaaggggaggaccccgtcccaacatgcctgacgcgaacaggactctttcttcgattcttgtgtagccgctttccccaaggtgcccaacttcgcggggccctacgcacactgagtctgctggctgcgcagggcctttgggcacaaatgtcagtgttccacagggaagatctggagcgcctgggagtgcaggagtcagatctgcgactgttcctcgacggggatatcctgaggcaagacagagtctctaaaggctgctacagctttatacatctgagctttcaacagtttctgacagcgttattctacgccttggaaaaggaagaaggggaggatagagatgggcatgcttgggatattggcgatgtccaaaaattgttatcaggcgaggaacggctgaagaatcccgacttgatccaagttggccacttcctgttcggcctcgcaaacgaaaagagggccaaggaactggaggctacctttggctgtcgaatgagccccgacatcaaacaggagcttctccagtgtaaagcccacctgcatgccaataaaccactttccgtcacggatttgaaagaagtgcttggttgtctgtacgaatctcaggaggaagaattagccaaagtggtcgtggctcctttcaaagaaatttcaatccacctcaccaatacctccgaggtaatgcactgttcgtttagcctcaaacattgccaggacctgcaaaagctgtccttacaggttgccaagggcgtattcttggaaaactacatggacttcgaactcgacattgagttcgaacgttgtacttatttaaccatccccaattgggcaagacaggacctccgatcactacggctctggacagacttctgcagcctgttctcttccaattccaatctgaagttcttggaagtgaagcagtcattcttgagtgactccagtgtgcggattctgtgcgatcacgtaactcggtctacttgtcacttgcagaaagtggaaattaagaatgttaccccagacaccgcctatagggatttctgcctcgccttcatcggcaaaaaaaccctcacccatttgacattggctgggcatatcgagtgggagcgtactatgatgcttatgctgtgtgatttattgcgaaatcacaagtgcaaccttcagtatttacggctgggggggcactgtgcaacaccagaacaatgggccgagttcttttatgtactcaaagccaaccagtctctcaaacatctgcgcctctcagccaacgttttgcttgatgagggcgccatgctgttgtacaagaccatgacccgtccgaaacatttccttcagatgctctccctggaaaactgccggctgaccgaggcttcgtgtaaggatctcgctgcagtgctggttgtcagtaaaaaattgacacatttatgcctggcaaaaaacccaatcggagacaccggagtaaagttcctgtgcgagggactgtcttatcctgactgcaagctgcaaacactggtgttgcaacaatgttctattaccaaattagggtgcagatatctcagcgaagccctccaggaggcgtgctctctgaccaatctggatctcagcattaaccaaattgccagagggttgtggatcttgtgccaggcccttgaaaaccctaactgcaacctgaagcacctccgtttgtggtcttgtagcctcatgcctttttactgtcagcacttgggaagtgccctcctgtcgaaccagaagctcgagacactggatctaggccagaatcacctttggaaatctggtattatcaaactgtttggggtgctgagacagcgtacaggctcactgaagattctccggctcaaaacatatgaaaccaatctggagattaaaaaactgctagaggaagttaaggaaaagaaccctaagctgaccattgattgtaatgcaagcggagcgacagcaccaccttgctgtgattttttttgctag

SEQ ID NO: 296939 - DNA, 3114 bp, Artificial Sequence
  derived and/or modified sequence
atgaccagccctcaactggaatggactctacagacactgctagaacagttaaatgaagacgaactgaagagctttaaaagcttactgtgggcatttcccctggaggacgtgttgcagaagactccctggtcggaggtcgaagaggcagacggcaagaaactggccgagatcttagtgaacacctcctccgaaaactggattaggaatgctacggtaaatatcttagaagagatgaacctcaccgaactttgtaagatggcaaaggcagaaatgatggaggatgggcaagtccaggaaattgacaaccccgaactaggtgatgctgaggaagactcagagctggctaagcccggagagaaggagggatggcggaacagtatggagaagcaatccttggtgtggaagaacacgttctggcaaggagacattgataacttccacgacgatgtaaccctgagaaatcagaggtttattccatttctgaatcccaggacacctagaaaattgacgccctatacagtagtcctccacgggcccgcaggtgtgggaaagacaactctggcgaaaaaatgtatgctcgattggacggattgcaacctgtctccaaccctgcggtacgctttttatctcagctgtaaagaattgagcaggatgggcccttgctcattcgcggagctgatttccaaagattggccggagttgcaagatgatattcctagcatcttggctcaggcgcagcggatattattcgtggtggacggtcttgatgaactgaaagttccaccaggagctttgattcaggacatttgcggcgactgggaaaaaaagaaacctgttcccgtcctcctggggtccctgctgaagcggaaaatgttgccacgggcagcactcttggtgacaacccgccctcgcgccctacgcgacctccagctcctagctcagcagcccatttatgtgcgcgtcgagggctttctggaggaggatcgcagagcttatttcctccgtcattttggagatgaggatcaagctatgagggccttcgagctgatgaggtcgaacgcagcgctgttccaacttggctctgcccccgccgtgtgctggattgtgtgtacgacacttaaactacaaatggagaagggggaagaccctgtgcctacatgtcttaccagaactggcctgtttctcagattcctgtgtagcaggttcccccagggagcacaactgcggggagcactgcggacgttgagtttgctggctgctcagggtctctgggctcagatgtcagtgttccatcgagaagacctggagcgtttgggcgtccaggaaagcgatttacgactatttctggatggcgatattctgcgtcaggatcgcgtgtctaaggggtgctacagttttatacacctgtctttccaacagtttctgactgctttgttttatgccctggaaaaagaggagggagaggatcgtgacggccatgcctgggacatcggggacgtccaaaagctgctctcaggcgaagagcgcctgaagaatcctgatctcatccaggtgggtcactttcttttcgggctcgcaaatgagaaacgcgccaaagagttggaggctacgtttgggtgtcgtatgtctcctgatattaagcaggaacttctacaatgtaaggcacacttacacgcaaacaagcccctcagcgtgaccgacctgaaagaagtgctgggctgcctgtatgaatcacaggaggaggaactcgcgaaagtcgttgttgcccctttcaaagagatatccatacacttaactaatactagcgaagtgatgcactgcagttttagtctaaagcactgccaagatctacagaagttatccctacaggtggcaaagggcgtctttttagaaaactatatggattttgagctagatatcgaattcgagagatgcacctacttgaccatacccaattgggcgaggcaggatctgaggtcattgaggctctggacagatttttgctctctgtttagctccaatagcaatctgaagtttctggaggtcaagcagtccttcctctccgactcctcggtaagaattctctgcgatcacgtcacccggtcaacatgccatctccagaaagtcgaaatcaaaaacgttacccctgatactgcctaccgagacttttgcctcgcttttatcggaaagaagacgttgacccaccttaccctggccgggcatattgagtgggaacggacaatgatgctgatgctatgtgacctcctgcgcaatcacaagtgcaacctacagtatctgaggctgggaggtcactgcgctacgcccgagcagtgggcagagttcttctacgtgcttaaggcaaaccagtcactgaagcacctgagattgtccgctaatgtgttgctggacgagggggccatgttgctctacaaaacgatgactagacctaagcacttcctccagatgctgtctctggaaaactgccgacttacagaagccagctgtaaggacctggcggctgtgttagttgtgagcaagaagttgacccacctgtgtctggctaagaatcccatcggggacaccggcgtgaagtttctatgcgaagggctgtcctaccctgactgtaagctgcagacactcgtgctgcagcagtgttccatcaccaagctaggctgtcgttatctcagtgaggcgttgcaagaggcttgtagcctaacaaatttggatttgagcatcaaccagatcgctagaggtctgtggatcctgtgtcaagcactggaaaatcccaactgtaacctgaagcaccttagattgtggagctgcagcctgatgccattttactgtcagcatctgggcagcgctcttctctcgaatcagaaattggagaccctcgatctgggtcagaatcacctctggaagagcggcattatcaagttatttggggtgctgaggcagcggactggcagcttgaagatcttgcggctgaagacctacgagacaaatctggagattaaaaaactgctcgaagaagttaaagaaaaaaacccaaaactcactatagattgcaacgctagcggcgccactgccccaccctgctgtgatttcttctgctag

SEQ ID NO: 296940 - DNA, 3114 bp, Artificial Sequence
  derived and/or modified sequence
atgaccagcccacaattggaatggacgctgcaaaccctacttgaacaactcaacgaggacgagctcaagtcatttaagtctttgctttgggctttcccgctggaagacgtgctacagaagactccttggagtgaggtcgaggaagctgatggcaaaaagctcgccgaaatactagtcaataccagcagtgaaaactggattcgtaatgccacggtcaacatattggaggagatgaacctgacagagttgtgcaaaatggcaaaagcggaaatgatggaggatggtcaggtgcaggagattgacaaccctgagcttggcgacgctgaagaggattcggaactggctaagcccggcgaaaaggagggctggagaaattctatggagaaacagtctctagtgtggaagaacaccttttggcaaggcgacatcgacaacttccatgatgatgtgacactcaggaatcagagatttatcccattcctcaatccacgaacgccgagaaagcttactccgtatactgtggtcttgcacggcccagctggcgtggggaaaactaccctggcaaaaaagtgtatgctcgactggacagattgtaacctatcccccactctccgctatgccttctacctgagctgcaaagaactcagccgaatgggtccgtgttctttcgcggagttaatcagcaaagattggcctgaattgcaagacgatatcccatccattcttgcccaggcacagcggatcttattcgtggtagatgggttggacgaactgaaagtgcctcccggtgcgttgatccaggacatttgcggagactgggagaagaaaaaaccagtcccagtgctactgggcagcctcctgaaacggaagatgctgccccgcgccgcccttctggtgacaacacggcccagggcccttagagatctgcagctgttggctcaacagcccatctatgttcgggtagagggctttcttgaggaggaccgcagggcatactttctgagacattttggtgacgaagaccaagccatgcgagccttcgaactaatgcggtcaaacgcagctctgttccaactgggttccgcacccgctgtgtgctggattgtgtgcaccaccctgaaacttcagatggaaaagggcgaagacccagtacctacttgtcttactagaacgggactctttttgcgtttcctctgtagcagattcccccagggtgcccagttacgcggcgccctcagaaccctgagtcttttggccgcccaaggcctgtgggctcagatgtccgtctttcatcgcgaggaccttgaacggcttggagtacaggaatctgacctccgcttgtttctggacggagacattcttagacaagaccgggtttcaaagggttgttactccttcatacatctgagcttccagcagtttctgaccgccttgttctacgctcttgaaaaagaggagggagaggatcgggacgggcatgcatgggatatcggggatgtgcaaaagctcctctcaggggaggagagactgaaaaacccagacctgatacaggtgggtcattttctgtttggcctggcaaatgaaaagcgggctaaggagctggaagccacatttggctgcaggatgtcacccgatatcaagcaggagctgttacagtgcaaggcgcacctgcacgccaacaagcctctctcagtgaccgacctcaaggaagtgctaggctgcctgtatgagtcacaggaggaagaactggctaaggtggtggtcgcgcctttcaaggagatctccatccatcttactaatacaagtgaagtgatgcactgctccttctcacttaaacactgccaggacctgcagaagctcagtttgcaggtcgccaagggtgtgttcctcgagaattatatggacttcgagctggacattgagttcgaacgctgtacctatttaactatccccaattgggctcgccaggacctcaggtctctgcggctatggacggacttttgctctctgttctcttccaactctaatctgaaattcctcgaggtaaagcagagctttctgagcgattcaagcgtcaggatattgtgtgaccacgtgacacgcagcacttgccacctacagaaggttgagatcaagaacgttactccagacacagcgtatcgagacttctgtctggcgtttatcggcaagaaaacacttacccatctgaccctggccggacacatcgaatgggaaagaacaatgatgctcatgctgtgcgacctactgcgcaaccacaaatgtaatctccagtatctgagactgggcgggcattgcgcaactcctgagcagtgggcggagtttttttatgtcctgaaggccaaccagtcactaaaacatctgcgcttgagcgccaacgtgttgcttgacgagggggcaatgctgctgtacaaaacaatgacaagacccaagcatttcttgcaaatgttgagtctcgagaattgcaggcttaccgaggcctcgtgcaaagacctggctgcggtgctagtagtgtccaagaagctgactcacctgtgtctggcaaaaaatcctataggggacacaggggttaaatttttgtgcgaggggcttagttatcctgactgcaaactgcagaccctggtcctccaacaatgtagcattactaaactgggttgccgatacctttccgaggcacttcaggaagcatgctctctgaccaacttggacctatcaatcaatcagatcgcgcgaggcctctggatcctatgtcaggccctggagaatcccaattgtaacctgaagcacctgcgcctatggagctgctcactcatgcccttctactgtcagcatctcggcagcgcactgctttcaaaccagaagctggagacacttgatttaggccagaaccacctctggaaatccggtattatcaaactgttcggagtcctaaggcagcgcaccggtagtcttaagattctccggctaaaaacctacgagactaatctagaaattaaaaagctgctggaggaagtgaaggagaaaaatcctaaactaactatcgattgcaatgcaagcggggccaccgcacctccctgttgtgactttttttgctag

SEQ ID NO: 296941 - DNA, 3114 bp, Artificial Sequence
  derived and/or modified sequence
atgacctccccccagctcgaatggaccctgcaaacgctgctcgaacagctaaatgaggacgagctcaagagcttcaagagtctgctttgggcattccccctcgaggatgtcttgcagaagactccgtggtccgaggtggaagaggcagacggcaagaagctggcagagattctggtgaacactagtagcgagaactggattaggaacgctactgtaaatatccttgaggaaatgaacttgactgagttatgtaaaatggctaaagccgagatgatggaggatggacaggtccaggaaattgataaccctgagttaggagatgcagaagaggattccgagttggctaaaccaggggaaaaggaaggctggcgaaactcaatggagaagcagagtctggtatggaaaaatacattctggcagggcgacatagataactttcacgatgacgttacactgcgaaatcagcgatttatacctttccttaatcctaggaccccccggaagctaaccccttacactgtcgtccttcacgggccggccggggtcgggaagaccacactggctaagaagtgcatgctcgattggacagactgtaatctctctcctacactgcggtatgctttttatttgtcctgcaaagaactgtctcgtatgggcccttgtagctttgccgagctgatatcgaaggactggccagagctgcaagacgatatcccaagcattctagcacaggcgcaacgaatcctgttcgtcgtggatggcctcgatgagctcaaagtgccccccggtgccctaatccaggacatctgtggagactgggagaagaagaaacccgtgccggtgttactcgggtccctcttaaaaaggaagatgctcccccgcgcggccttactggtgaccacaaggccccgcgcattaagagacttgcagttgctggcccaacaacctatttacgtacgcgttgaaggatttctggaggaggatcggcgtgcttatttcctaagacacttcggagatgaggatcaagctatgcgcgcgttcgagctgatgcgctctaatgctgccctgttccagcttggatccgcaccagccgtttgttggattgtctgcactaccctgaagctccagatggagaaaggggaagatccggtgccaacatgcctgaccagaactggccttttccttagatttctgtgctctaggttccctcagggcgcccaactgcgcggcgcgctgaggactctgtctctgctcgccgctcagggactttgggcacagatgagcgttttccaccgtgaggatttggaaaggctgggcgtacaggagagcgacctcagactatttttggacggcgacatcctgcgacaggaccgagtttccaagggatgctactctttcattcatctcagctttcagcaattcctgaccgcgcttttctatgccctggaaaaggaggagggggaagatcgggacggccatgcctgggacataggcgatgtgcagaaattactctccggcgaagaacggctcaaaaacccagacctgatccaggtggggcactttcttttcggccttgctaatgaaaaaagggccaaggagctggaagccactttcggatgccgaatgagccctgatattaagcaggaactgttgcagtgcaaggcacacctacacgctaataagcccttaagtgtcactgatctaaaagaggtcctcggttgcctgtatgagagccaggaggaagaactcgcaaaggtagtggttgcacccttcaaagaaatctctatccatctgacaaacactagtgaggtgatgcactgtagctttagcctgaaacactgccaggacctccaaaagctgtcacttcaagtggcaaaaggggtcttcttagagaactatatggactttgaactggatatagagttcgagaggtgcacgtatttaactattcccaactgggctaggcaggatcttcgttctctccggctatggacagatttctgttctctgttcagctctaactccaatttgaaatttctagaggttaaacaatccttcctgagcgactctagtgtaaggattctctgtgatcacgtgacccgcagcacgtgtcatttgcagaaagtggagattaagaatgttactcctgacacagcataccgggacttctgcttggcctttatcgggaaaaaaactctgacacacttgaccctggctggacatatagagtgggagcgtacaatgatgttgatgttgtgcgatctcttacgaaaccataagtgcaatttgcagtatttgagactcggtggacactgcgccacccccgagcagtgggcagaattcttttacgtgctcaaagccaaccagtctttgaagcacctgaggcttagcgcaaatgtgttactggacgaaggggctatgcttctctataagaccatgacgagaccaaagcactttcttcaaatgctttctttggagaattgccgcctcaccgaagcctcctgtaaagatcttgccgcggtgttagtcgtgtctaagaaactcacacacctgtgcctggcaaagaacccaatcggggataccggagttaagttcctgtgtgaagggctatcataccctgattgcaaattgcaaacactggtgttacagcaatgctcgatcaccaaactcgggtgcaggtacctgtcagaagcgcttcaggaagcgtgctcactaactaaccttgacctgtcaatcaatcaaattgcaagaggcctctggatcctatgccaagctctcgaaaaccccaactgcaatctgaagcacttaaggttgtggagttgctcattgatgcctttctactgccaacatttgggaagtgctctgctgagtaatcagaagcttgagacacttgatttaggccagaatcacctgtggaaaagtggaattattaagctctttggtgtgttaaggcagagaaccggttcattgaaaattcttaggctgaagacctacgaaaccaacctcgaaataaagaaactcttagaagaggtgaaagagaagaatccaaagttgacaattgactgtaatgcttccggcgccactgccccaccttgctgtgacttcttttgttag

SEQ ID NO: 296942 - DNA, 3114 bp, Artificial Sequence
  derived and/or modified sequence
atgacttctcctcagcttgagtggacgctgcagactttactggagcagctcaacgaagacgaactgaagtcattcaaaagcctgctgtgggcattcccactcgaagacgtgctccaaaagaccccctggtccgaagtcgaggaggccgacggtaagaaactcgcagaaattctggtgaacacaagctcagaaaattggatcagaaatgcgactgttaatattctcgaggagatgaatctgacggagctctgcaagatggccaaggcggagatgatggaggatggtcaggtgcaggagatagacaatcccgaactgggggatgccgaagaggatagtgaacttgccaaacccggggaaaaagaaggatggagaaactctatggagaaacagagcctggtttggaaaaacaccttctggcagggtgacattgacaacttccatgacgatgtcacactgagaaatcagaggttcattccattcctgaaccccagaaccccccggaagctgaccccctacacagtggtcctccatggtccagctggcgtcggtaaaacaactcttgctaaaaagtgcatgcttgactggaccgattgcaacctgtcacctacactgaggtacgccttctatttgtcctgcaaagaattgagccggatgggcccgtgcagctttgcggagctcataagcaaggactggcccgagctccaggatgacatcccttccatactagctcaagcccagaggatcctgtttgtagtggacggactcgacgagctcaaagtccccccaggagccttgattcaggatatctgtggagactgggagaaaaagaaacccgtgcctgtgcttttgggctctctgctgaagcgtaagatgttaccccgagccgccttgttggtgactaccagaccacgggctcttcgagatctgcagctcctggcccaacagcccatttacgtccgcgtcgagggcttcctcgaagaggacaggagggcgtattttctgagacacttcggtgatgaggaccaagccatgagagcgttcgaactcatgaggtccaacgccgccctatttcagttagggagcgcgcccgctgtctgctggattgtctgcacgaccctgaaactgcagatggagaaaggcgaggatcctgtccctacatgtttaacaaggaccggactctttctgaggttcctctgtagcagattccctcagggcgcccagctgcggggagccctaaggaccctgtcactgttggctgcccagggtctttgggcccagatgagcgtgttccatcgcgaggatcttgagaggctgggggtgcaggagtcagacctgaggctcttcttagatggcgatatcctgagacaggatagagtgtctaaaggatgttacagttttattcacctcagctttcagcagttcctgacagctcttttctatgctctggaaaaagaagaaggggaggacagggatggccacgcctgggatattggcgacgttcaaaagcttctttccggtgaagaacgtctcaagaatcccgacttgatccaggtggggcactttctgtttggattggccaacgaaaagagagccaaggaactggaggcaacctttggctgcaggatgagtcccgatatcaagcaggaactcctgcagtgcaaagctcatttgcacgctaataagcccctctcggtgactgatctgaaagaagtattaggctgtctgtacgagtcacaggaggaggaactcgccaaggttgtggtggctccttttaaagagatcagtattcatctcacgaacaccagtgaggtcatgcactgtagtttctcattaaagcactgccaggaccttcagaaactaagtctgcaggtcgcgaaaggagtctttctggagaactatatggacttcgagttagacatcgaattcgaaaggtgcacctatctgaccatccccaactgggcacgtcaggacttgaggtcactaaggctgtggacagacttctgttctttattttcgtccaacagcaacctaaagttcctcgaggtcaagcaaagtttcctttcagacagctcagtgaggatactgtgcgaccacgtgactaggagcacatgtcacctgcagaaggtggagataaagaacgtaacccctgataccgcatacagggacttttgcctggccttcatcgggaaaaagacacttacccatctcacactggccggacacatcgagtgggagcgtacaatgatgctcatgttatgtgacttgctgcgcaatcacaagtgcaatctgcagtacttaagactcggtgggcactgtgcgactcccgagcaatgggccgaattcttctacgttctgaaagccaatcagtctctcaaacatctgaggctgagcgccaatgtactcctggatgaaggggccatgctactctacaaaactatgaccaggcccaaacatttcttacaaatgctctcactggaaaactgtcgtctgactgaggcgagttgtaaggatctggccgcggtgctcgtagtctcaaaaaaactcacccacctgtgtttggcaaagaaccccattggcgataccggagtgaaattcctgtgcgagggactgtcttatccagactgcaaactgcagactctggtgcttcagcagtgttccatcacaaaattaggctgccgatatctttcagaggccttacaagaggcctgttctctgacgaatcttgacctgtccataaatcaaatcgcccgtggactgtggatcctgtgccaggctctcgaaaatcctaattgcaatctcaagcacttacgactgtggagctgcagcctgatgcccttttattgccagcacctcggctcggccctactgtccaaccagaagttagagacactggatttaggacagaaccacctgtggaagagtggcatcatcaaactgttcggagtgctaaggcagcgcacaggaagcctaaagattttacgactcaagacatacgaaacgaatttggaaatcaaaaagctgctggaggaagtgaaggagaagaaccctaaactcaccatcgattgcaacgcatccggcgctacagctcccccctgttgcgattttttttgttag

SEQ ID NO: 296943 - DNA, 3114 bp, Artificial Sequence
  derived and/or modified sequence
atgacaagtcctcagctggagtggaccttacagactttactggagcaactcaacgaggatgagctgaaaagctttaaatcgctgctttgggcttttcccctggaggatgttttacagaagacaccttggagtgaagtggaagaggcagacggaaagaagctggctgagatcctcgtgaataccagcagcgaaaactggattcgtaacgctacggtgaacatcctggaggagatgaacttgactgaactgtgcaaaatggccaaagccgagatgatggaggatggccaagtgcaagagattgataatcctgaactcggagacgccgaggaggactccgaactggcaaagccaggcgaaaaagaaggctggagaaattctatggaaaaacagtccctggtgtggaagaatactttctggcaaggtgacatcgacaattttcatgacgatgtaacgctccgcaatcagcgcttcatccccttcctcaaccccagaacgccgcgaaaattgaccccatacaccgtagttctgcacgggcccgcgggagtcggcaaaacgacactcgccaagaaatgtatgcttgattggactgactgtaatcttagtccaacgctgcgatatgcattctatctgagctgcaaagagctgagcagaatgggtccttgctccttcgctgaattaattagcaaagactggccagaattgcaggacgacattccctccatcctggctcaggctcagcgcattctcttcgttgtggacggtcttgacgaactgaaagttccccctggggccctcattcaggatatttgcggggattgggagaagaaaaagccggtgccggtgctgctcggaagcctgctaaaacgaaagatgttgccgagggccgctcttctggtcaccacgcggcctcgtgcgcttagggacctacagctcctggcccaacagcccatttatgtgagagttgagggcttcctggaggaggatcggagggcctacttccttcggcattttggggacgaagaccaggccatgcgagcttttgagctgatgcggtcaaatgctgcactctttcagctgggtagtgcccccgccgtgtgctggattgtgtgtacgacactaaaattacagatggagaaaggcgaggatccagtgcccacatgtcttaccagaactggattgttcctgcgcttcctgtgttcccgatttccacaaggcgcccaactgcgcggggcactgcgaacgctgtctctgctggctgcccagggactctgggcgcaaatgtcagtgtttcatagggaagaccttgagcggctgggggtccaggagtctgaccttcgcctgtttctcgacggggacatcctaaggcaggaccgtgtgagcaaaggatgctacagttttatccatttgagcttccaacagtttctaactgccctgttctacgccctggagaaggaagagggggaggaccgcgatggacacgcgtgggacattggtgacgtgcagaagcttctgtcaggcgaagagcggctgaagaatccggacctcattcaggtgggtcactttctgttcggtctcgcaaacgaaaagcgcgcgaaggagctggaggcaacgttcggctgcaggatgagtcctgacatcaagcaagaattgcttcagtgcaaagctcaccttcacgccaacaaaccactctctgtgacagatctcaaggaagttctcggctgtttgtacgagtcacaagaagaagagcttgccaaagtcgtggtggcccccttcaaggagatcagcatacacttgactaatacctcagaggtcatgcactgcagtttttctctgaagcactgtcaagatttgcagaaactctccttgcaggtcgccaagggcgtgtttctagagaactacatggattttgagctagacatcgaatttgagaggtgtacttacttgactattcccaattgggcacgacaggacctgcgttcattacggctgtggaccgatttctgttccctgttttcgagcaattccaatctaaaattcctggaggttaaacaatccttcctgtctgactccagcgtgcgcattctatgtgatcatgtaacacggtccacctgtcatctgcagaaggtggagatcaaaaatgtcactcctgacacagcctaccgggatttttgtctggctttcatcggcaagaagacgctcacgcatctcacgctcgcaggtcacatcgaatgggagaggaccatgatgttaatgttgtgtgaccttctgcgtaaccacaaatgcaacctgcagtaccttagactggggggccattgcgctactcctgagcagtgggccgagttcttttacgtgttgaaggccaatcagtccctgaaacacctacgtttgagcgcaaatgtcctgttggatgagggcgctatgttgctttacaagacgatgacccggcccaaacactttcttcaaatgctgtccctggagaactgccgcttaaccgaggcaagctgcaaagatttggctgccgtgctggtcgtgtctaagaagctcacccatttatgtctcgcgaaaaatcccatcggcgatactggtgtcaagtttctctgcgagggtttgtcctacccagattgtaagctgcaaactctggttctgcagcaatgctcgatcactaagctgggttgccgctacctatccgaggcacttcaagaggcctgcagcctcaccaacttggatctgagcattaatcagatcgctagggggttatggatcctgtgtcaagcactggaaaatcccaactgcaatctaaagcatctgaggctctggagctgctcacttatgccgttctactgtcagcatctgggctctgcgctgctatctaaccagaagttagagacactagacctgggacagaatcacttgtggaagtccggcatcatcaagctcttcggcgttctgcggcagcggaccggaagtttgaagatcctacgcctaaaaacttatgagaccaacctggagattaagaaactcctcgaggaggtgaaagaaaagaaccccaagctgactatagactgcaacgcttcgggcgccacagcaccgccttgttgtgatttcttctgctag

SEQ ID NO: 296944 - DNA, 3114 bp, Artificial Sequence
  derived and/or modified sequence
atgaccagcccgcagctggaatggaccctgcaaaccctattagaacagctcaatgaagacgaacttaaatcatttaagagcttactgtgggcctttccgctggaggacgtcctgcagaagaccccttggtccgaggtggaggaagccgatggcaagaaactggccgaaattttagtcaacactagttctgagaattggatacgcaatgctaccgtcaacatcctggaggagatgaatctgacagaactgtgcaagatggcaaaggcagagatgatggaggacgggcaagtccaggaaatagacaacccagagctcggcgatgcagaagaagattccgagctggcaaagcccggagaaaaggaaggatggcgcaactccatggaaaagcagtcactggtgtggaaaaacactttctggcaaggcgacatcgacaactttcacgatgatgtgactttgcgtaaccagcggttcattccctttctgaacccaagaacgccccggaaactcacaccttacacagtggttctgcatggccctgcaggggttggtaagacaacgcttgcgaaaaaatgcatgcttgattggaccgattgcaacctcagccccaccctcaggtacgccttctacctgtcttgcaaggagctcagtagaatgggtccgtgttctttcgccgagttaatatctaaggattggccagagctacaggatgacatacccagtatcctggcccaggcccaaagaatcctgttcgtggttgacggcctcgacgagttgaaggtccccccgggcgcactgatccaggatatatgcggcgactgggaaaagaagaaacccgtccctgtgttacttggtagccttttgaaaaggaagatgcttccacgtgcagccttactagtgacaaccaggccgcgggcattacgcgacttacagctgctcgcccagcaaccaatctacgttagggtggaaggctttctagaagaggatagacgcgcttactttctgagacactttggagatgaggaccaggccatgagggcctttgaactgatgagaagcaatgctgctcttttccagctgggatccgcacctgctgtttgttggatcgtttgtactacactgaagctgcagatggaaaagggcgaggaccctgtgccgacatgtctgacccgcactgggctgtttctgagattcctgtgttcccgattcccccagggagctcagctgcgcggggccctccgtaccctttccctactagcagcacagggactttgggcacagatgagcgtgtttcacagagaggacctagagaggctgggcgtgcaggaatccgacctgagattattcctcgatggcgatattctgaggcaggaccgcgtctccaagggctgctatagcttcatccatctgtcattccagcagtttttgacagccctcttttacgcactcgagaaggaggagggagaagaccgggacggacatgcttgggacatcggcgatgtgcagaaattattgagtggagaagagaggttgaagaatccggacctgattcaggtcggacactttttgtttggacttgccaatgaaaaacgcgccaaagaattggaggctacatttggttgtcgaatgtcaccagatattaaacaggaactcctgcaatgcaaggctcacttacatgccaacaagcccctgagcgtaaccgacttaaaggaagtgctgggttgcctctacgaatctcaggaggaagaactggcaaaggtagttgtcgccccttttaaagaaatctccatccacctcaccaataccagcgaggtgatgcactgctccttctccctgaagcactgtcaggacctgcagaagctcagccttcaggtggctaagggcgttttcctggagaattacatggacttcgagctcgacatcgaattcgaaagatgtacctatctgaccatccccaattgggcgaggcaagatctccgatctctccggctgtggacagacttttgttcactgttctcatccaatagcaatctcaaatttctggaggtgaaacagtcttttctcagtgactcatctgtgaggatcttgtgtgatcatgttacacgcagtacctgccacttgcaaaaggtggaaattaaaaatgtgacacccgacaccgcctatcgtgacttttgtctcgccttcattggtaaaaagactcttactcacctaaccctcgctggacatattgaatgggagcggacaatgatgctcatgctctgcgacttactacgtaaccataaatgtaatctgcagtatctgcggctgggcggtcattgcgctacccccgaacaatgggcagagttcttttatgtcttaaaggccaaccagtctctgaaacatttgaggctctcggctaacgtgctcctggacgagggcgccatgctgctgtataagacaatgacccgccctaaacatttcctccagatgttgtcactggaaaattgtcggcttaccgaggcatcctgcaaggacttggcagctgtcctggtcgtgtctaaaaaactcacccatctctgtctggccaaaaacccaataggagatactggcgttaagtttttgtgtgagggactctcttatcctgactgtaagctacagaccctggtgctgcagcagtgcagtattacaaagctcggatgtagatacctgtctgaggcactccaggaggcctgctccctgactaatctagaccttagcattaatcagatagctcggggcttgtggattctgtgtcaagccttagagaacccaaactgcaacctgaaacatctgagactgtggtcttgctcattgatgcctttttactgtcagcacttaggctctgcactgctaagcaaccagaagctagaaactcttgatctaggacagaaccacctgtggaaatccggaattataaaattattcggtgttctgagacagcgaactggaagcctgaaaattctccgcttaaagacttacgagaccaacctagaaatcaagaagttgcttgaggaggtcaaggaaaagaacccaaagttaactatcgactgcaacgcgtctggtgcgaccgctcctccgtgctgtgactttttctgttag

SEQ ID NO: 296945 - DNA, 3114 bp, Artificial Sequence
  derived and/or modified sequence
atgacctcaccccagttggagtggaccctccagaccctgctagagcaattgaacgaagacgagctaaagtcatttaagtctctgctgtgggcgttccctctggaagatgttctccagaaaacaccttggtcggaggtcgaggaagccgatggaaagaaactggccgagatactggtgaacaccagctcagagaattggattaggaatgcaacagtcaatattctcgaggagatgaacctgactgagctctgcaaaatggccaaggccgaaatgatggaagatggccaggtgcaggagatagacaatccagaactgggcgacgccgaagaggactccgagctggcaaagcctggcgaaaaagagggctggagaaatagtatggagaaacagagtctcgtctggaagaacacattctggcaaggcgacatcgacaacttccatgacgatgtaacattaagaaaccagagatttatacccttcctgaaccctagaacaccgcgcaagctgaccccctatacagttgtactgcacggacccgcaggcgtggggaaaaccacactcgccaagaagtgcatgctggattggacagactgcaatctgagtccaacgctcagatatgctttctatttaagctgtaaagagctctcaaggatgggaccttgtagctttgctgagctgatctccaaggactggccggaacttcaggacgatattccaagcattctggcgcaggcccaacgtatcctgtttgtcgtggatggtctggatgaacttaaggtgcctccgggtgcacttatccaggacatctgcggagattgggagaaaaaaaaaccggtccccgttctgctgggtagcctgcttaagaggaagatgctccccagggccgccttgctcgtgactacacgccctcgagctctaagggacttgcaactcttagcgcagcagccaatttatgtgcgtgtggaaggtttcctggaagaagatagacgggcgtattttttaaggcacttcggcgacgaggatcaggcgatgagggccttcgagctcatgcggtccaacgctgccctcttccaactaggaagcgcaccagcggtgtgctggatcgtgtgcaccactctgaagcttcaaatggagaagggggaggaccctgttccgacttgtctcacccgcacgggtctgtttcttcgattcctctgctccaggttccctcagggggctcagctccgcggagcattaaggaccctgtctctactggccgctcagggcctatgggcccagatgagcgttttccaccgggaggacttagaacggttgggagttcaggagagcgacctcaggctgttcctggatggggacatactgcggcaagatcgggttagcaaaggatgctattcgtttatacacctgagcttccagcagtttctgacggcactgttttacgcactggagaaggaagagggggaggatcgcgacgggcacgcctgggacattggggatgtccagaaactcctttcaggagaggaaaggctaaaaaaccccgacttgatccaggtggggcacttcctgttcggactcgctaacgaaaagagagctaaggagctggaggccaccttcggatgccgtatgagccccgatatcaaacaggagctgcttcagtgtaaagcgcacctccacgccaataaaccattatctgttacagaccttaaagaggtccttggttgcctgtacgaatcccaggaggaggagctcgcaaaagtggtagtggcccctttcaaagagatctcgattcatttgactaatacatccgaggttatgcactgctccttcagcctcaaacattgccaagatctccagaaactgtcgctccaggtggcaaagggcgtattcctggagaattatatggatttcgaactggacattgagtttgaacgctgtacgtacctcacaattcccaactgggccagacaagacctgagaagcctgcggctctggactgacttttgcagcctattttccagcaattcgaatttgaagtttttggaggtaaagcaatcctttctaagcgattcctccgttagaattctgtgtgatcacgtgacccgcagtacctgccacctgcagaaagtggagattaaaaacgttacccccgacaccgcataccgggatttctgcctcgccttcattggcaagaagaccctaacccatctgaccctcgcaggacacatcgagtgggagcgcactatgatgctgatgttgtgtgatctcctgagaaaccacaagtgcaacttgcagtacctgcgcctcggaggccattgcgcaacgcccgaacaatgggctgaatttttctatgtactgaaggccaaccagagcttgaaacacctcaggctctccgccaacgtgctcctggatgaaggcgccatgttactctacaagactatgacacgcccaaagcacttcctgcagatgctctcccttgaaaactgccgactgaccgaagcctcgtgtaaggacctggccgcagtgctggtcgtgtccaagaaactcacacatctgtgcctagcgaaaaaccctataggagacactggcgtgaagttcctgtgtgaagggctttcctatcctgactgtaagttgcagaccctggttctgcagcaatgcagtatcactaagctagggtgtcgttacctcagtgaagcactccaggaggcttgcagtctcactaatctcgatctatccattaatcagatcgcaagaggcctgtggatcctctgccaggcattggagaaccctaactgcaacttaaagcaccttcggctgtggtcatgtagcctaatgcctttctattgccaacatctgggttctgccctgctgtccaaccagaaacttgagaccctcgacctgggccaaaatcacctgtggaagtctggtattataaagctattcggcgtactaagacaaaggaccggctcacttaagatactgcggctaaagacctacgagaccaatttggagatcaaaaaactcctcgaggaggtcaaagagaagaaccccaagcttacaattgattgcaatgcctcaggtgcaactgcacctccttgttgcgacttcttttgctag

SEQ ID NO: 296946 - DNA, 3114 bp, Artificial Sequence
  derived and/or modified sequence
atgaccagcccccagctggagtggaccctgcagaccctgctggagcagctgaatgaagatgagctgaagagcttcaagagcctgctgtgggccttccccctggaggatgtgctgcagaagaccccctggagcgaggtggaggaggctgatggcaagaagctggccgagatcctggtgaacaccagcagcgagaactggatcagaaatgccaccgtgaacatcctggaggagatgaacctgacagagctgtgcaagatggccaaggccgagatgatggaggatggccaggtgcaggagattgacaaccctgagctgggagatgctgaggaggacagcgagctggccaagccaggagagaaggagggctggaggaacagcatggagaagcagagcctggtgtggaagaacaccttctggcagggcgacatcgacaacttccatgatgatgtgaccctgaggaaccagcgcttcatccccttcctgaaccccaggacccccaggaagctgaccccctacacagtggtgctgcacggccctgctggggtgggcaagaccaccctggccaagaagtgcatgctggactggacagactgcaacctgagccccaccctgcgctatgccttctacctgagctgcaaggagctgagcaggatgggcccctgcagctttgctgagctgatcagcaaggactggccagagctgcaggatgacatccccagcatcctggcccaggcccagaggatcctgtttgtggtggatggcctggatgagctgaaggtgcccccaggggccctgatccaggacatctgtggggactgggagaagaagaagcctgtgcctgtgctgctgggcagcctgctgaagaggaagatgctgcccagggctgccctgctggtgaccacccggccccgggccctgcgggacctgcagctgctggcccagcagcccatctacgtgcgggtggagggcttcctggaggaggacagaagagcctacttcctgcggcactttggagatgaggaccaggccatgagggcctttgagctgatgaggagcaatgctgccctcttccagctgggcagcgccccagctgtgtgctggatcgtgtgcaccaccctgaagctgcagatggagaagggagaagatcctgtgcccacctgcctgaccaggacaggcctcttcctgcgcttcctgtgcagccgcttcccccagggcgcccagctgcggggggccctgcggaccctgagcctgctggccgcccagggcctgtgggcccagatgtctgtgttccaccgggaggacctggagcggctgggcgtgcaggagagtgacctgcggctcttcctggatggagacatcctgcggcaggacagagtgtccaagggctgctacagcttcatccacctgtccttccagcagttcctgacagccctcttctacgccctggagaaggaggagggggaggacagagatggccacgcctgggacattggagatgtgcagaagctgctgtctggagaggagcggctgaagaacccagacctgatccaggtgggccacttcctgtttggcctggccaatgagaagagggccaaggagctggaggccaccttcggctgcaggatgagcccagacatcaagcaggagctgctgcagtgcaaggcccacctgcacgccaacaagcccctgtctgtgacagacctgaaggaggtgctgggctgcctgtatgagagccaggaggaggagctggccaaggtggtggtggcccccttcaaggagatcagcatccacctgaccaacaccagcgaggtgatgcactgcagcttcagcctgaagcactgccaggacctgcagaagctgagcctgcaggtggccaagggcgtcttcctggagaactacatggactttgagctggacatcgagtttgagcgctgcacctacctgaccatccccaactgggcccggcaggacctgcggagcctgcggctgtggacagacttctgcagcctcttcagcagcaacagcaacctgaagttcctggaggtgaagcagagcttcctgagtgacagctctgtgcgcatcctgtgtgaccacgtgaccaggagcacctgccacctgcagaaggtggagatcaagaatgtgaccccagacacagcctacagagacttctgcctggccttcatcggcaagaagaccctgacccacctgaccctggccggccacatcgagtgggagaggaccatgatgctgatgctgtgtgacctgctgaggaaccacaagtgcaacctgcagtacctgcggctgggcggccactgtgccaccccagagcagtgggccgagttcttctacgtgctgaaggccaaccagagcctgaagcacctgcggctgagcgccaacgtgctgctggatgaaggagccatgctgctgtacaagaccatgacccggcccaagcacttcctgcagatgctgagcctggagaactgccgcctgacagaggccagctgcaaggacctggccgctgtgctggtggtgtccaagaagctgacccacctgtgcctggccaagaaccccatcggggacacaggagtgaagttcctgtgtgagggcctgagctacccagactgcaagctgcagaccctggtgctgcagcagtgcagcatcaccaagctgggctgccgctacctgtctgaggccctgcaggaggcctgcagcctgaccaacctggacctgagcatcaaccagatcgcccggggcctgtggatcctgtgccaggccctggagaaccccaactgcaacctgaagcacctgcggctgtggagctgcagcctgatgcccttctactgccagcacctgggcagcgccctgctgagcaaccagaagctggagaccctggacctgggccagaaccacctgtggaagagcggcatcatcaagctgtttggagtgctgcggcagaggacaggcagcctgaagatcctgcggctgaagacctatgagaccaacctggagatcaagaagctgctggaggaggtgaaggagaagaaccccaagctgaccatcgactgcaatgccagcggggccacagccccaccctgctgtgacttcttctgctag

SEQ ID NO: 296947 - DNA, 3114 bp, Artificial Sequence
  derived and/or modified sequence
atgaccagcccccagctggagtggaccctgcagaccctgctggagcagcttaacgaagacgaactgaagagcttcaagtctctactttgggccttccctttggaagatgtgctacagaagaccccttggagtgaagttgaagaggcagacggaaaaaagttggctgagatcctagtgaatacatcttccgaaaactggatcaggaacgctactgtcaatattctggaggaaatgaatctcacagaactgtgcaagatggccaaggccgagatgatggaagacggccaggtgcaagagatcgacaaccctgaactgggggatgcggaagaggatagcgagctggccaagccaggggagaaggagggatggcgcaacagcatggaaaaacagtcactcgtttggaagaataccttctggcaaggcgatatcgataatttccatgatgacgtcactcttcgaaaccagagatttatacccttcctgaaccccagaactccacgcaaactgacgccctatacagtggtcctgcatggcccagctggagtgggcaaaaccactctggccaaaaagtgcatgcttgattggactgattgcaacttgtccccaacattgaggtacgctttttacctctcttgtaaggagctgagtcgcatggggccttgctcctttgccgagctgatctctaaagactggcctgagttgcaggacgacataccgagcatactggcccaggcccaaagaattttattcgtggttgatgggctggacgaattgaaagtccccccgggggctctcatccaagatatttgcggcgactgggagaagaagaaacccgttccagtccttctcggaagcctgttgaaacgtaaaatgttaccaagagccgccctcctagtcacgacccgccctcgggccctgcgagaccttcagttgctcgctcagcaacctatctacgtgagggtggagggcttcctcgaagaagatagacgggcttactttctgcgacactttggggatgaagaccaagcaatgagagcttttgagctcatgaggagcaatgcagcgttgtttcaactgggaagcgccccggccgtgtgctggattgtttgcaccactctcaagctgcagatggagaagggggaagacccggtgccaacgtgcctcacaaggaccggcctgtttctgaggtttttgtgtagccggttcccacagggtgcccaactgaggggggcccttcgaaccctgtcactgctcgccgcccagggactctgggcacaaatgagtgtttttcacagagaagatctggaaaggctcggcgtccaagagtcagacctgcgcctcttcctcgacggagacattctgaggcaagatagagtgagcaaaggctgctacagtttcattcatttaagcttccaacagtttctcaccgccctattttatgccctcgaaaaggaggagggtgaggaccgggatggccatgcctgggacatcggagacgtccagaagctgttatctggagaagaacgtttgaagaatcccgatctcattcaagtaggacatttcctctttggactggcaaacgaaaaacgtgctaaggaactcgaggcaacgtttggctgcagaatgtcccctgatatcaaacaagagctgctgcagtgcaaggcacatcttcacgctaataagcccctctccgtgactgacttaaaggaggtgctcgggtgcctgtacgaaagtcaggaggaggagttggccaaagttgtagtggcgccttttaaagaaatcagcattcacctgactaacactagcgaagtgatgcactgctctttttccctaaagcactgtcaagaccttcagaagttgagcctccaggtggcgaagggcgttttcctagagaattacatggatttcgagctggatattgagttcgagagatgcacttaccttacaattcctaattgggctaggcaggatttaaggtcgcttcgtctgtggacagatttctgtagcctgtttagctctaactctaatctgaaatttttggaggtgaagcagtcctttctatccgacagtagtgtgagaatcctgtgtgatcacgtgacaaggtctacgtgtcacctacagaaagttgagatcaagaacgtgactccagacaccgcctatagggatttttgtcttgcttttatcggaaagaagacattgacacatctcactctcgcaggacacattgaatgggaacgaactatgatgttgatgttatgcgatcttctgcgaaatcacaaatgtaatctccaatacctcaggctggggggtcattgcgctacacccgaacaatgggctgagtttttctatgtgctcaaggccaaccagtccctgaagcacttgcgcctaagcgctaacgttctgttggatgaaggagccatgttattgtataagaccatgaccagaccgaagcacttcttgcagatgctgtctctcgaaaactgtaggttaacagaggcatcttgcaaggatttggccgccgttttggttgtgagtaaaaagcttacccacctctgtcttgcgaagaaccccattggcgataccggcgttaagttcctgtgcgagggcctgtcctaccctgattgtaagttgcagactcttgtcctccagcagtgcagcattaccaagctggggtgccggtacctcagcgaggccctgcaggaagcatgctcgctcaccaatctggatctgagcatcaaccagattgctcgcgggctctggatcctgtgtcaggccctcgaaaaccctaactgcaaccttaaacacctaagactgtggtcatgctctctgatgcccttttattgtcagcacctggggtctgccctgctgtctaaccagaaactcgaaaccttggacctgggacagaaccacttgtggaaatccggcatcatcaaactgtttggcgttcttagacagagaacaggatcactgaaaatcttgaggctaaagacttatgagaccaatttagaaatcaagaagttactggaggaagtcaaggaaaaaaacccaaagctgactatagattgcaatgcaagcggcgccactgccccaccgtgctgtgacttcttttgttag

SEQ ID NO: 296948 - DNA, 3114 bp, Artificial Sequence
  derived and/or modified sequence
atgaccagcccccagctggagtggaccctgcagaccctgctggagcagctgaatgaagacgagctaaagagcttcaagagcctcctgtgggcatttccgctggaggatgtgctgcaaaagaccccatggagcgaggtcgaagaggccgatggaaagaaactggccgagatcttagtgaatacatcatcggagaactggatcaggaacgcgacggttaatattttagaggagatgaacctcacagagttgtgtaaaatggctaaggctgaaatgatggaggacggtcaggtgcaggaaatcgataacccagaactcggcgatgctgaggaagatagcgaactggcgaaacctggagagaaggaaggttggcgcaactccatggaaaagcaatccttggtgtggaaaaacacgttctggcagggtgatatcgacaattttcacgacgatgtcaccttgcgaaatcagagatttatcccctttctcaaccccagaacccctcggaagttaacaccatatacagtcgttctacacggtccagcaggcgtcggcaagacaacactggctaagaaatgcatgttagactggacagactgcaatcttagccccacgctgagatacgccttctacctcagttgcaaggagctcagtcgaatggggccttgctcttttgccgagctcatcagcaaggattggcccgagttgcaggacgacataccatctattctcgcacaagcacagaggattttgtttgttgtggacggcctcgacgaactcaaggttcccccgggtgccctaattcaggacatctgcggcgactgggagaaaaagaaaccagtgccggtgctcttaggaagccttttaaagcgcaagatgcttcctagggccgccctgttggtgactacaagaccaagggcccttcgagatcttcaactactagcccagcagcctatctacgtgcgagtcgaaggttttttagaggaagaccggcgggcttactttctgagacacttcggggacgaggatcaggcgatgagggccttcgagctgatgagaagcaacgccgctttgtttcagttaggtagtgctcctgcagtgtgttggattgtgtgcaccaccttaaaactgcagatggaaaagggggaggatcccgtgccaacctgcttgactaggactgggctatttttgcgcttcctgtgtagccggttccctcagggggcacagctgagaggggccctgcgcactctctcattgcttgccgcccaagggctatgggcccagatgtcagtgttccaccgcgaggacctggaacggctcggcgtgcaggagtctgatctgaggctttttctagatggcgatatcttgcgacaggaccgggtgtccaagggatgttatagcttcatccacttatcttttcagcagttccttacggccctgttttatgctttagaaaaagaagagggggaggaccgcgatggccacgcgtgggacatcggcgacgtgcagaagctcctttcaggtgaagaacggttgaagaaccccgacctcattcaggtggggcactttctctttggtctggctaacgagaagagggctaaagagcttgaggccacttttggatgccgaatgtctcctgacatcaagcaggaactgttacagtgcaaagcccacctgcacgcaaataagccgttaagcgtaaccgatcttaaggaagtgctgggttgtctttacgagagccaagaagaagaactagctaaagtcgtagtcgctccctttaaagaaattagcatacatttgaccaatacctctgaggtcatgcattgctccttttcgctgaaacattgccaggatctgcagaaactctccctgcaggtagcaaaaggggtgtttctcgagaattacatggacttcgagctcgatatcgaatttgagcggtgtacctatctgacaattccaaattgggcacgccaggacctccgatctcttcggctgtggaccgacttttgttctctcttttcttcaaactcaaacttgaagtttctcgaggtgaaacagagcttccttagcgactcatcagtccgcatattatgcgaccacgtgactcggagtacatgtcatctgcaaaaagtcgagatcaagaacgtgacaccagatactgcttatagggacttttgcctggcattcatcggaaagaagaccctgacacatctcaccctggctggccacatagagtgggagaggaccatgatgttaatgctgtgcgatctgctgcggaatcataagtgtaacctgcagtatctgcgcttagggggacactgtgctacccctgaacagtgggccgagttcttctatgtgctcaaggccaaccaatccctgaagcatctccgtttgtccgctaacgttttactcgacgaaggtgcaatgctgctatataaaacgatgaccagacctaagcactttcttcaaatgttgagtctggaaaactgtcggctcacggaggcatcctgcaaagacttggctgcggtgctagttgtgtcgaagaaattaacccatctgtgtctggccaaaaacccgataggggatacaggagttaagttcctgtgtgaaggactgagctatcccgactgtaagctgcagacgttggtgctccagcaatgtagcatcactaaacttgggtgtagatatcttagcgaagcattgcaggaggcttgttcactgaccaatcttgatctttctatcaaccagatcgctcgagggctttggatattgtgtcaagccttggagaaccctaactgtaatctgaaacatcttaggctatggtcttgctcccttatgcccttttattgccagcacctggggagcgctctcttatccaatcagaagctggagactctggacctgggccagaaccatctttggaaatctgggatcatcaagctatttggcgtgctgcgacaaagaaccggttccctgaagattctgcgtctgaaaacttacgagacaaacctagagattaaaaaacttttggaagaggtcaaggaaaaaaatcctaaactaaccattgattgcaacgcatccggcgcaactgcccctccttgttgtgacttcttttgctag

SEQ ID NO: 296949 - DNA, 3114 bp, Artificial Sequence
  derived and/or modified sequence
atgaccagcccccagctggagtggaccctgcagaccctgctggagcagctgaacgaggacgaacttaagagtttcaagagcctgctctgggccttcccactagaagacgttttgcagaaaactccctggagcgaagtggaagaagcagacggcaaaaaactggccgagattttggtgaacacaagctcagaaaattggattcgcaacgccactgtcaatatactcgaggagatgaacctgaccgaactttgcaaaatggccaaagcagaaatgatggaggacgggcaggtccaggagatcgacaaccctgaactgggggacgccgaagaggactccgagcttgccaaacctggcgagaaggaaggctggcggaactctatggagaaacagtctcttgtgtggaaaaacaccttctggcagggagatattgacaacttccatgatgacgtgaccctccgcaaccaaagatttatccccttcctgaatccccgaaccccccgcaagcttaccccttacaccgtggtcctccacggccctgccggcgtgggtaaaaccaccttggctaagaaatgcatgctcgattggactgactgcaacctctcacctacactacgctacgcattttacctgagctgcaaagagctgtctcggatgggaccatgttcattcgctgaactcatatccaaggactggccagaactgcaagacgacatccccagcatcctcgcccaggcacagaggattctgtttgtagtggacggtctggatgagctgaaggttcctcccggcgcgctcatccaggacatatgcggagactgggagaagaaaaagccggtccccgtgcttctgggtagtctgctgaagcgaaaaatgctcccaagagccgccttgctggtcacaaccaggccccgcgccctgcgggatttgcaactgctggcacagcagccaatttatgttagggtggaggggttcctggaggaagatcgtcgggcgtattttctgagacacttcggggacgaggaccaggctatgagggctttcgaactaatgcggtctaacgcggcccttttccagcttggcagtgctcctgcagtgtgttggattgtttgcactacgctgaaactgcaaatggaaaagggcgaggatccagtccccacctgcctaactcgcaccggtctgtttcttaggtttttgtgtagtcggttcccacagggagcgcaactccgaggagccctgcgtactctctcactgttagctgcgcagggcctttgggcccagatgtccgtgttccaccgggaagacctggaacggctcggcgtccaagaaagtgacctaagattgtttctggatggagatatcctccggcaagatagggtgtctaaggggtgctactccttcattcatctgtctttccagcagtttctaaccgctcttttctatgccttggagaaggaagagggggaggacagagacggccacgcatgggacattggagacgtacagaagttgctttctggggaagaaagactgaagaaccccgacttgattcaggtgggccacttcttattcggtttggcaaatgagaagagagcaaaggaattggaggcaacctttggatgcagaatgagcccagatataaaacaggagcttttacagtgtaaagcacacctgcatgccaacaaacccctgtctgtgacggacttgaaggaggtgctgggctgtctgtacgaaagccaggaggaggagctcgccaaagtggtggtggcacccttcaaggaaatcagcatccacttaactaacacttctgaggtgatgcattgttcattttccctgaagcactgtcaggacttgcagaagctgtccctgcaggttgctaaaggagttttcttggagaactatatggacttcgagttggacattgagttcgagcgttgcacctacctcacaattcccaactgggcccggcaggacctccgctcgctccgcctctggacagatttttgttctttgttcagttctaatagcaatctaaagttcctcgaggttaaacagagtttcctgtcggactcctccgtgaggattctctgcgatcacgtgacccgaagcacctgccacttgcagaaagtggaaataaaaaacgtgaccccagacacagcctacagagacttctgtctcgcattcatcggcaagaaaaccttgacccatctgactcttgccggccacattgagtgggaacgcacaatgatgcttatgctctgcgacttgctgagaaaccacaaatgtaacctccagtacctccggctgggagggcattgcgccactcctgagcagtgggctgaattcttctacgtgctgaaagctaaccaatctttgaagcacctgagactatctgctaatgtacttctggatgaaggagctatgctcctttacaaaactatgaccagaccaaaacacttcctccagatgttatcactcgagaattgtagactgacagaagcttcctgtaaggatttagctgccgtgttggtcgtttccaaaaagttaacccacctctgcctggccaagaatccaattggggacacgggagttaaatttttatgcgagggactcagttatcctgactgcaagctgcaaaccctggtcctccagcagtgctctataactaagctgggctgcagatatctgtccgaggctctgcaggaagcatgttccctgacaaatctggacctcagcattaatcagatcgccaggggcctatggatcctttgtcaagccctcgaaaacccaaactgcaaccttaagcacctccggctgtggtcttgctcactgatgccgttttactgccagcacttgggtagcgcgctgctttctaatcagaaactcgagacgttagaccttggacagaatcacctgtggaagtccggcatcatcaagctgttcggtgttctgcggcagcggaccggaagcttaaagatcttgaggctgaagacgtacgagacaaacctggagataaagaagctcctcgaagaggtgaaggagaagaatccgaaactcacaatagactgtaacgcctccggagcaaccgcccctccctgttgcgattttttctgttag

SEQ ID NO: 296950 - DNA, 3114 bp, Artificial Sequence
  derived and/or modified sequence
atgaccagcccccagctggagtggaccctgcagaccctgctggagcagctgaatgaggacgagttgaaaagctttaagtctctcttatgggcgttcccactcgaggacgttctgcagaagactccatggtcagaggtggaggaagcggatggtaagaaactggctgaaatcctcgtcaatacttcatccgagaattggatcagaaatgcgactgtgaatattctagaggaaatgaacctgaccgagctatgcaagatggcaaaggcggaaatgatggaggatggtcaggtccaggaaatagataatcctgaactgggcgacgcagaggaagacagtgaactcgcgaaacccggcgagaaggaaggctggaggaatagcatggagaaacagtccctagtgtggaaaaatactttttggcagggtgatatcgataatttccatgatgacgtgacactacggaatcaacggttcattcctttcctgaaccctaggacaccacgaaagctgacaccttacaccgtggttctccatggcccagccggggtcggcaagactactttagccaagaagtgtatgctggactggacagactgcaatctttcgcccactctgaggtatgctttttacttaagctgtaaagaattaagccggatgggaccctgttccttcgcggaattgatctcgaaggactggcccgaattgcaggacgacattccaagcatcctggcgcaggcccaaaggatactcttcgtcgttgatgggcttgacgaactgaaggttcctccaggcgccctgatccaggatatatgcggggactgggaaaaaaaaaagccagtgccagtgctgcttggcagtctcctgaagcggaagatgcttccccgggccgccttgttggttaccacaagaccgagagccctccgggatttgcaactgctggcgcagcaaccaatctacgtccgtgtcgagggatttctggaagaggaccgcagggcgtacttcctccggcactttggcgacgaagatcaagcgatgcgagcctttgagctgatgagatcaaacgcagccctgtttcagcttggtagcgctcctgccgtgtgttggatagtgtgcaccacacttaagttgcagatggagaagggcgaggatcctgtccccacatgccttacaagaacaggtctgtttctgcgcttcctatgcagtcgcttcccgcagggagcccaattacggggggcactgagaaccctgagtctgcttgcggctcagggcttatgggcccagatgtccgtgttccatcgagaagacctggaacgcctcggagtccaggaaagtgatctgagactgttcctggatggagatattcttcgccaagaccgtgtctcaaagggatgttactctttcatccatctgtcctttcaacagttcctcacggcgctgttctatgcactggaaaaagaggagggcgaggacagagacggccatgcatgggacattggcgacgtccagaagctactgtccggcgaggaacgcttaaaaaatcccgatctcatccaggtaggccactttctgttcgggctggcaaacgaaaagagagccaaggagctggaagcaacattcggctgcagaatgagtccagacatcaagcaggaactcctgcaatgcaaggcacacttacatgcgaacaagccactatctgtgaccgatctgaaagaggtgctcggctgcttgtacgaaagtcaggaggaagaattggctaaggtagtggtcgcccctttcaaggaaatctcaattcacctgacgaacacgtctgaagtgatgcactgcagcttcagtctgaagcattgccaggatctacaaaaactgagtcttcaggtagccaagggtgtttttttggagaattacatggactttgaactagatatcgagtttgagcggtgcacatatctcaccatcccgaactgggctcgccaggacttgcgtagtctgcgcctgtggaccgacttttgtagtttgttcagtagcaatagcaaccttaaatttctcgaagttaaacagtctttcctgagcgatagctccgtgaggattctctgcgaccatgtcaccaggtctacctgtcatcttcaaaaagttgaaatcaaaaacgttacacctgacaccgcttacagggacttctgcttggcgtttatagggaagaagacattgactcacctgactctcgccggacacattgagtgggaacgtacaatgatgctgatgctatgtgacctgctgcggaaccacaagtgcaacctgcagtacctacgcctcgggggccactgcgccactcctgaacagtgggcagagtttttttacgttctgaaggcaaaccagtcccttaagcacttgaggctcagtgcaaatgtgttgctggacgaaggggccatgctattgtataaaacaatgacccgaccaaagcacttcctccagatgctgtcgctcgagaattgcagacttaccgaggctagctgcaaagatctcgctgcagtgctagtcgtgtccaaaaaactgacccatctgtgcttggccaagaatccgatcggggatacaggagtcaaattcctgtgtgaaggcctttcctaccccgactgtaaacttcaaaccctggtactccaacagtgctcaatcacgaagctgggctgcagataccttagtgaagcactgcaggaggcctgcagccttacaaatctagatctctccattaaccaaatcgctcggggtctgtggattctctgccaggcgctcgagaaccctaattgtaatcttaagcacctaaggttatggagctgctccctgatgcctttttactgtcagcacctcggctctgcccttttgagcaatcagaagctggaaactctggaccttggccaaaaccatctctggaagtcaggtattatcaaactgttcggagttcttcggcaacggacgggctccctgaagatactccgcctgaaaacttacgaaacgaacctcgaaataaagaagctcctcgaagaagtgaaagaaaagaacccaaaactgactattgactgcaacgcttcgggcgctacagctccaccctgctgcgactttttttgctag

SEQ ID NO: 296951 - DNA, 3114 bp, Artificial Sequence
  derived and/or modified sequence
atgaccagcccccagctggagtggaccctgcagaccctgctggagcagctaaacgaggatgagttaaagtctttcaagtcactgttatgggcttttcctctggaggacgttttgcaaaagacaccttggagtgaagtggaagaggctgatggcaaaaaactggcagagatactcgtgaataccagcagcgagaactggatccgtaatgccacagtgaacatcctagaagagatgaacctgacagagttatgcaagatggccaaggctgaaatgatggaggatggtcaggtgcaggagatcgacaatccggagctgggagacgccgaggaggatagtgagctcgccaaacctggcgaaaaagagggatggcgcaacagcatggagaaacagtccctggtctggaagaatacattctggcagggggatatcgataattttcacgacgacgtgacactccggaaccaaagatttatcccatttctgaaccctcgtacaccacggaagctgaccccgtacaccgtggtgttacacggtcctgctggagtggggaagaccactctggctaaaaagtgcatgctggactggaccgactgcaatctctctcctactctcaggtatgcattctatctgtcctgcaaagagctttccagaatgggcccgtgttcctttgctgagctgatctcgaaagactggccagagctacaggatgatatcccctccatcctggcgcaagctcagcggatcttgttcgtggttgacgggctggatgagctgaaagttccccctggtgctcttatccaagacatatgtggcgactgggagaaaaaaaagcccgttcctgtgctcctagggagcttgctgaagcgcaaaatgctgccaagagcagctctgttagttacaactcgacccagggctctgcgggatctccagctccttgcccagcagccgatttatgtgcgcgtcgagggattcctggaggaagaccggagagcctatttcctgcgacatttcggggatgaagatcaagccatgcgggcgtttgagctcatgaggtctaatgccgcactcttccagctggggtcggcaccggctgtatgttggattgtgtgcacaactcttaaacttcaaatggagaagggagaggatccagtccccacatgccttactcgcaccggcctttttctgcgctttctatgttcccgctttccccagggagcacaactgcgaggcgccttacggacacttagtctactcgctgcccagggtctgtgggcccagatgtcagtgtttcaccgtgaggatctggagaggctgggggtgcaggaaagcgacctgcgcctgttcctggatggtgacatattgcggcaggaccgggtttctaagggatgctactccttcatccatctgagcttccagcaattccttaccgcattattttatgccctggagaaagaagaaggcgaggatcgggacggccatgcttgggacatcggagacgttcagaagctgttaagtggcgaggaacgattgaagaaccctgacctcatccaagttgggcactttttgtttggcttggccaacgagaagagggcaaaggagctggaagccacctttggctgtagaatgtctcccgatatcaagcaggaacttctgcagtgtaaggcccatctccacgctaacaagccactctccgttactgatctgaaggaggtgttggggtgtctgtacgagtctcaagaggaggaattagctaaggtggttgtggcgccattcaaggagattagcattcacttaaccaatacatctgaggttatgcactgcagctttagtctcaaacattgtcaagatctgcagaagctgagcctgcaggtcgccaaaggagtcttcctggagaactacatggattttgagcttgacattgagttcgaacggtgcacttatcttactatccccaattgggcacgccaggacctgagatctctgaggctgtggacagacttttgctcccttttcagcagcaactccaacctcaagttcctggaggttaagcagagctttctgagcgattcttcagtgcgtatcctgtgtgaccacgttaccagatccacatgccacctgcagaaagtcgagataaaaaacgtcacccctgataccgcatatcgtgacttctgccttgcttttatcgggaagaagaccctcacccatcttaccctggccggccatatcgagtgggaaaggacaatgatgttgatgttatgcgatttactcagaaaccacaagtgtaacttgcagtatcttagactcggcggacactgtgctaccccagagcagtgggctgagtttttctacgtgcttaaagcaaaccaaagtctgaaacatctaagactgagcgctaatgtactgcttgatgagggcgcgatgctgttatacaagacaatgaccaggcccaagcattttttacagatgctgtctctcgagaactgtcgtctcaccgaggcctcctgtaaagaccttgcggctgtgctcgtagttagcaagaagctgactcacttgtgcctggccaagaaccctatcggcgataccggggttaagtttctttgcgaaggcttgtcttatccggactgtaagttacagacactggtactgcagcagtgctccattacgaaacttgggtgtagatatctctcagaggctctgcaggaagcctgctccctgacaaatctggatctatccatcaaccaaatagccagagggctatggatactgtgtcaggcattagagaatcccaattgcaacttgaagcatcttaggctgtggagctgctcgctgatgcccttttactgccaacacttgggctcagctctgctctctaatcagaagctcgagaccctcgatttaggtcagaatcatctttggaaatcaggcattatcaagctgtttggggttctccgccagcggactgggagcctgaagatcctgcggctgaaaacatatgaaactaacctggagataaaaaaactcctggaagaggtcaaggagaaaaatcctaaactgaccattgattgtaacgcttctggagccaccgctcctccatgctgtgatttcttctgctag

SEQ ID NO: 296952 - DNA, 3114 bp, Artificial Sequence
  derived and/or modified sequence
atgaccagcccccagctggagtggaccctgcagaccctgctggagcagctgaacgaggacgagttaaagagcttcaagtctttattatgggcgttccccctggaggacgtgctgcagaagacaccatggagtgaagttgaggaagccgatggcaaaaagcttgctgaaatcctggttaacacttccagcgagaattggattcgcaacgctactgtcaacatcctcgaggaaatgaatctgactgagctctgcaaaatggccaaagccgagatgatggaagatggccaggtacaggagatcgataatcctgagctgggggatgctgaggaggattcagagctagctaagcccggtgaaaaagagggctggagaaacagcatggaaaagcagagcctggtttggaagaacaccttttggcaaggcgacatcgacaattttcatgatgacgttactttgagaaaccagagattcatacccttcctgaaccctagaacccccagaaagttgacaccttacacagttgtcctgcacggacctgctggcgtgggtaaaactactctcgcaaaaaagtgtatgctcgactggactgattgtaacctctcacctacactacggtacgcattctacttaagctgtaaggaactgtctagaatgggaccgtgttcctttgcagagctgatctccaaggattggccagaactccaggacgatataccctccatactcgcccaggcacagaggatcctgttcgtcgttgacggcttagatgaactcaaagtgcctcctggcgccctgattcaggacatttgcggggactgggaaaagaaaaaacctgttcccgtgctccttgggagcttactgaagcgtaagatgctgcctagggctgcattgctggttaccactcgtccacgagctctgcgggacctgcagctgctcgcacagcagcctatctacgttagggtggagggctttctcgaagaggacaggcgggcctattttcttagacacttcggcgacgaagaccaagccatgagagccttcgagctgatgcgctctaatgccgcactatttcagcttgggtcagccccagctgtgtgttggatagtgtgtaccaccctcaaacttcaaatggagaagggcgaagatcctgtgcctacatgcctcactcggacaggtctgtttctgcgtttcctctgcagcaggtttccacagggcgcgcagttacggggtgcactccgaactctgtccctgcttgcagcacaaggcctgtgggctcagatgtctgtttttcatcgcgaggacctggaaagacttggcgtccaggagtcggacctccggctcttcttggatggagatatcctgcgacaagatagggtctctaaaggctgttactcattcattcacttatcattccagcagtttctcaccgccctcttctatgcactggagaaagaggaaggcgaagacagggatggacacgcctgggatattggggatgtgcagaaattgcttagtggagaggaaagactcaaaaatccagaccttatccaggtgggccacttcctctttggtctggcaaacgaaaaacgcgcgaaggagctagaagcgacattcggttgccgcatgtccccggatattaagcaggaacttctgcagtgtaaagcccacttacatgccaataaaccccttagcgttaccgacctaaaggaagtactgggttgcttgtacgagtcccaggaggaagaattggccaaggtggtggtggccccctttaaagagatttcaatccatctgacgaatactagcgaggtgatgcactgctctttttccttgaagcattgtcaggatttgcagaaactctctctccaagtggctaagggagtgttcctcgagaactacatggactttgagttggacatagaattcgagcgctgtacctaccttaccatacccaactgggcccgccaggacctcaggtcactgagactgtggactgatttctgtagcctcttttccagcaactccaacctgaagtttttagaggtgaaacaaagctttctgagcgactccagtgtgcgtatactgtgtgaccatgttaccagatccacttgccaccttcagaaagtggaaataaagaatgtgactcctgacaccgcttaccgggatttttgtctggcctttatcgggaagaagaccctcacgcacctgactctggctggccacatcgaatgggaacgaacaatgatgcttatgctgtgcgacctgttgcgaaatcataagtgtaatctccaatacttacggcttggcggtcattgtgccacaccagagcagtgggccgagtttttctatgtgctcaaagccaatcaatcgctcaagcacctacggttgagtgctaatgtcctccttgacgagggtgccatgctcttgtataaaacaatgacccgccctaaacatttcttacagatgctgtccctcgaaaactgccggctgacagaggcatcctgcaaggatttggccgccgtgctggtggtctcaaagaaattgactcacctctgcttggcaaaaaacccaatcggtgacacgggcgtgaaattcctctgcgaaggactctcttacccagactgtaagctgcaaacgttagtcctgcagcagtgtagcataactaaactgggatgccgatacctctccgaggctctccaagaggcttgcagcctaaccaacttggacttaagcattaaccaaatagcaagggggctgtggatcttatgccaggctctcgagaaccccaattgtaacctgaaacacctgcggctgtggagctgttccctcatgccattttactgtcagcatctgggcagtgctttactaagcaaccaaaagctcgaaacactcgacctaggacaaaaccacctgtggaaatccggaataattaaacttttcggggtcctaaggcaacggacaggctctcttaaaatccttaggcttaagacatacgagacgaacctggagatcaaaaaattgttagaggaagttaaggagaaaaatccgaaactcacaatagattgtaacgccagcggagcaactgcacccccctgctgcgacttcttttgctag

SEQ ID NO: 296953 - DNA, 3114 bp, Artificial Sequence
  derived and/or modified sequence
atgaccagcccccagctggagtggaccctgcagaccctgctggagcaactgaacgaggacgagcttaaatcttttaagtcactgttgtgggcctttcccctcgaggatgtccttcagaagaccccctggtccgaagtagaagaagctgacggtaagaaactggcagagatacttgtgaataccagcagtgagaattggatccgcaatgctaccgtaaatatcttagaggaaatgaatttgaccgagttatgcaaaatggccaaggccgagatgatggaagacggacaggtgcaggagatcgataaccccgaactgggtgacgccgaagaagactcggaactggccaaacccggtgaaaaggaggggtggcgaaatagcatggaaaagcagagtcttgtttggaagaatactttctggcagggtgatattgacaacttccacgacgacgtaacactgcgcaaccagaggtttatcccttttcttaacccaagaacccctcgcaagctgacaccttacacagtcgtgctccatgggcctgccggcgtggggaagactaccctggctaaaaaatgcatgctcgactggacagattgtaatttaagtcccactcttcggtatgcgttttacctcagttgtaaggagctttcccgtatgggaccctgcagtttcgccgaactgatctccaaagattggcccgaactgcaggacgacatcccgtcaatcctggcccaggctcagcgcattctgtttgttgtggatggccttgacgaactgaaggttccacccggagccctcattcaggacatctgcggggattgggaaaaaaaaaagcccgtgcctgtgctgctaggtagtcttctgaagagaaagatgctgccacgagccgccttgctcgttactaccagacctcgcgccctgcgggatcttcagctcctcgcccaacagccaatttatgtaagagtggagggctttctggaggaggatcgcagagcttacttcctccgccattttggggatgaggaccaagccatgcgggcgttcgagttgatgaggagtaatgcagccctttttcagctaggaagtgcccctgcagtgtgctggatagtatgtacaacccttaaactacagatggaaaagggcgaagatcctgtgccaacgtgtttgacacgcacgggtctctttcttagatttctgtgctcacgctttccccagggtgctcagttgagaggcgctctcaggactctgtccctgctagctgcacaaggcctgtgggcccagatgtccgttttccaccgcgaggatttggagcggcttggtgttcaggagtcagacctgaggctgtttctcgatggtgatattcttcggcaggatcgggtgtccaaggggtgctattcatttatccacctttcttttcagcagttcctcaccgctctgttttacgctttggaaaaggaggagggagaagatagagatgggcatgcttgggacattggagatgtgcagaaacttctcagtggcgaggagcggctgaagaatccagacctgatccaggtagggcatttcttgtttggactagcaaatgagaaaagagccaaggagctggaggccactttcgggtgcagaatgtccccagacatcaagcaggaattgctacaatgtaaggctcacctgcacgccaataagcccctgagtgtcaccgatttgaaggaggttctggggtgcctgtacgagtctcaggaagaggagcttgccaaggtggttgtggcccccttcaaggaaatctccatacatttgactaataccagcgaggtgatgcactgctctttcagtcttaagcattgtcaggacctccagaaactgtcattgcaggtggctaaaggggtctttctagagaattacatggattttgaattagacatcgaattcgagcgctgtacatacttgaccatcccaaattgggcccgacaagacctgagaagccttagactgtggacagacttttgctcattattctcttccaactccaacctgaagttcctggaggttaagcagagctttctgagcgactctagtgtgaggatattatgtgatcacgttactcgatctacctgccacctgcagaaagtggaaattaaaaacgtgactcccgacactgcatatagagatttctgtctggctttcatcggcaagaaaaccctgactcacctcaccctggcagggcacatagagtgggagagaacgatgatgctgatgctgtgcgatctgctgagaaaccacaagtgcaatttgcagtatttgaggctgggcgggcactgcgctacacccgaacagtgggcagagtttttttatgtcctgaaagcaaatcagagtttgaaacacctgaggttgagcgccaatgtgctgctggatgaaggggccatgttgctatataagaccatgacccggcccaaacacttcttgcagatgctgtcccttgagaactgtagattaactgaggctagctgcaaggatctcgctgcagtgttggtggtgtccaagaagctgacccatctgtgcctggcaaagaatccaatcggagacacaggagtgaaattcctgtgtgagggactgagctatccagactgcaaactgcaaacattggttttacagcagtgcagtatcacaaagctgggatgcaggtacctttccgaggcgctgcaagaggcctgctcactgaccaaccttgatttatcaataaaccagattgccagaggactatggattctgtgtcaagctttagagaatccaaattgcaaccttaagcatctgaggctgtggtcttgtagcctgatgccgttttactgccagcatctggggagcgctctgctttctaaccagaagcttgagaccctggacctggggcaaaatcacctttggaaaagtgggatcatcaagttatttggagttcttagacagaggactggatctctgaaaatcctgaggctgaagacctatgagaccaacctggaaatcaaaaaactgctagaagaggtcaaggaaaagaatccaaaactgacaatcgattgtaatgcctccggtgccacagcccccccgtgttgcgattttttttgttag

SEQ ID NO: 296954 - DNA, 3114 bp, Artificial Sequence
  derived and/or modified sequence
atgaccagcccccagctggagtggaccctgcagaccctgctggagcagctcaacgaagatgagctgaaaagctttaaaagtctgctatgggctttccctctcgaggatgtcttacaaaagactccctggtcagaagtcgaggaggccgacggcaaaaagctcgccgagatactcgtcaatacatcgtccgaaaattggatccgcaatgctacggttaacattcttgaggagatgaacttgaccgagctgtgtaagatggctaaagcagagatgatggaggatggacaggtgcaagaaattgacaacccggaactgggcgatgcagaggaagacagtgagctggccaaaccgggcgagaaggaaggctggcggaattcgatggagaaacagagtcttgtctggaagaacactttttggcagggagatatcgacaactttcacgatgatgtgacgctccggaaccagagattcattccatttttgaaccctcgcacaccacgtaaattgacaccttacacagttgtactgcatgggccagccggcgtaggaaagactacacttgcgaaaaaatgtatgctcgattggacggattgcaacctctccccaactctgcggtatgctttctacctgagctgtaaggagctttctcgaatgggtccatgttcattcgctgaactcatctccaaagattggcctgaattgcaagatgacattcccagcattctggctcaggctcaaaggattctgtttgtcgtggacggccttgatgagttgaaagttcctcccggagcccttattcaggatatctgcggggactgggaaaagaagaagccagtgcctgtcctgctcgggagcctactcaaaagaaaaatgctcccccgagcagccctgctagtgacgaccaggcctcgagccctccgcgacctgcagttgctggctcagcaacccatctatgtgcgagttgaggggtttctcgaagaagaccggagggcctactttctcagacattttggcgatgaggatcaggccatgagagcctttgagctgatgaggtcaaatgccgctctcttccagctcggctcagcccccgccgtatgttggatcgtctgcacaacattgaagctgcagatggagaaaggggaggatcctgtgccgacgtgtctgacacggactggcttgttcctccggttcctgtgcagtcggttccctcagggagcgcaactgagaggtgccttacggaccctatctctgttggccgcccaaggcctgtgggcccagatgtccgtctttcatagggaagacctcgagcgcttaggtgttcaggagtcagacctgcggcttttcctcgacggggacatccttcgacaggaccgagtatcaaagggttgctactctttcatccatctgtccttccagcaattcttgacagcgcttttctatgcgctggaaaaggaggagggagaagatagagacggccacgcctgggatatcggcgacgtgcagaaactcctgagtggcgaggagagactgaaaaatccagacctgatacaggttgggcactttcttttcggcctggctaacgagaaacgcgcgaaagagctggaggcaacatttgggtgcaggatgtcgcccgacatcaaacaagaattgctgcaatgcaaagcccacttgcatgcaaacaaacccctgtcagttacagatcttaaggaggtgctgggctgtctatacgagtcccaggaggaagagctcgccaaggttgtggtagctcccttcaaggaaataagcatccatctgactaatacctctgaggtcatgcactgctcgttttccctgaagcactgccaggacctgcagaaactgtctctgcaggtggccaagggtgtttttttggagaattatatggatttcgaattggatatcgaattcgagcgctgcacatatctgactattcccaactgggctcggcaggatctgagatcactgagattgtggacagatttttgttcgctatttagcagtaattctaatctcaagttcctcgaggtcaagcagagctttctttcagattcgtccgtgcggattctgtgtgaccacgtgacccggtccacttgtcacttgcaaaaagtagagattaagaacgtgacgcccgacaccgcctaccgcgacttctgtcttgctttcatcggaaaaaaaactctgacccacttgaccttggccgggcacatcgagtgggagaggactatgatgctgatgctgtgcgatcttttacgaaatcataagtgtaatttacagtacctgagattgggaggccactgcgccacccctgaacaatgggctgaattcttctacgtgttgaaagccaaccaatcccttaaacatctaaggctctccgctaatgtccttctggacgaaggggctatgctgctgtataagacaatgacaagacccaagcattttcttcaaatgctgtcactggaaaactgtagacttacagaggcctcctgtaaagaccttgcggccgtgcttgtcgtaagcaagaagttgacacacttgtgcttagcaaaaaaccctattggagacaccggagtaaaatttctgtgcgaggggctcagctatcctgattgtaaactccagacacttgtgctccaacagtgttctatcacaaagctgggctgtagatacctctcagaggctctacaggaagcctgctctctaaccaacctcgatctgtctattaaccagattgctcgaggcctgtggattctgtgccaagccctggagaatccaaattgtaacctgaaacatttaagactctggagctgttcgctgatgcccttttactgccaacaccttggctctgccctcctcagcaatcagaagctggaaacgttggacctcggccagaatcacctgtggaagagtggcatcatcaaacttttcggggtactgagacagagaactggttcacttaaaatcctccgcctcaagacatacgagactaatctggaaatcaagaagttgctggaagaggtcaaggaaaaaaacccgaagttgactatagattgcaacgctagcggcgcaaccgcgccaccctgctgtgattttttttgttag

SEQ ID NO: 296955 - DNA, 3114 bp, Artificial Sequence
  derived and/or modified sequence
atgacttcgccccagcttgagtggactctccaaaccttgctggagcagctgaatgaggatgaactgaagagcttcaaaagtcttctgtgggcattcccactggaggatgtcctccagaaaactccttggtccgaggtggaggaagcagacgggaagaagctcgcagagatcctggtcaacacgagctccgagaactggatcaggaatgctactgtgaatattttagaagagatgaacttgaccgagctgtgtaaaatggctaaagcagagatgatggaggacgggcaggttcaagagattgataaccctgaactgggggacgctgaggaagattcagagctcgctaaacccggagaaaaagaaggttggcgcaattcaatggagaagcagtcattggtatggaagaacactttctggcaaggtgacatcgataattttcatgacgatgtgaccctcagaaaccagcgattcatcccattcctgaaccctagaactccacgaaaactgacaccgtatactgtggtgctgcacgggcctgccggtgtggggaagacaacactggcgaaaaagtgcatgctagattggacagactgcaacctcagtcctacgctcaggtatgcattttacctgtcctgcaaggaactgtccaggatgggcccttgttctttcgcagagcttatctctaaagactggcccgagctccaggatgacattccttccattcttgcgcaggctcagcggatattatttgtggtagacggactggacgagctcaaggtgcctcccggagcgttgatccaggacatatgtggcgactgggagaaaaaaaaaccagtgccagtcctgttaggaagtctccttaagcgaaagatgttacctagggccgctttactggtgacaacgaggcccagggctctgagggacctgcaattattggcccaacaacccatttacgttagagttgaaggcttcctggaggaagataggcgtgcctatttcctgagacattttggcgatgaagaccaggccatgcgggctttcgagctgatgaggtccaatgccgcactgttccagctggggagtgcccctgcggtctgctggatcgtgtgcactacccttaaactccagatggagaaaggtgaggatcctgtaccaacctgcttgacccgaacgggcctcttccttaggtttctgtgttcgcgctttcctcaaggggctcagttacgcggagccctcagaactctttcattgcttgccgctcaggggctgtgggcccagatgtctgtgttccaccgggaggatctggaacgcctaggagtccaggagtccgatttaagactcttcctggacggcgatattttgcggcaggacagagtgagcaagggctgctatagctttatccacctgtctttccaacagtttctcaccgctctattctatgcactcgagaaggaggaaggcgaagatagagatggccatgcctgggacattggagatgtgcagaagcttctctctggggaggaaaggctgaagaacccagatctaattcaggtcggtcactttctgtttggcctagctaatgagaagcgagctaaagaactggaagcgacctttggatgtagaatgtccccagatattaaacaggagctcctccaatgtaaggctcacctgcacgctaacaagcccctgtctgtgactgacctgaaggaagtgctgggctgtctgtacgagtcacaggaggaagaactagcaaaagtggttgttgctcccttcaaagagatttcgatccaccttacaaacacctccgaagtcatgcactgcagcttctcactgaagcattgccaggacctacaaaagttatctctacaggtcgccaaaggggtcttcttagagaattacatggattttgagctggacatcgagttcgagaggtgcacatacctcaccattccaaattgggctcgccaggaccttagaagtcttagactctggaccgatttttgctccctgttctccagtaactccaatcttaaattcctggaggtgaaacagagctttctcagcgattccagcgtccgtatcctttgtgatcatgtgaccagatcaacctgtcacttgcagaaggtagagatcaagaacgtaacacctgataccgcatatcgagatttctgcctggcttttatcgggaagaaaaccttgacacacttgaccctggctggacatatcgagtgggagcggacgatgatgttgatgctgtgtgacctgctgcggaatcacaagtgcaacctgcaatacctgcggctgggcggacattgcgctaccccggagcagtgggctgagttcttctatgtgctgaaagccaatcagagcctcaagcatctgcgactctccgctaatgtgttactagacgagggtgccatgcttctctacaagactatgactcggcctaaacactttttacagatgctaagcctcgaaaattgccggctgacagaggccagctgtaaagacctcgcggcagtcctggtcgttagtaagaagctgactcatctctgcctggccaagaaccctattggtgacacgggcgtgaaattcttatgcgaagggctgagttatccagactgcaagctacagaccttggtactgcagcaatgcagcatcacaaagctggggtgtagataccttagcgaagccttgcaagaagcctgcagtcttacaaacctggatctgagcatcaatcagattgccaggggattgtggatactgtgtcaagctctcgagaatcccaattgtaatctcaagcacctccgtttgtggtcttgctcattaatgcccttctattgccagcacctgggcagtgccctcctgtctaaccaaaagctggaaacactggacctgggacaaaaccatttgtggaagtcagggataataaaattattcggcgttctccgccaaagaacaggttcactgaagatcctaagattaaagacctacgaaactaaccttgaaatcaaaaaactattggaagaggttaaggaaaaaaatcctaaactgacaatcgactgtaacgcatcaggtgcaacagctccgccatgctgcgacttcttctgctag

SEQ ID NO: 296956 - DNA, 3114 bp, Artificial Sequence
  derived and/or modified sequence
atgacatccccccagctcgaatggaccctccagacacttctcgagcagctgaacgaagatgagttaaaatcctttaaatcacttttgtgggccttccccctcgaggatgtgctccagaagacaccatggtcagaagtggaagaggctgacggaaagaagttggccgaaatcctggtgaacaccagttccgagaactggatcagaaacgccactgtcaacatccttgaggagatgaatctgacggaactctgcaagatggctaaagcagagatgatggaggacggtcaggtgcaggaaattgacaatcccgagctcggcgatgctgaggaagattctgaactcgccaagccaggggaaaaagaggggtggaggaattccatggagaagcagtctcttgtgtggaagaacacattctggcaaggcgacattgacaatttccatgatgacgtgaccctccgcaatcagaggttcatcccattcctgaacccccgaacaccccgaaaacttactccatatactgtggtgctgcacggacctgcaggagtgggcaagaccaccctcgcaaagaaatgcatgcttgactggaccgactgcaacctatcccctacgctgagatacgcgttctacctgtcttgtaaggagttgagcagaatgggcccttgtagttttgcagaactaatttcgaaggactggcccgagctgcaggatgacatcccttccattctggcacaggcccagaggatactctttgtcgtcgatggcctggacgagcttaaggtcccacctggcgctctgatccaagacatctgtggtgattgggagaaaaagaaacccgttccagtactacttggctccttacttaagcggaagatgctgccgagggctgctctccttgttaccacgaggcccagagccctccgggacctccaattgttagcacagcagcccatttacgtgcgcgtagagggatttctggaagaagacaggcgagcctactttttacggcactttggcgatgaagatcaagcaatgagggcctttgagctgatgaggagcaacgctgccctctttcagctgggcagcgctcccgctgtgtgctggattgtgtgtactaccttgaaactgcaaatggaaaagggcgaagatcctgtgccaacttgcttgactcgcacgggactgttcttacgttttctgtgtagccgcttccctcagggtgcgcagctcaggggagcccttcgcacgcttagtctgctcgctgctcagggattgtgggcccagatgtcagtgttccaccgcgaggaccttgagaggttgggcgtgcaggaatccgatctacgtctgttcctggacggagacattcttcgccaggatcgcgtgtccaaaggctgctattcattcatccatttatccttccagcagttcctgacagcacttttttacgccctggagaaggaggaaggggaggaccgagatggccacgcgtgggacataggggacgtacaaaaactgctgagcggagaagagaggttgaaaaaccccgacttaattcaggtgggtcacttcctcttcggcttggctaacgaaaagagagcgaaggaactggaggccacctttggttgtaggatgagcccagatattaagcaggaattgctgcagtgtaaggctcatctccacgcgaacaagccactgagtgtcactgaccttaaggaagtgttaggatgtctttacgagagccaagaggaagagctggccaaggtcgttgttgcccctttcaaagagatatctatccatcttactaatacctctgaggtgatgcattgctcattttcactcaaacattgtcaggatttacagaagctctctctccaggttgcaaagggcgtgttcctggagaattacatggactttgagcttgacatcgagtttgaaaggtgtacctacctaacaatccctaattgggcgaggcaggatttacgcagcctgcgactgtggacagacttctgttccctattcagctccaattccaatctcaagttcctggaggtaaaacagagctttctgagtgatagctcagtgcggattctatgcgaccacgtgactagatccacgtgccacctccagaaggtggaaataaaaaacgtgacccctgacactgcctacagggacttctgcctggcctttattggtaagaaaacactgacacacctcaccctggctggccatattgagtgggagcggactatgatgctgatgttgtgtgacctgttacgcaatcacaagtgtaacttacagtatctccgacttggagggcactgcgcaacacctgaacagtgggcagaattcttctacgtgcttaaagcaaaccagtcactcaagcacctgaggttgtcggccaatgtacttctcgacgagggagcaatgctgctatacaaaaccatgacaaggcccaagcactttcttcaaatgctttcattggaaaattgccgcctgaccgaggctagctgtaaggatctggcagctgtgctggtcgtgtccaagaagctgacacatctgtgtttggcaaaaaaccccataggagacacaggagttaagttcctgtgcgagggcctctcttaccccgactgtaagttacaaacactggtcctccaacagtgttccatcacaaaactggggtgtcggtatctctcggaggccctgcaagaggcctgttcgctgactaatttggatctgagcattaatcagattgctcgaggcctgtggattctctgtcaagctctggaaaatcctaattgtaacctgaaacacctacgtctgtggagttgctccctaatgcccttctactgccagcaccttggttccgctctgctatccaaccagaaattggagaccctggacctgggtcagaaccacctgtggaaatcaggcattattaagttgtttggagtgcttaggcaaaggaccggttcacttaaaattttgagactgaaaacatacgagacgaacctcgaaatcaaaaaactcctggaagaagttaaggagaagaatcctaagcttacaatagattgcaacgcctctggggctaccgctcctccctgctgcgacttcttttgctag

SEQ ID NO: 296957 - DNA, 3114 bp, Artificial Sequence
  derived and/or modified sequence
atgacttctccacagctcgagtggaccctgcagacgctacttgaacagctaaatgaggacgaactcaaatcatttaagtccctgctatgggcatttccactagaggatgtgctccagaaaactccttggtcggaggtggaggaggcggacgggaagaagttggcagaaatcttagtcaacacttcctcagaaaactggattcgtaacgccaccgtgaacatcctggaggaaatgaatctgacagaactgtgcaaaatggccaaggctgagatgatggaggacggccaggtgcaggagattgacaacccggagctcggcgatgcggaagaggatagcgagctggctaagcccggtgagaaagagggatggagaaattccatggagaaacagagcttggtatggaagaacactttctggcagggtgatattgacaactttcacgacgatgttacccttcggaaccagagatttatcccttttctcaatcctcgtacccccagaaaactgacaccctacaccgttgtactgcatgggcctgccggtgtgggcaagaccaccttggctaagaaatgcatgctggattggaccgactgtaatctcagccctaccctgagatacgccttttacttaagctgtaaagaattgagtagaatggggccttgctcattcgccgagctaatctctaaggattggcctgagcttcaggatgatattccatctatacttgctcaggctcagagaatcttattcgtcgtggacgggctggatgagttgaaagtgccacccggagcattgattcaggatatttgtggtgactgggaaaagaagaaacctgtgcctgtgctgctgggaagtctccttaagagaaagatgctgccccgagccgctctactcgtgaccacacgtccaagagcactcagggatcttcaactcctagcacagcagccaatttacgttcgggtggagggatttttggaagaagaccggagggcttacttcctgcgccactttggcgatgaggaccaggcaatgagagccttcgagctgatgagatcaaatgcggctctgtttcagctgggctctgcccctgccgtctgctggatagtgtgtactaccctgaagcttcaaatggagaaaggagaagaccccgtacccacgtgcctaacacgtaccggcctattcctccggttcttgtgctccaggtttccccagggtgctcaactgagaggcgcacttaggactctatctctgcttgcagcgcagggactgtgggcccagatgtctgtgtttcatcgggaagacctggagagacttggcgtacaagagtccgacttaaggctctttttagacggagacatccttcggcaggatagggtcagcaaaggctgctatagtttcattcacctctcattccagcagtttctgacagcgcttttctacgcactcgaaaaagaggagggcgaagaccgggacggtcacgcctgggatattggggacgtgcagaagctcctctcaggcgaagaacgtctgaaaaatccagatcttatccaagttggccattttctgttcgggttagccaatgagaaacgagcaaaggagttggaggccacatttgggtgtaggatgtcccctgacataaaacaagagctgctgcaatgcaaggctcatctgcatgctaataagccattgagcgttacggacttgaaggaagtgctcggctgtctctacgagtcgcaggaagaagaacttgccaaggtcgttgtggccccttttaaagaaatctcaattcacctcaccaatacatccgaagttatgcattgcagttttagcctgaagcactgtcaggatcttcagaagctctccttacaggtggccaagggtgtttttctggagaactatatggactttgagctcgacattgagttcgagcggtgtacatacttaacaatcccgaattgggctcgccaggacctgcgtagcctgcgtctctggacagatttttgtagtttgttctcgtcaaacagtaacctgaagttccttgaagtgaaacagagctttctgtctgacagttctgtgcggatcttatgcgaccacgtcacaagatcgacctgtcacctacagaaagtggaaataaagaatgtgaccccagatactgcatatcgcgatttctgcctcgccttcattgggaagaagaccctgacccacctcacactcgccggtcatattgagtgggagagaactatgatgctgatgctgtgcgacctgcttcgtaatcataaatgtaacttgcaatacttacggttggggggacactgtgccactcccgaacagtgggccgaattcttctacgttttaaaagccaatcagtccttgaagcatctccgtctaagcgccaacgtcctcctagatgaaggagccatgcttctttacaaaaccatgacacggcctaaacattttctgcagatgctgagtctggagaattgtcggctcacagaagcaagctgtaaagaccttgcagcagtgctagtcgtgagcaagaaacttacccatctctgtctcgcaaagaatcccatcggagacaccggtgtgaaatttctgtgtgaaggcctgtcatatcccgattgcaagctgcagactctggtgctgcagcagtgctctatcacgaagcttggatgtcggtacctgagcgaagctctacaggaagcctgctcccttaccaacctcgacctgagtatcaaccaaattgccaggggcctgtggattctttgtcaggcgctggaaaatccgaattgtaatcttaagcacctgcgcctctggagctgtagcctgatgcccttctattgccaacacctgggatcggcgctgcttagcaatcaaaagctggaaacgttggatctcgggcagaatcacttgtggaagtccggcataattaaattattcggcgtgctgagacagagaacaggatccctcaagatcttacgactgaaaacatatgagaccaacctcgagatcaagaagctgttggaggaagtaaaagagaagaatccaaaacttacgatagattgtaacgcatcaggcgctacagctcctccctgttgcgatttcttctgttag

SEQ ID NO: 296958 - DNA, 3114 bp, Artificial Sequence
  derived and/or modified sequence
atgacttccccccagctggagtggaccttacagacgctactcgaacagctgaatgaggatgaactgaaaagttttaaatcacttttatgggcctttccccttgaagatgtcctgcagaaaacgccctggtcagaggtggaggaagctgacggcaaaaaactggctgagatcctggtgaatacatcttccgaaaactggattcggaatgccaccgttaacattctagaagaaatgaacttgacagagctctgtaagatggcaaaggccgaaatgatggaggatggacaggttcaagagatcgataatcccgaactgggggatgctgaagaggattctgagctggccaaacccggagagaaagaggggtggcggaatagcatggagaaacagtcactggtgtggaaaaacaccttctggcagggagatatcgacaacttccatgacgacgtgacactgaggaatcagagatttattccattcctcaatccaagaacccctaggaaactgaccccatacaccgttgtattgcatggccctgcaggggtcgggaaaactaccctggcgaagaaatgcatgctagactggaccgactgcaacctctcccctaccctccgttacgccttttatctctcctgcaaagagttgagtagaatgggaccatgcagtttcgcagagctaatttccaaagattggcccgagcttcaagacgatatcccatccattctcgcccaggcacagcgaatcttgttcgtggtggacggtctggacgaattaaaggtgccgcctggtgccttgattcaagatatctgcggggattgggaaaagaagaagcctgttccagtgttactggggtctcttctcaagcgtaagatgcttccgagggcagcactcctcgtcacgacacgacctagggctttacgcgatttgcagctactggcccagcagccaatctacgttcgggtggagggcttcttggaagaagacaggagagcctactttctgagacattttggggatgaagaccaggctatgcgagctttcgagcttatgcggagtaacgctgcgctcttccagctgggatcagccccagccgtatgctggatcgtatgtactaccctgaagctccagatggagaaaggcgaggacccagtgcctacatgtctgaccagaactgggttattccttcgtttcctctgctcccggttcccacagggcgctcagctacgcggagccctgaggactctgtcactcctcgctgcgcagggcctgtgggctcagatgagcgtttttcatagagaagacctggaaaggctcggagtccaggaaagcgatctgagactgtttctcgacggagacatactgagacaggaccgcgtcagcaaaggctgctactccttcatccacctttctttccaacagttcctcactgccctattctacgctctggaaaaggaggaaggagaagacagggatggacatgcgtgggacattggtgacgtccagaagctactgagcggggaagagaggctaaagaatccagacttgattcaggtcgggcattttctcttcggcctcgccaatgaaaagcgagctaaggagctcgaagcaacctttggatgcagaatgtcgccagacatcaaacaggagttgctgcagtgcaaagcccacctgcatgcaaacaagcccttgagtgtgacggatcttaaggaagtactgggctgcctttacgaaagtcaggaagaagaacttgctaaggtagtcgtcgccccatttaaagagataagtattcacctgaccaacacttctgaggtcatgcactgcagctttagcctcaaacattgccaagatcttcagaaactctcactgcaggtagccaaaggcgtgttcctcgagaattacatggattttgagctagatatagaattcgagaggtgtacatacctgactattcccaactgggctcggcaggaccttcggtccctgcgactgtggactgacttctgctctctgtttagcagtaattctaaccttaaattcttagaggtcaagcagtccttcctctctgacagttccgttagaattttgtgcgaccatgtgacaaggagtacgtgtcacttgcagaaggtagagatcaaaaatgtgactcccgacaccgcctaccgcgatttctgtcttgccttcattggtaagaaaacacttacccacctgactctggccggacacatagaatgggagcgcacaatgatgctgatgctgtgcgaccttctgcgtaatcacaagtgcaatctgcaatatctgcgcctgggtggacattgcgcgactcccgaacaatgggctgaattcttttatgtcctgaaagccaaccagtctctgaaacacttacggctttcagctaatgtcctcctcgacgaaggtgcaatgcttttgtacaagacgatgacacgcccaaaacactttctgcagatgctctcactggagaattgtcgtcttacagaggcctcttgtaaagacctcgcagctgtactggttgtcagtaagaagctgacccatctctgccttgctaagaatcctattggcgacacaggggtgaagttcctttgcgagggattgtcctacccagactgcaagctgcagaccctggtactacagcaatgcagtatcactaaactgggctgcaggtacctcagtgaggctttacaggaggcatgttccctgactaaccttgacttatctattaatcagattgccagaggtctgtggattttgtgccaggctctcgaaaaccccaactgcaatctcaagcatcttaggctttggtcctgcagcctaatgcctttctattgccagcaccttgggagcgctctcctgtctaaccagaagctggagaccctggatttgggccagaaccacctctggaaatcaggaataatcaaactgttcggcgtgctgaggcagcgcaccggatctctcaaaattttgcgcctgaagacatacgaaacaaatctggagatcaaaaagctgctggaggaagtaaaggaaaagaatccaaagctcacaatcgactgtaatgcatctggcgctacggctcctccgtgttgtgatttcttttgttag

SEQ ID NO: 296959 - DNA, 3114 bp, Artificial Sequence
  derived and/or modified sequence
atgacctcgccacagctagaatggactctgcagacactgctagaacaactgaacgaggatgaactaaagtcttttaaatctctcctttgggcctttcccctcgaggacgtgctgcagaaaactccttggtctgaggtggaggaggccgacggaaagaagttggccgagattctggtgaacacgagcagtgaaaattggattaggaacgctactgtgaatatcctggaagaaatgaatctgacagaactatgtaagatggcgaaagcggaaatgatggaggatggtcaggtgcaagagatcgacaaccctgagcttggtgacgctgaagaggactccgaactggcaaagcccggtgaaaaggaaggctggagaaacagcatggaaaaacagagtcttgtctggaaaaatacgttttggcaaggcgacattgataactttcacgacgacgtcaccttaagaaatcagcggttcattccatttctcaatcccagaacccctcgcaagcttacgccgtacacggtcgtcctgcacggtccggcaggagtgggaaagaccacattggctaagaaatgcatgctcgattggacggattgcaacctgagccccacactgcggtacgcgttctacctgtcgtgtaaggaactctcgcggatgggtccatgttctttcgcagagttaatcagcaaggactggccggagctccaagatgacattccttccattctggcccaggcacagaggatcctgttcgtggtggatggactcgacgagctgaaggtgcccccaggagcccttatccaagacatctgcggcgactgggaaaagaaaaagcctgtgcccgtgcttttggggtctttattgaagcggaagatgctgcctcgcgctgccctactcgtaactactagacccagggctctcagagacttacagcttctcgctcagcagcccatttacgtgcgcgtggaaggctttctggaggaggaccgcagagcctatttcctgagacatttcggggatgaagaccaggcaatgagagccttcgaattgatgaggtccaacgctgcgttatttcagttagggtctgctcctgccgtgtgttggatcgtctgcactaccctcaaattacagatggaaaagggcgaggatcctgtccccacgtgcttgacacgcaccggcctgttccttagattcctctgtagtagatttccacagggggctcaactgagaggagccttgcgcacattgtcactgctggccgctcaggggctatgggcacagatgtctgttttccacagggaggatctcgaaagattgggtgtgcaagagtcagacctgcgactctttctggacggggatattcttaggcaggacagagtctcaaaagggtgttatagttttatacacctatcttttcagcagtttctgaccgcactgttttacgcgctagagaaagaagaaggtgaggaccgggacggccacgcgtgggacattggggatgttcagaaactgttgtcaggtgaagagaggctcaaaaaccccgatctgatacaggtaggccattttctttttggcctggctaacgagaagcgggcaaaagagttagaagcgacgttcggctgtaggatgtcccccgatatcaagcaggagcttttgcagtgcaaggcacatctgcacgccaataaaccgctttccgttactgatctgaaagaggtcctcggatgtctgtacgagtcacaagaggaggaactggcgaaggtcgttgttgccccttttaaagagatttctatccacctgaccaatacctctgaggtgatgcactgtagcttctctctgaaacattgtcaggacctccagaaattaagcctgcaggttgccaaaggcgtgttcctggaaaactatatggacttcgaactggacattgagttcgagcgatgcacctatcttacaatccctaactgggcgagacaagaccttaggtcactccgcctgtggacagatttttgctctctcttcagcagcaacagcaatctgaaatttctggaggttaagcagtcttttctatccgacagctccgtgcgcatactatgtgaccatgtaaccaggtccacttgccacctgcaaaaggtggaaatcaagaatgtcactcccgacacagcctatagagacttctgcctggcatttatcggcaagaagacgctgacacaccttactcttgctggacatatagagtgggaacgaacaatgatgctgatgctttgcgatttattacggaaccacaagtgcaatctgcagtacctcaggctggggggacattgtgccacccccgaacagtgggccgaattcttttatgtcttgaaagccaatcagtctctcaaacatctgcgcttgtctgcaaacgtgctgttagatgagggtgccatgctgttgtataagaccatgaccaggccgaagcacttcctgcagatgctaagtctggagaactgtcgtttgaccgaagcctcctgtaaggacctggccgctgtgcttgtagtgagcaagaaattaacacacttatgcctagcaaagaaccctattggcgatactggcgtgaagtttctctgcgaaggcctttcctaccctgattgtaagttgcagacattggtcctgcagcaatgctccatcaccaagctcggttgtcgatatctttccgaagcattgcaggaggcatgtagcctaaccaacttagacctgtctatcaaccagatcgctcgcggactgtggatcctgtgccaggcactggagaacccaaattgcaatctgaagcatcttcggctgtggtcatgtagcctaatgcccttctattgtcagcaccttggtagcgccttactctcaaatcagaagttggaaactctggatctaggacagaatcacctgtggaaaagtggtatcataaaattgttcggagttctccggcagcggactggttcattgaagattctgaggttgaagacctacgagaccaatctcgaaattaagaagctgctggaagaagtgaaggagaagaatcccaaactcacaatcgactgcaacgcctctggggcaaccgcacccccatgctgcgatttcttctgttag

SEQ ID NO: 296960 - DNA, 3114 bp, Artificial Sequence
  derived and/or modified sequence
atgacgtccccccagctcgagtggactctgcagacattactcgagcagctgaacgaggatgaactcaaaagctttaagtcactcctttgggcattccccttggaggacgtactgcagaagacaccctggtccgaagtggaggaggctgacggaaaaaaactggctgagatcttagtgaatacaagctccgaaaactggataaggaatgccacagtgaacattctcgaggaaatgaaccttacagagctttgtaagatggcgaaagcagaaatgatggaggacgggcaggttcaagaaatcgacaaccctgaattgggcgacgccgaggaagattcagaactggcaaagcctggagagaaggagggctggcgtaattccatggagaaacagtctctcgtgtggaagaatactttctggcaaggcgacatcgacaactttcacgacgacgtcaccttacgtaatcagagatttatccccttcctaaaccccaggacccctcggaagctgaccccgtacactgtcgtgcttcatgggccagctggggtgggcaagactaccctggccaaaaagtgtatgttggattggacagactgcaatttatcacctaccctgcgttatgctttctacctgagctgcaaagagctgtctcggatgggaccctgtagcttcgctgagctaatctcaaaggattggccagaactgcaggacgacataccgagcatccttgctcaggcccagcgcatcctgttcgttgttgatgggcttgacgaattgaaagtacccccaggcgcactcatccaggacatctgtggagattgggagaaaaagaagcctgtgcctgtcctcctgggatccctgctcaagcgaaagatgctaccccgtgccgctctactcgtcaccacacggcctcgcgcactccgggacctgcagctgctcgcgcaacagcccatttacgttagagttgaagggttcctggaggaagatcgaagagcctatttcctgcggcacttcggcgatgaggaccaggccatgcgcgctttcgaacttatgcgcagcaacgcagctcttttccagttagggtctgccccagccgtgtgttggattgtctgcactacgctgaaactccagatggagaagggtgaagatcccgtccccacctgtctgaccaggactggcttgtttctgaggtttttatgttcccgattcccacagggggctcaactgcgaggggctttgagaacccttagccttcttgcagcgcaggggttatgggcccagatgagtgtgttccaccgggaggaccttgaaagactgggtgtgcaagaatcagatctcaggttgttcctcgacggggacattctgcggcaagaccgcgtcagcaaaggttgctattctttcatccacctgagttttcagcaatttctgaccgctttgttctacgccctcgagaaggaggagggcgaagaccgggatggccatgcctgggacattggcgacgttcagaaactactgagtggggaagagcgactgaaaaaccctgacctcattcaagttggccactttctctttggtttagccaacgaaaaacgagctaaggagcttgaggctaccttcggctgccggatgagcccagacattaagcaggagctgttacagtgtaaagctcatctgcacgccaataagccccttagcgttacagacctgaaagaagtattggggtgcctgtatgaatcccaagaggaggaattggcaaaggttgtcgtggcaccgtttaaggagatttccattcacctgactaatacatctgaggttatgcactgttcttttagcctcaagcactgccaggacctccagaagctatctttgcaggtggccaagggtgtgtttttggagaactacatggactttgaactcgacatcgagtttgagaggtgcacctacttaactattcccaactgggcgcgacaggacctccggtccctgcggctctggactgacttctgtagccttttctcatcgaatagtaatctcaagttcttagaagttaaacagagtttcctcagtgacagctccgtccgtattctgtgtgaccacgtgacccggtcaacctgccacttgcaaaaggtggagatcaaaaacgtgaccccagacaccgcataccgcgatttctgtctggcgttcattgggaagaagacccttacacatctgactctcgctggtcacatcgaatgggagcgcacaatgatgctgatgctctgcgacctcctccgaaaccacaagtgcaatcttcaataccttagactggggggacactgcgccaccccggagcagtgggcggagttcttttacgtgctgaaggcaaaccagtctctgaagcacttgcgtctgagcgcaaacgtgctgctagatgaaggtgccatgctgctctataaaacaatgacgcggcctaaacacttcttgcagatgctcagccttgagaattgccgactgaccgaggcatcttgcaaagacctagctgcggtcctcgtcgtttcgaaaaagcttacacatctctgcctggccaagaacccaatcggcgatacgggcgtgaagttcttgtgtgagggactcagctatcctgattgtaaacttcagacccttgttctgcagcagtgctctattactaagttaggctgccggtaccttagtgaagcactgcaggaagcctgttctctgaccaacctagacctgtcaattaaccagatcgccaggggcctgtggatcttatgtcaggctcttgagaatcccaattgcaacttgaaacatctgagattgtggtcctgtagcctcatgccattttactgccagcacctgggcagtgctcttctaagcaaccagaagctcgagacactggacctgggccagaatcacttatggaaatctggaattattaaacttttcggcgttttgcgacagaggaccggttcactgaagattctgagacttaaaacatacgaaaccaacctggaaatcaaaaaacttctggaggaggtgaaggagaaaaatcccaaactcacaatagattgtaacgccagcggcgcaacggctcctccatgttgcgacttcttttgctag

SEQ ID NO: 296961 - DNA, 3114 bp, Artificial Sequence
  derived and/or modified sequence
atgacctctccgcagttagagtggacccttcagactctgctggaacagcttaatgaagatgaactaaagagcttcaagagcttactgtgggcttttcccctagaggatgtcctgcagaagactccatggagcgaggtggaggaggccgacggaaaaaaattggccgagatcctggtcaatacgtctagcgaaaattggattcgaaacgctaccgtgaatatcctggaagagatgaatctgacagaattgtgtaagatggccaaagctgagatgatggaggatggacaagttcaggagattgacaaccctgagcttggcgatgccgaggaagacagcgagctcgctaagccgggtgaaaaggagggctggcggaattccatggagaaacaatctttggtgtggaaaaatacattttggcagggtgatatagacaactttcacgatgatgtgaccttacgaaaccagcgcttcatcccttttctgaatccgagaacaccacggaaattaaccccctacaccgtcgtcctgcacggcccagcaggggtgggaaagacgaccctggccaaaaaatgcatgctggactggaccgattgtaacctatcgcccacactccgctacgccttctacctgtcctgcaaagaactgtccagaatggggccttgtagcttcgctgaactgatcagcaaagactggcctgagcttcaggacgacattccctccattctcgctcaagcccaacgcattctgtttgtagtcgatggacttgacgagctgaaggtgccacccggagccctcatccaagatatatgcggcgattgggagaaaaagaagccagtgcccgtactgctggggtcactactgaaacggaagatgttgccaagggctgccctccttgtcacaaccagaccaagggcgctgagggatctgcaactgttagcccagcagccaatctacgtgcgagtggaaggtttcctagaagaagatcggcgagcatacttcctaaggcatttcggcgacgaggaccaagccatgagagccttcgagcttatgcgaagcaacgccgctttgttccagctgggcagtgcgcctgccgtgtgctggatcgtctgcaccaccttgaaactgcagatggagaagggcgaggaccctgttccaacttgcctcacacgcactgggctttttttgcggttcttgtgcagtcgttttccccagggtgcacagttgcggggtgctttgcgtacactcagccttttggccgcacaaggcttgtgggcccaaatgtctgtttttcatcgggaagacttggagcgcttgggcgttcaggaaagtgaccttcgcctgttcctggacggcgatattcttcgccaggaccgggtgagcaaaggttgctattcttttatccacctctccttccagcagttcttgaccgcgctcttttatgccctagaaaaggaagagggagaagaccgagacggccacgcctgggacataggcgatgtccagaagttgcttagcggtgaggagaggttgaagaatccagatctgatccaagtgggacacttcctgttcggtctcgctaacgaaaagcgcgcaaaggagttagaggcaacgtttggatgtagaatgagcccagatatcaagcaggaactgctgcagtgtaaggcccatctccatgcaaacaaaccactgtcggtcaccgacctgaaagaggtactgggctgcctttatgaaagtcaggaggaggagttggctaaggttgtcgttgcccctttcaaggaaatctctatacatctaactaatacatccgaagttatgcactgtagtttctccttaaagcattgccaagacctccaaaagttaagccttcaagtggcaaaaggtgtgtttcttgagaactacatggacttcgagttagacatagaattcgagcggtgcacctacctgaccattcccaactgggcccgacaggatctgcggagcctcagactgtggaccgatttttgttcactcttcagttctaactccaaccttaagtttctggaggtgaagcaatcttttttgtcagattcatctgtgagaatactttgtgatcacgtgactcgctcaacatgccacctccagaaagtcgagatcaagaacgttaccccagataccgcatatagggatttctgtctcgcgttcattggcaaaaaaacactgacccatctgaccctcgcgggtcatattgagtgggaacgtacgatgatgttgatgctgtgcgaccttttgcgcaatcacaagtgcaatctgcagtatctgcgcctgggtggccattgtgcaactcccgaacagtgggccgaattcttctacgtcctgaaggccaatcagtcattgaaacacctgcgcttgagcgctaacgtgctgctggacgaaggtgccatgctgctgtacaagacgatgactcggccaaagcatttcctgcagatgctgagtctcgagaattgtcggttaaccgaggcttcatgcaaggacctcgccgcagtgctggtcgtgtctaaaaaattaactcatctatgcttggccaaaaaccctatcggcgatacgggagttaagtttctgtgtgagggcctgtcttatcccgactgtaaactccaaaccttggttctgcaacagtgttcaattaccaagttaggatgtagatacctgtcagaagctctccaagaggcatgttccctaacgaacctggatctcagcataaaccagatcgccagaggactgtggatcctttgtcaagcattggagaatcctaattgtaatctgaagcatctccgcctctggtcttgtagtctgatgccgttctactgccagcacctgggtagcgccctgctgagcaatcagaagctggagacactcgatctggggcaaaaccatctttggaaatccggcatcattaagttattcggggtcctaagacaacggacgggctcgctcaagatcctgagactgaaaacctacgagaccaaccttgagatcaagaagctgttggaagaggtcaaggagaaaaatcctaaactgaccattgattgtaatgccagtggagcgacggccccaccttgctgcgattttttttgttag

SEQ ID NO: 296962 - DNA, 3114 bp, Artificial Sequence
  derived and/or modified sequence
atgacaagccctcagttggagtggacgcttcaaactttacttgaacaattaaatgaagacgagcttaaatctttcaagtccctcctgtgggccttccccctcgaggacgttctgcagaaaaccccatggtcagaagttgaagaagcggacggaaaaaaactggccgagatccttgtcaacacctcgagcgagaactggattcggaacgccacagtcaatatactggaggagatgaatctgacagagctgtgtaagatggctaaggctgaaatgatggaagatggacaggttcaggaaatcgacaaccccgagcttggcgacgctgaagaggatagtgagctggccaaacccggtgaaaaggagggatggcgcaactccatggaaaagcagtcgcttgtctggaagaacaccttttggcagggtgacatagacaattttcacgatgacgtaacactgaggaatcagagattcatccctttcctgaaccccaggacaccccgtaaacttaccccttatacagtggtactgcacggccctgccggtgtgggcaagaccactttggctaagaagtgcatgcttgactggaccgactgcaacctgtcgccaacgcttcgttatgccttctatctaagttgcaaggagctgtcaaggatgggaccgtgctcctttgccgagctcatctccaaagactggccagagctccaagatgacataccgagtattctggctcaggcccagcggattttgttcgtagtcgacgggctcgatgagctgaaggtgcctccgggtgccttgatccaggacatttgcggggattgggagaagaagaagccagtgcctgtactgttaggatccctgttaaaacgcaagatgctacccagagcagctttgctggtaaccacccggccacgagcactgagggaccttcaacttctagcacagcagccaatttacgtacgggtggaggggtttctagaagaagatagacgcgcttacttcctgcgccactttggcgacgaggaccaggctatgcgcgcttttgagctgatgaggagcaacgcggcactttttcagctcggatccgctcctgccgtctgttggattgtgtgcacaactctgaagctacagatggaaaaaggagaagatccagtgcccacttgcttgaccaggactggcctgtttctccggtttttatgttcacgcttcccccagggcgcacagttgcggggtgcgctgaggaccttgagcctgttggcagcccaaggcctgtgggctcagatgtctgtttttcatcgggaagaccttgaacgcctgggcgtgcaggagtcagacctaagattgttcttggatggtgacattttgcgccaggatcgcgtgtcgaagggatgttactcctttatccaccttagttttcaacagtttcttacggccctcttctacgctttggagaaggaagaaggtgaggacagggacgggcatgcgtgggatatcggagatgtgcagaaactgctctccggtgaagagagattgaaaaaccccgatctgatccaggtcggccattttctgttcggcctggccaacgagaagcgggctaaggaacttgaggcaacgttcgggtgtagaatgtcccccgacatcaaacaagaactgcttcagtgcaaagcccacctgcatgccaacaagcccctctctgtcacagatctcaaggaagtccttggctgtttatatgagagccaggaggaagagctcgcaaaagtggttgtggccccttttaaagagatctctatccatctgactaacacgagcgaggtcatgcactgtagctttagtttaaaacactgccaggacctccagaagctgagccttcaggtcgccaagggtgtttttctggaaaattatatggactttgaattggacattgaatttgagcgctgcacctacctgactatccccaattgggctaggcaggatcttcgatccttgcggctgtggaccgacttctgctctctgtttagcagcaactccaatctgaaattcttagaggtcaaacagtcttttttgagtgactcaagtgtgcgaattctgtgcgaccacgttactcgaagcacttgtcatctccagaaggtggaaatcaaaaatgtcacccctgacacagcctaccgcgacttttgtctggccttcattggcaaaaagaccttgacgcacctcaccctggcgggacacattgaatgggaacgaactatgatgctgatgctctgcgacttgttacgaaaccataagtgtaatctccagtatctgcggctcggcggacactgtgccactccagaacagtgggccgaatttttttatgtattgaaggccaatcagtcactaaagcatctgcggctgagtgccaacgtcctcttagatgagggcgcaatgctcctgtacaagactatgactaggcccaagcacttcctacagatgttgagcctggagaattgtagactgactgaggcctcctgtaaagacctggctgccgtgttagtggtttccaagaaactgacccatttgtgtcttgcaaagaaccccataggtgacacaggcgtcaaatttttgtgcgagggccttagctatccagattgcaagctgcagaccctggtccttcagcagtgcagcatcacaaagttaggttgtcgttacttgagtgaggccctccaggaagcctgctctttgacaaatctagatttgtccattaaccagattgccaggggactctggatcctgtgccaggcattggaaaatcctaactgcaacctgaagcatctgagactttggtcgtgttcccttatgcccttttattgtcagcacctcgggtccgcactactctcaaaccagaagctggagacattggacctgggacaaaatcacctatggaaatccggcattattaaacttttcggcgtcttgcgtcagagaacaggatcactgaagatcctgcgactgaaaacctatgagacgaacttggaaatcaaaaaactgctggaggaggtgaaggagaagaatccgaaactgaccatcgactgcaatgccagcggagccacggcaccaccctgttgcgatttcttctgttag

SEQ ID NO: 296963 - protein, 575 aa, Artificial Sequence
  derived and/or modified sequence
MPPGKVLQPVLKMKVDELFLYWLSEASTQRMLQDCLRRIKAPGRDQPTPGDGEQPGAWPTAPLAAPRPSGLEPPGTPGPGPALPLGAASSPRNAPHVRGTRRSAGTRVVQTRKEEPLPPATSQSIPTFYFPRGRPQDSVNVDAVISKIESTFARFPHERATMDDMGLVAKACGCPLYWKGPLFYGAGGERTGSVSVHKFVAMWRKILQNCHDDAAKFVHLLMSPGCNYLVQEDFVPFLQDVVNTHPGLSFLKEASEFHSRYITTVIQRIFYAVNRSWSGRITCAELRRSSFLQNVALLEEEADINQLTEFFSYEHFYVIYCKFWELDTDHDLLIDADDLARHNDHALSTKMIDRIFSGAVTRGRKVQKEGKISYADFVWFLISEEDKKTPTSIEYWFRCMDLDGDGALSMFELEYFYEEQCRRLDSMAIEALPFQDCLCQMLDLVKPRTEGKITLQDLKRCKLANVFFDTFFNIEKYLDHEQKEQISLLRDGDSGGPELSDWEKYAAEEYDILVAEETAGEPWEDGFEAELSPVEQKLSALRSPLAQRPFFEAPSPLGAVDLYEYACGDEDLEPL

SEQ ID NO: 296964 - DNA, 2151 bp, Artificial Sequence
  derived and/or modified sequence
cgcgggcccagcccccgccatgccgcccggcaaagtgctgcagccggtcctgaagatgaaggtggacgagctgttcctgtactggctcagcgaggccagcacgcagcggatgctgcaggactgcctgcgccggatcaaggcgcccgggcgggaccagccgaccccgggggacggggagcagcccggggcctggcccacagccccgctcgccgccccccggcccagcgggctcgaacccccgggaacccccgggccgggccctgcgctgcccctgggcgccgcctccagccccaggaacgcgccccacgttcgaggcacccgtagatccgcagggacgagagtagttcagacacggaaagaagagcctctgcccccggccacgagccaaagcattccgaccttctacttccccagaggacgcccgcaggactccgtcaacgtggatgccgtcatcagcaagatcgagagcaccttcgcccggttcccccacgagagggccaccatggatgacatgggcctggtggccaaggcctgcggctgccccctctactggaaggggccgctcttctatggcgccggcggggagcgcacgggctccgtgtccgtccacaagttcgtcgccatgtggagaaaaatcctccagaactgccacgacgacgcggccaagttcgtccatctgctcatgagccccggctgcaactacctggtgcaggaggactttgtccccttcttgcaggacgtggtgaacacgcacccggggctgtcgttcctgaaggaggcgtccgagttccactcgcgctacatcaccacggtcatccagcggatcttctacgccgtgaaccggtcctggtccggcaggatcacctgcgccgagctgcggaggagctccttcctgcagaatgtggcgctgctggaggaggaggcggacatcaaccagctgaccgaattcttctcgtacgagcatttctacgtcatctactgcaagttctgggagctggacacggaccacgacctgctcatcgacgcggacgacctggcgcggcacaatgaccacgccctttctaccaagatgatagacaggatcttctcaggagcagtcacacgaggcagaaaagtgcagaaggaagggaagatcagctatgccgactttgtctggtttttgatctctgaggaagacaaaaaaacaccgaccagcatcgagtactggttccgctgcatggacctggacggggacggcgccctgtccatgttcgagctcgagtacttctacgaggagcagtgccgaaggctggacagcatggccatcgaggccctgcccttccaggactgcctctgccagatgctggacctggtcaagccgaggactgaagggaagatcacgctgcaggacctgaagcgctgcaagctggctaacgtcttcttcgacaccttcttcaacatcgagaagtacctcgaccacgagcagaaagagcagatctccctgctcagggacggtgacagcggcggccccgagctctcggactgggagaagtacgcggccgaggagtacgacatcctggtggccgaggagactgcgggagagccctgggaggacgggttcgaggccgagctcagccctgtggagcagaagctgagtgcgctgcgctccccgctggcccagaggcccttcttcgaggcgccctcaccgctgggcgccgtggacctgtacgagtacgcatgcggggacgaggacctggagccgctgtgacgccgcccgcgagaacgccgccgcggggccgctccccacgtgccaccaccgggccaccgcggctcgtgtaaaaactgttgtggaaaatgagtgcgtttgtacggaatgataaacttttatttattcacagaagcgtgttgattgccgctgtgggttcgtggctggacctgcccagagctctgtgccagggggacacgtagggccgcgcgtgaatgggacgggttcccacacggacaccctctggcgcttgccgttcccgacccagcctgggttccggggcctgcgtctgtggaaagggtccgtgtgcgcacaacggtgaccggcggctcccgggcgcctcagtcctggacaggagcctccaccacaggctgtgtgaatgttttgtgtaaacgtacaaaaccgtt

SEQ ID NO: 296965 - protein, 396 aa, Artificial Sequence
  derived and/or modified sequence
MDPRGTKRGAEKTEVAEPRNKLPRPAPSLPTDPALYSGPFPFYRRPSELGCFSLDAQRQYHGDARALRYYSPPPTNGPGPNFDLRDGYPDRYQPRDEEVQERLDHLLCWLLEHRGRLEGGPGWLAEAIVTWRGHLTKLLTTPYERQEGWQLAASRFQGTLYLSEVETPNARAQRLARPPLLRELMYMGYKFEQYMCADKPGSSPDPSGEVNTNVAFCSVLRSRLGSHPLLFSGEVDCTDPQAPSTQPPTCYVELKTSKEMQSPGQWRSFYRHKLLKWWAQSFLPGVPNVVAGFRNPDGFVSSLKTFPTMKMFEYVRNDRDGWNPSVCMNFCAAFLSFAQSTVVQDDPRLVHLFSWEPGGPVTVSVHQDAPYAFLPIWYVEAMTQDLPSPPKTPSPK

SEQ ID NO: 296966 - DNA, 1191 bp, Artificial Sequence
  derived and/or modified sequence
atggatccgcgtgggacaaagcggggcgcagagaaaactgaggtggctgagccacgcaataagttgccacggcctgcaccatctctgccaacggacccagctctttacagtgggccattcccgttttaccgccgcccatctgagcttgggtgtttttcattggacgcccagcgccagtatcacggggatgcccgggctctccgctactattccccaccccccactaacggccctggcccgaacttcgatctgagagacggctacccagacagataccagccaagggacgaggaggtccaggagagactggaccatctattgtgttggttgctggagcatcggggtcgactggaaggggggccaggctggctcgctgaggcgattgtaacctggcggggacacctgactaagcttctcactacaccctacgaaaggcaagagggatggcagttagcagctagccgatttcagggcaccctgtacctgtcagaggttgaaacgcccaatgcacgtgcacagaggcttgcgcggcccccacttttgagggagctcatgtatatgggctataagtttgagcagtacatgtgcgctgataaaccgggatcctcacccgatccctccggcgaagtcaacacgaacgttgccttttgtagcgtgctcagatctcggttgggctctcatccactgttgttttccggtgaagtggactgcactgaccctcaggcacccagcacccagcctcctacatgctacgtggaactgaagacgagcaaggaaatgcagagcccgggccagtggcggtccttctaccgacacaaattgttgaaatggtgggcccagtcctttctgcctggagtccctaacgttgttgctgggttccgaaacccagacggatttgtgagcagtctcaaaaccttccctactatgaaaatgttcgaatacgtgaggaatgaccgcgatggctggaacccttctgtgtgcatgaacttctgtgctgcattcttatccttcgcacaatctactgtcgtccaggacgatccgcgattggttcacctcttttcctgggaaccgggggggcctgtcaccgtgagtgtgcatcaggacgccccctacgccttcctgccaatatggtacgtcgaggccatgacacaagacttacctagtcccccgaagaccccatcccccaaatag

SEQ ID NO: 296967 - DNA, 1191 bp, Artificial Sequence
  derived and/or modified sequence
atggacccgcggggcacaaagcgcggagcagaaaagaccgaggtggcagaacctcgcaataaactgcctaggccggctccttctctgcctactgatcccgctctctacagcgggcccttcccattttaccgcagacctagcgaactcggctgtttttcactcgatgcgcaaaggcagtaccatggagatgccagggcactgcgctactacagccctcccccgaccaatgggcccggccccaactttgatctgcgggatggataccccgaccgctaccagcctcgagacgaagaggttcaagagcggctggaccacctcttgtgctggctccttgaacaccgggggcgcttggaggggggacccggctggctggcagaagccatcgtcacatggagaggacaccttaccaagctactgacaacaccatatgagcggcaagagggctggcaactcgccgcctccaggttccagggaaccctttacctgtcagaagtagagacccctaatgccagggcccagcgcctggcccgcccaccacttctgcgagaactgatgtacatgggatataaattcgagcaatatatgtgcgcggacaagcctggcagcagccctgacccatctggagaggtgaatacgaacgtcgcattttgttcagtactgcggagcagattggggtcacaccccctgctgtttagtggcgaggttgactgtaccgacccccaggctcctagtactcagccccccacttgctacgtggaactgaaaacttccaaagagatgcaaagccccggacagtggcgcagtttctaccgccacaaattgctgaagtggtgggctcagtccttccttccgggtgttcccaacgtcgtggccgggttccgcaacccagacggtttcgtgagcagtctaaagaccttcccgaccatgaagatgtttgaatacgtgcgcaacgatagggatgggtggaacccatctgtgtgcatgaatttctgtgccgcttttctgtcctttgctcagagcaccgttgtacaggacgacccaaggcttgtccacctgttctcctgggagccgggtgggccagtgaccgtgagtgtccatcaggatgctccttatgcgttcttgcccatttggtacgtggaagccatgactcaagacctgccatcccctccaaaaactccaagtcccaagtag

SEQ ID NO: 296968 - DNA, 1191 bp, Artificial Sequence
  derived and/or modified sequence
atggacccgcggggaacaaaacgcggtgcagagaagactgaggttgctgaaccccgaaataagctacctaggcccgctccctcactcccaacagaccccgccctatactctggcccattccccttctatcgcaggccctctgaacttggttgcttctcactagacgcccagagacagtaccacggcgatgcgcgggctctgcgctattattctcctccacctacgaacgggccgggcccaaattttgatctgagagatggataccccgatcggtaccaacctcgggatgaggaggtgcaggagagactcgatcacctgttgtgttggctgctcgaacataggggacggcttgaggggggcccaggttggctcgccgaggcaatcgtgacctggcgcggtcatctgacaaagcttttgacaaccccatacgagagacaagaaggatggcagcttgccgcctccaggttccagggaacgttatacctgtctgaggtcgagacacctaacgcacgtgcccaaaggctggcacgccccccgctcctgcgagaactgatgtacatgggatacaagttcgagcagtatatgtgtgccgacaagccgggctcgtccccagacccttctggagaagttaatacaaatgtggctttttgtagtgtgctgcgctctaggcttggctcccatccgctgcttttctccggcgaggtggactgcactgacccccaggccccaagcactcagcccccaacctgttacgtggagcttaagaccagcaaggagatgcagtccccgggccagtggagaagtttctatcgccataaactgctgaaatggtgggcacagagctttctgcctggagtccccaatgtggtggctggctttaggaaccccgatgggttcgtgagctccctgaaaacctttcccaccatgaagatgtttgaatatgtcagaaacgaccgggatggatggaacccatccgtgtgtatgaatttctgcgccgcctttctgtcttttgcccagtcgacagtcgtacaggatgacccccgcctggtccaccttttcagctgggagcctgggggacccgtcaccgtgagcgtacaccaagacgcgccatatgcgttcctaccaatctggtacgtggaagcaatgactcaggatttgccctcaccacccaaaaccccttcacccaaatag

SEQ ID NO: 296969 - DNA, 1191 bp, Artificial Sequence
  derived and/or modified sequence
atggacccccggggcaccaagagaggagctgagaagacagaggtggccgagcccaggaacaagctgcccaggcctgcccccagcctgcccacagatcctgccctgtacagcggccccttccccttctaccgccggcccagcgagctgggctgcttcagcctggatgcccagaggcagtaccatggagatgcccgggccctgcgctactacagccccccacccaccaacggccctggccccaactttgacctgagagatggctacccagaccgctaccagcccagagatgaggaggtgcaggagcggctggaccacctgctgtgctggctgctggagcaccggggccgcctggagggcggccctggctggctggccgaggccatcgtgacctggaggggccacctgaccaagctgctgaccaccccctatgagcggcaggagggctggcagctggccgccagccgcttccagggcaccctgtacctgtctgaggtggagaccccaaatgcccgggcccagaggctggcccggccccccctgctgcgggagctgatgtacatgggctacaagtttgagcagtacatgtgtgccgacaagccaggcagcagcccagaccccagcggggaggtgaacaccaacgtggccttctgcagcgtgctgcggagccggctgggcagccaccccctgctcttcagcggggaggtggactgcacagacccccaggcccccagcacccagccccccacctgctacgtggagctgaagaccagcaaggagatgcagagccctggccagtggaggagcttctaccgccacaagctgctgaagtggtgggcccagagcttcctgcccggggtgcccaacgtggtggccggcttcaggaacccagatggctttgtgagcagcctgaagaccttccccaccatgaagatgtttgaatatgtgagaaatgacagagatggctggaaccccagcgtgtgcatgaacttctgtgccgccttcctgagctttgcccagagcacagtggtgcaggatgacccccggctggtgcacctgttctcctgggagcccggcggccctgtgacagtgtctgtgcaccaggatgccccctatgccttcctgcccatctggtacgtggaggccatgacccaggacctgcccagcccccccaagacccccagccccaagtag

SEQ ID NO: 296970 - DNA, 1191 bp, Artificial Sequence
  derived and/or modified sequence
atggacccccggggcaccaagcggggcgccgagaagaccgaggtggctgaaccacgcaataagctgcctagacctgcccccagcctccctaccgatccagcactatactcaggcccattcccattctacagacggccttcagaactgggatgtttctcactggatgctcaacggcagtaccacggcgatgcaagagctctgaggtactactcccccccccccacaaatggaccaggtcccaattttgaccttcgtgatggatatcccgatcgttaccaaccccgggacgaagaggtgcaagaaaggcttgaccatctgttgtgctggctccttgagcatcgtgggagacttgagggtggaccaggttggctggccgaagcaatcgtgacctggagaggccatctgactaaactgctcaccacaccctatgagcgtcaagaaggctggcagttagcagcctcgcggttccagggcaccctgtacttatccgaggtagaaacccccaatgccagggcccagcggttagcgagacctccgctgttgcgggagctcatgtatatgggttataagttcgagcagtatatgtgtgccgacaagccagggtcatctcctgacccttctggagaagtgaataccaacgtagccttttgctcagtgctcagaagcagactggggagccaccctctcctcttctccggcgaagtggattgcacggacccacaggcgcccagcactcagcccccaacatgttatgtggagctgaaaacatctaaggaaatgcagtcacccggccagtggaggtccttttaccgtcataagttgctaaagtggtgggcccaatccttcctcccaggtgtccctaatgtagtggcgggattcaggaacccagatggcttcgtttcctcattgaaaacattccctacaatgaagatgttcgaatacgtgcgtaacgatcgggacggctggaatccaagtgtctgcatgaacttttgcgccgcgttcctaagctttgctcagtctactgttgtgcaggatgacccacgcctggtccatctgttctcctgggagccaggcgggccagtaactgtgtccgtacaccaggacgcaccttatgcttttctgccaatctggtacgtggaggcaatgacccaggacctgccgtctccccccaagacaccgtccccaaaatag

SEQ ID NO: 296971 - DNA, 1191 bp, Artificial Sequence
  derived and/or modified sequence
atggacccccggggcaccaagcggggcgccgagaagaccgaggtggcggagcccaggaataagctgcctaggcccgcaccttctctacctacagaccccgcattgtactctgggccatttcctttttatagacggccgtcagaactagggtgtttttctctcgatgcacaacggcagtaccatggggacgctagggccttgaggtattattcacctcccccaaccaatggccctgggccaaacttcgatctgagagacggatatcctgaccgctaccagccgcgcgacgaggaagtccaggagagactggatcacctcctgtgctggttgctcgaacacagaggcaggctcgagggaggccctggttggctggccgaggccattgtgacatggcggggacatttaactaagctgctcaccacaccatatgaaaggcaggaggggtggcagctagcggccagcaggttccaagggacactttatctgtcggaagtcgagacacctaacgcaagagcccagagactggccaggccgcccctactgcgcgaattgatgtatatggggtacaaatttgagcagtacatgtgcgcagacaaaccaggctccagcccagacccatcgggggaggtgaacacgaatgtcgccttctgttcagtattgagatctaggttgggcagtcaccctttgctctttagcggagaggtggattgtacagatccccaggcaccttcaactcagcccccgacatgttacgttgaactcaagacctccaaggagatgcagagccccggccagtggcggagcttttataggcacaagcttttgaaatggtgggctcagagctttctgcccggcgttcctaacgttgttgccggctttaggaatccggatggttttgtgtcgagcctgaaaacctttccaacaatgaaaatgttcgaatacgtacggaacgacagagacgggtggaacccctcggtgtgtatgaacttctgcgccgctttcctttcgttcgctcaatcaaccgtggtgcaggatgacccgcgcttagtgcatctgttttcttgggaacccggaggcccagtcaccgtatctgtccatcaggatgcaccctacgcctttctgcccatatggtacgtcgaagccatgacacaagatctgccctctcctcccaaaacaccttctccaaagtag

SEQ ID NO: 296972 - DNA, 1191 bp, Artificial Sequence
  derived and/or modified sequence
atggacccccggggcaccaagcggggcgccgagaagaccgaggtggctgaacccagaaataagctacccaggccggccccctctttgcctactgatcctgcactgtattctggcccatttccgttctatcggcgaccctcagagttggggtgtttcagtcttgatgcccagcgccaataccacggcgacgctcgggcactgcggtactattctcccccgcccaccaatgggcctggcccgaactttgacctgcgggacggatatccggaccggtatcagccgagggacgaggaagtgcaagaacgcttggatcacttgctgtgttggctcttagaacatagggggaggctagaagggggacccggatggttggccgaagccattgttacctggagaggccacctgacgaaacttctgaccacaccatacgagcggcaagagggatggcaactggctgctagccggtttcagggcaccctttacttatcagaggtggagaccccaaatgcccgtgcccagcgccttgcccgacctcctctactgagagaactgatgtacatgggatacaaatttgagcagtatatgtgcgcagacaaacctggtagctctcctgatcccagtggtgaagttaacactaacgtcgcgttttgttcggtgcttcgcagcagactcgggagtcaccccctgctgttctctggagaggtggactgtacagatcctcaggccccctcaacccagcccccaacatgctacgtggagctgaaaacatctaaggaaatgcaaagtcctgggcagtggagaagtttttaccgccataagctcctgaaatggtgggcccagagctttctgccaggcgtgccaaacgtggtggcaggattccgcaaccctgatggattcgtaagttcacttaaaacctttcccactatgaagatgtttgaatacgtaaggaacgaccgcgatggttggaacccaagcgtgtgtatgaatttttgtgccgcgttcttatcatttgcccagtcaaccgttgtgcaggacgacccccgcctcgtgcacttattctcttgggagcctggcgggccagtcaccgtatctgtccaccaagatgcaccgtatgcatttttaccaatctggtacgtcgaggcaatgacccaggatctgccttcgccacccaaaacccccagccctaagtag

SEQ ID NO: 296973 - DNA, 1191 bp, Artificial Sequence
  derived and/or modified sequence
atggatccaaggggaaccaaacggggtgcggagaagacggaggtggccgaaccacggaacaaactccccagacctgctccctcactgcccaccgatcccgcactttactccggtccctttcccttctataggcgcccatccgagctgggttgctttagtctcgacgcccagaggcaataccatggtgatgcccgagctctgagatattattcccctccccctaccaatggaccagggccaaactttgaccttagggacgggtatcccgacaggtatcaaccacgggacgaagaggtgcaggagaggctcgatcaccttttgtgctggcttttggagcacaggggtcgcctggagggaggacctggatggctggctgaagcgattgtgacttggagaggacacctcactaaactgcttaccactccgtatgagcgacaagaggggtggcagctggcagctagcaggtttcaaggcacactctatctcagcgaagtcgagactcctaacgctcgagcacagcggcttgcaagaccacctctgttacgagagttgatgtatatgggatacaaattcgaacagtatatgtgcgctgataaacctgggtctagtcccgacccatccggcgaagtaaatactaatgtggccttctgctccgtgctgcggtccagactgggctcccaccccctccttttcagcggggaggtcgactgcacggatccacaggccccatctactcagcctccgacatgctacgtcgaactaaagaccagtaaggaaatgcaatcacccggacaatggaggagcttctaccgccataaactattaaaatggtgggcccagtcttttctgccaggcgtcccgaatgtggtcgcgggttttcgaaaccccgatgggttcgtgagctcactcaagaccttccctactatgaaaatgttcgaatatgtacgaaacgaccgggacggctggaatccatcagtctgcatgaatttttgcgccgcatttttatcctttgctcagtcaacagttgtgcaagacgatccacgccttgtacacttgttttcatgggagcccggtggaccggttaccgtctccgttcaccaggacgccccttatgcatttctgcctatttggtacgttgaggctatgacacaagatttacccagccccccaaaaacacccagtcccaagtag

SEQ ID NO: 296974 - DNA, 1191 bp, Artificial Sequence
  derived and/or modified sequence
atggatccaaggggaacaaaacgcggtgcagaaaagaccgaagttgccgagcccagaaataagctgcctcgtcctgccccaagcttgcctacggatccagccctgtacagtggaccatttcccttctacaggcggccaagcgagttgggatgcttctcattagatgcccaaaggcagtatcatggggatgcgagagccctgaggtattacagccccccacccaccaacggtccaggaccaaattttgatctccgtgacgggtaccccgatcgctaccagcctagagacgaggaggtacaggagagacttgaccacctgctttgttggctgcttgagcatagggggcgattagaagggggacccggttggttagctgaagcaattgtcacttggcggggtcatctcacaaagctgctgacaaccccctacgaaagacaggaaggctggcagttagccgctagtcggtttcagggcactctctacttatccgaagtggagacacctaatgcaagggcccagcgtctcgcgagaccaccccttctcagagaactcatgtacatgggctacaaattcgaacagtatatgtgcgccgataagcccggaagttcaccggaccctagtggcgaagtgaacacaaatgtcgcgttttgttccgtgctgcgctcacgactaggctctcacccactgttatttagcggtgaggtagattgcaccgacccccaagctcccagtacccaacccccaacctgttacgtcgagctgaaaactagtaaagagatgcaatctccaggccagtggcgcagtttttatcgtcataaactgctgaagtggtgggcgcaatccttcctgccaggcgtcccaaacgtagttgccggattccgaaatcctgacgggtttgtatcatcactgaagactttccccacgatgaagatgttcgagtatgtgcggaatgatcgtgatggctggaatccaagcgtctgcatgaacttctgtgctgctttcctatcttttgctcagtcgacagtggtgcaggatgacccacgactagtacacttgttctcttgggagcccggtggccctgttaccgtgtcagtgcaccaggacgccccatatgcattccttcctatctggtacgtggaggcgatgactcaggatctgccctcgcccccaaagacaccctcccctaagtag

SEQ ID NO: 296975 - DNA, 1191 bp, Artificial Sequence
  derived and/or modified sequence
atggatcctagaggtaccaaaaggggcgcagaaaagactgaagtcgcggagccgagaaataaactaccacgaccagcgccttcgctgcccacagaccctgcactgtattccggccctttcccattctacagacggccatcagaactggggtgttttagcttagatgcccaaagacaatatcatggagatgccagagccctgagatattatagccctccacctactaacggacccggtcctaattttgacctgagggatggctatccagataggtatcagccccgtgacgaggaagtgcaggagcgcctggaccatctcctctgctggctactggaacatagaggaaggcttgaggggggtcccggttggctggctgaggctatcgtcacatggcgtggccacctgacaaaactgcttactacgccctacgagcgccaggaagggtggcagctggcggcatcgaggttccaagggacattgtacctctctgaggtcgaaactcccaatgctagggcccagagacttgcaagaccaccccttcttagggagcttatgtacatggggtataaatttgagcagtacatgtgtgcagacaagcccggttctagtccggatccatcaggcgaggtgaatacaaacgtcgcattttgctccgtgctccggtccagactcgggagtcatccactgctgttctccggagaggtggactgcactgacccccaggccccatccacccagcctcctacttgttacgtcgaacttaagacctctaaggaaatgcagtcccctgggcaatggcggagcttttaccggcacaaactccttaaatggtgggcacagtcttttctcccaggagtacccaacgtcgttgcgggtttcagaaatcctgacggctttgtatcttctctcaaaaccttcccgaccatgaaaatgttcgaatacgtcaggaacgacagagacggttggaatccttcagtgtgcatgaacttctgtgccgcattcttgagcttcgcacagagtacagtggtccaggacgacccgagacttgtgcatcttttctcgtgggagcccggaggcccagtcactgtgagcgtgcatcaggatgctccttatgcctttttacccatctggtacgtagaagccatgactcaagatttgccctcacctcccaagacgcctagcccaaagtag

SEQ ID NO: 296976 - DNA, 1191 bp, Artificial Sequence
  derived and/or modified sequence
atggaccccagaggcaccaagagaggcgccgagaagaccgaggtggccgagcccagaaacaagctgcccagacccgcccccagcctgcccaccgaccccgccctgtacagcggccccttccccttctacagaagacccagcgagctgggctgcttcagcctggacgcccagagacagtaccacggcgacgccagagccctgagatactacagccccccccccaccaacggccccggccccaacttcgacctgagagacggctaccccgacagataccagcccagagacgaggaggtgcaggagagactggaccacctgctgtgctggctgctggagcacagaggcagactggagggcggccccggctggctggccgaggccatcgtgacctggagaggccacctgaccaagctgctgaccaccccctacgagagacaggagggctggcagctggccgccagcagattccagggcaccctgtacctgagcgaggtggagacccccaacgccagagcccagagactggccagaccccccctgctgagagagctgatgtacatgggctacaagttcgagcagtacatgtgcgccgacaagcccggcagcagccccgaccccagcggcgaggtgaacaccaacgtggccttctgcagcgtgctgagaagcagactgggcagccaccccctgctgttcagcggcgaggtggactgcaccgacccccaggcccccagcacccagccccccacctgctacgtggagctgaagaccagcaaggagatgcagagccccggccagtggagaagcttctacagacacaagctgctgaagtggtgggcccagagcttcctgcccggcgtgcccaacgtggtggccggcttcagaaaccccgacggcttcgtgagcagcctgaagaccttccccaccatgaagatgttcgagtacgtgagaaacgacagagacggctggaaccccagcgtgtgcatgaacttctgcgccgccttcctgagcttcgcccagagcaccgtggtgcaggacgaccccagactggtgcacctgttcagctgggagcccggcggccccgtgaccgtgagcgtgcaccaggacgccccctacgccttcctgcccatctggtacgtggaggccatgacccaggacctgcccagcccccccaagacccccagccccaagtag

SEQ ID NO: 296977 - DNA, 1628 bp, Artificial Sequence
  derived and/or modified sequence
gtgatgacgaaaggagcgtcaacttgtcgtccctcaggcccgtcagtgctgggaggggcggtggcgacgcacataccagcatcacctccgccaggccgggccccacgccggccgcggattggctccctccaagggcacgcacgcccggggactcgttggcggcgtggaggggcgccggtggccacgttggtgtcaacctccttcgtgaagctcacacctcccccgccccgggaggggtttgcccgccactgtcgctgaatgattgcatcatcgaaagcagaaaaccacttttgcatccttcggcctctggcgtgcctgccatgacgtcatagctctgcggaggtggaagttggggagctttgaggacctcatggatcccagggggaccaagagaggagctgagaagacagaggtagctgagcctcggaacaaactacctcgtccagcaccttctctgcccacagaccctgccctctactctgggccctttcctttctaccggcgcccttcggaactgggctgcttctccctggatgctcaacgccagtaccatggagatgcccgagccctgcgctactatagcccaccccccactaacggtccaggccccaactttgacctcagagacggatacccggatcgataccagccccgggacgaggaggtccaggaaaggctggaccacctgctgtgctggctcctggaacaccgaggccggttggaggggggtccaggctggctggcagaggccatagtgacgtggcgggggcacctgacaaaactgctgacgacaccgtatgagcggcaggagggctggcagctggcagcctcccggttccagggaacactatacctgagtgaagtggagacaccgaacgctcgggcccagaggcttgctcggccaccgctcctccgggagcttatgtacatgggatacaaatttgagcagtacatgtgtgcagacaaacctggaagctccccagacccctctggggaggttaacaccaacgtggccttctgctctgtgctacgcagccgcctgggaagccaccctctgctcttctcaggggaggtagactgcacagacccccaagccccatccacacagcccccgacctgctatgtggagctcaagacctccaaggagatgcaaagccctggccaatggaggagtttctacagacacaagctcctgaaatggtgggctcagtcattcctcccaggggtcccgaatgttgttgctggcttccgtaacccagacggttttgtctcttccctcaagacctttcctaccatgaagatgtttgaatatgtcaggaatgaccgtgacggctggaatccctctgtgtgcatgaacttctgtgccgccttccttagctttgcccagagcacggttgtccaggatgaccccaggctcgttcatctcttctcttgggagcctggcggcccagtcaccgtgtctgtacaccaagatgcaccttacgccttcctgcccatatggtatgtggaagctatgactcaggacctcccatcaccccccaagactccctctcccaaatagtaatgctttagagggaggcagtcatatctctgtgtgcagataataaaagcatatttctaagaggttc

SEQ ID NO: 296978 - DNA, 1516 bp, Artificial Sequence
  derived and/or modified sequence
tggcggcgtggaggggcgccggtggccacgttggtgtcaacctccttcgtgaagctcacacctcccccgccccgggaggggtttgcccgccactgtcgctgaatgattgcatcatcgaaagcagaaaaccacttttgcatccttcggcctctggcgtgcctgccatgacgtcatagctctgcggaggtggaagttggggagctttgaggcctcctctgtagaatggaaactctgtacccctgcttgtcttaggacctcatggatcccagggggaccaagagaggagctgagaagacagaggtagctgagcctcggaacaaactacctcgtccagcaccttctctgcccacagaccctgccctctactctgggccctttcctttctaccggcgcccttcggaactgggctgcttctccctggatgctcaacgccagtaccatggagatgcccgagccctgcgctactatagcccaccccccactaacggtccaggccccaactttgacctcagagacggatacccggatcgataccagccccgggacgaggaggtccaggaaaggctggaccacctgctgtgctggctcctggaacaccgaggccggttggaggggggtccaggctggctggcagaggccatagtgacgtggcgggggcacctgacaaaactgctgacgacaccgtatgagcggcaggagggctggcagctggcagcctcccggttccagggaacactatacctgagtgaagtggagacaccgaacgctcgggcccagaggcttgctcggccaccgctcctccgggagcttatgtacatgggatacaaatttgagcagtacatgtgtgcagacaaacctggaagctccccagacccctctggggaggttaacaccaacgtggccttctgctctgtgctacgcagccgcctgggaagccaccctctgctcttctcaggggaggtagactgcacagacccccaagccccatccacacagcccccgacctgctatgtggagctcaagacctccaaggagatgcaaagccctggccaatggaggagtttctacagacacaagctcctgaaatggtgggctcagtcattcctcccaggggtcccgaatgttgttgctggcttccgtaacccagacggttttgtctcttccctcaagacctttcctaccatgaagatgtttgaatatgtcaggaatgaccgtgacggctggaatccctctgtgtgcatgaacttctgtgccgccttccttagctttgcccagagcacggttgtccaggatgaccccaggctcgttcatctcttctcttgggagcctggcggcccagtcaccgtgtctgtacaccaagatgcaccttacgccttcctgcccatatggtatgtggaagctatgactcaggacctcccatcaccccccaagactccctctcccaaatagtaatgctttagagggaggcagtcatatctctgtgtgcagataataaaagcatatttctaagaggttc

SEQ ID NO: 296979 - DNA, 1554 bp, Artificial Sequence
  derived and/or modified sequence
tgacgtcatagctctgcggaggtggaagttggggagctttgaggtaactggattcttgatctgagcgcagacgtccttcctaacctcactgcatttggaggacctggagggagggtgggtgaagggcaaggaaagaggcaggatgagagcttggccgcggtggcgtctgaggggcctgaatgtttcaaggccagagcctggcgatcaggtggctcgcttagtcctaaaccagtcatccttctccaggcctcctctgtagaatggaaactctgtacccctgcttgtcttaggacctcatggatcccagggggaccaagagaggagctgagaagacagaggtagctgagcctcggaacaaactacctcgtccagcaccttctctgcccacagaccctgccctctactctgggccctttcctttctaccggcgcccttcggaactgggctgcttctccctggatgctcaacgccagtaccatggagatgcccgagccctgcgctactatagcccaccccccactaacggtccaggccccaactttgacctcagagacggatacccggatcgataccagccccgggacgaggaggtccaggaaaggctggaccacctgctgtgctggctcctggaacaccgaggccggttggaggggggtccaggctggctggcagaggccatagtgacgtggcgggggcacctgacaaaactgctgacgacaccgtatgagcggcaggagggctggcagctggcagcctcccggttccagggaacactatacctgagtgaagtggagacaccgaacgctcgggcccagaggcttgctcggccaccgctcctccgggagcttatgtacatgggatacaaatttgagcagtacatgtgtgcagacaaacctggaagctccccagacccctctggggaggttaacaccaacgtggccttctgctctgtgctacgcagccgcctgggaagccaccctctgctcttctcaggggaggtagactgcacagacccccaagccccatccacacagcccccgacctgctatgtggagctcaagacctccaaggagatgcaaagccctggccaatggaggagtttctacagacacaagctcctgaaatggtgggctcagtcattcctcccaggggtcccgaatgttgttgctggcttccgtaacccagacggttttgtctcttccctcaagacctttcctaccatgaagatgtttgaatatgtcaggaatgaccgtgacggctggaatccctctgtgtgcatgaacttctgtgccgccttccttagctttgcccagagcacggttgtccaggatgaccccaggctcgttcatctcttctcttgggagcctggcggcccagtcaccgtgtctgtacaccaagatgcaccttacgccttcctgcccatatggtatgtggaagctatgactcaggacctcccatcaccccccaagactccctctcccaaatagtaatgctttagagggaggcagtcatatctctgtgtgcagataataaaagcatatttctaagaggttc

SEQ ID NO: 296980 - protein, 356 aa, Artificial Sequence
  derived and/or modified sequence
MSRPLLITFTPATDPSDLWKDGQQQPQPEKPESTLDGAAARAFYEALIGDESSAPDSQRSQTEPARERKRKKRRIMKAPAAEAVAEGASGRHGQGRSLEAEDKMTHRILRAAQEGDLPELRRLLEPHEAGGAGGNINARDAFWWTPLMCAARAGQGAAVSYLLGRGAAWVGVCELSGRDAAQLAEEAGFPEVARMVRESHGETRSPENRSPTPSLQYCENCDTHFQDSNHRTSTAHLLSLSQGPQPPNLPLGVPISSPGFKLLLRRGWEPGMGLGPRGEGRANPIPTVLKRDQEGLGYRSAPQPRVTHFPAWDTRAVAGRERPPRVATLSWREERRREEKDRAWERDLRTYMNLEF

SEQ ID NO: 296981 - protein, 198 aa, Artificial Sequence
  derived and/or modified sequence
MSRPLLITFTPATDPSDLWKDGQQQPQPEKPESTLDGAAARAFYEALIGDESSAPDSQRSQTEPARERKRKKRRIMKAPAAEAVAEGASGRHGQGRSLEAEDKMTHRILRAAQEGDLPELRRLLEPHEAGGAGGNINARDAFWWTPLMCAARAGQGAAVSYLLGRGAAWVGVCELSGRDAAQLAEEAGFPEVARMVRE

SEQ ID NO: 296982 - protein, 90 aa, Artificial Sequence
  derived and/or modified sequence
MSRPLLITFTPATDPSDLWKDGQQQPQPEKPESTLDGAAARAFYEALIGDESSAPDSQRSQTEPARERKRKKRRIMKAPAAEAVAEGASG

SEQ ID NO: 296983 - DNA, 1598 bp, Artificial Sequence
  derived and/or modified sequence
cagagacccttgacgggcatactgtttcctccgggctcctgcctcatgaggggagaggtgcggcttggctccaatggcgccattttgcggtacggaagctacacagcaacacgtataggagactctccccgagatcttctagggagtgacccatctatttttgtttgggaagaggaaactccgaaatgggatcgcggaagacttaaagggccaggctgatttttttttcctactgcaggtctctgaggctgtggttgctacagggtcaccacgagcttggcttacttgtctcatccttcccttgcctggtatcattttctcagttctcccaaaagccatgtcccggcccttgctcatcaccttcaccccagccactgaccccagcgacctctggaaggatgggcagcagcagccacagcccgagaagccagagtccaccctggatggggctgcagcccgagctttctatgaggccctgattggggatgagagcagcgctcctgactcccagagatctcagactgaacctgccagagaaagaaagagaaagaaaagaagaataatgaaggcaccagcagcagaagcagtggcagaaggagcatcaggaagacatggacaagggagatcccttgaggctgaggataagatgactcaccggatactgagggcagcccaggagggggacctgccagaacttaggagactgctggaaccgcatgaggcaggaggagctggggggaatatcaacgcccgggatgccttctggtggaccccactgatgtgtgctgctcgagcgggccagggggcagctgtgagctatctcctgggccgtggggctgcctgggtgggggtctgtgagctgagtggcagggatgcggctcagctcgctgaagaagctggcttccctgaggtagcccgcatggtcagggagagccatggagagacaaggagcccggaaaaccggtctcctactccctccctccagtactgcgagaactgtgacacccacttccaagattccaaccaccgcacatccactgctcacctgctgtcactgtcgcagggtcctcagcctcccaaccttccacttggggtgcccatctccagcccgggcttcaaactgctgctgaggcggggctgggagccaggaatggggctgggaccccggggtgagggccgtgccaatcccatccccactgtcctcaagagggaccaggaaggactaggctacagatcagcaccccagccccgagtgacacatttcccagcttgggatacccgagctgtggctgggagggagagaccccctcgggtggccacactgagctggagggaggagagaaggagggaggagaaagacagggcttgggagcgggatctaaggacttacatgaacctcgagttctgactttggtaaagtctgaccctagtctgctgctgaagtctgaacttgggcctctgacctgggccctttgacttccccttcctgggatctgctcagatgcagatcctgaagtttttggtcaataggctctgtcttcgtgagagacgggctgagagtcagaaataaatcaaccatttgtggtttattcactttt

SEQ ID NO: 296984 - DNA, 2794 bp, Artificial Sequence
  derived and/or modified sequence
cacatcaaagtccggagaccccatgtgccgctcccagcgacaagggactcggagcagcgacgacttcagactcaccggctggacggggaccaggactggggtggggtagggaagttgctacttccagggaacggcggcgaccgctacagcgcaggccgcggacccgaccgcggcaggcgaagtggggtggggggagtggaaattagggagggtggggaagagggcaaacacgcaagcgccaagggtcaggtgccgcggtggatgccgggacacggagtccccggtagagaaagaaactggctaaatgagagaaagcgaactaccaatcccaggatgacccgcgcacgacctggctgtcacgaaggcccggaggagggcgcttgcgggcggggcacaacgagaagccaccggaagcggaagccagaatggcgccattttgcggtacggaagctacacagcaacacgtataggagactctccccgagatcttctagggagtgacccatctatttttgtttgggaagaggaaactccgaaatgggatcgcggaagacttaaagggccaggctgatttttttttcctactggtctctgaggctgtggttgctacagggtcaccacgagcttggcttacttgtctcatccttcccttgcctggtatcattttctcagttctcccaaaagccatgtcccggcccttgctcatcaccttcaccccagccactgaccccagcgacctctggaaggatgggcagcagcagccacagcccgagaagccagagtccaccctggatggggctgcagcccgagctttctatgaggccctgattggggatgagagcagcgctcctgactcccagagatctcagactgaacctgccagagaaagaaagagaaagaaaagaagaataatgaaggcaccagcagcagaagcagtggcagaaggagcatcaggaagacatggacaagggagatcccttgaggctgaggataagatgactcaccggatactgagggcagcccaggagggggacctgccagaacttaggagactgctggaaccgcatgaggcaggaggagctggggggaatatcaacgcccgggatgccttctggtggaccccactgatgtgtgctgctcgagcgggccagggggcagctgtgagctatctcctgggccgtggggctgcctgggtgggggtctgtgagctgagtggcagggatgcggctcagctcgctgaagaagctggcttccctgaggtagcccgcatggtcagggagagccatggagagacaaggagcccggaaaaccggtctcctactccctccctccagtactgcgagaactgtgacacccacttccaagattccaaccaccgcacatccactgctcacctgctgtcactgtcgcagggtcctcagcctcccaaccttccacttggggtgcccatctccagcccgggcttcaaactgctgctgaggcggggctgggagccaggaatggggctgggaccccggggtgagggccgtgccaatcccatccccactgtcctcaagagggaccaggaaggactaggctacagatcagcaccccagccccgagtgacacatttcccagcttgggatacccgagctgtggctgggagggagagaccccctcgggtggccacactgagctggagggaggagagaaggagggaggagaaagacagggcttgggagcgggatctaaggacttacatgaacctcgagttctgactttggtaaagtctgaccctagtctgctgctgaagtctgaacttgggcctctgacctgggccctttgacttccccttcctgggatctgctcagatgcagatcctgaagtttttggtcaataggctctgtcttcgtgagagacgggctgagagtcagaaataaatcaaccatttgtggtttattcacttttctggaagctattttgaggaagccaaacagaagcctgggagccacatgcaagtcccacctgagtcagaaggggcagcctctccaggtggcatgataaggtcacctccctgccaatctgggttcactttcaggtcccagaccctcctgggagtcccccacctattctttcaacccccctggaccaagaattgcccagcttcgtgcaagtctcacttcccccaggaggagttccctgactacagccaattcactgatttcacaaacataagtccatatactatgtgccaagaatacaggtaaagacattcccaaccctcaaagagttcacagctggagagggaaagtgccatgttatcaatttttttcttttttttttgagatgcagtttcgctctcattgcccaggctggagtgcaatggcatgatctcggctcaccacaacctctgccccccgagttcaagggattctcctgcctcagcctccccagtagctgggattacaggcatgccccaccacgcccagctaattttgtatttttagtagagacggggtttctccatgttggccaagctggtcttgaactcccgacctcaggtgatccgccggcctcggcttcccaaagtgctggggttgcaggcatgagccaccactcccggcccatgttatcaaatattataatgcagggtgataagggaagtcaaggcctctagagatgagaatgggtagggttttgctggaagaggccagtgtgataggaaggcccacgattatcaagcttgtacacttagttgaactgggaccagaactctagcccccaaatctaaactttaaacttctttgttccaccc

SEQ ID NO: 296985 - DNA, 1800 bp, Artificial Sequence
  derived and/or modified sequence
cggggcccgggagtctgggcaatacagttttgtgctcactgggtgaagaggctgacttagggcggggaaaggagggagccaggctggatctctttccgcagctctcctcacgttcccctctagtcccggcgcggcgctgctgcccgggggactggcctatcctcggccaatccgctgggtccttattgcctgttgggcccctagtgcgaatcagtcccgccagagacccttgacgggcatactgtttcctccgggctcctgcctcatgaggggagagaatggcgccattttgcggtacggaagctacacagcaacacgtataggagactctccccgagatcttctagggagtgacccatctatttttgtttgggaagaggaaactccgaaatgggatcgcggaagacttaaagggccaggctgatttttttttcctactggtctctgaggctgtggttgctacagggtcaccacgagcttggcttacttgtctcatccttcccttgcctggtatcattttctcagttctcccaaaagccatgtcccggcccttgctcatcaccttcaccccagccactgaccccagcgacctctggaaggatgggcagcagcagccacagcccgagaagccagagtccaccctggatggggctgcagcccgagctttctatgaggccctgattggggatgagagcagcgctcctgactcccagagatctcagactgaacctgccagagaaagaaagagaaagaaaagaagaataatgaaggcaccagcagcagaagcagtggcagaaggagcatcaggaagacatggacaagggagatcccttgaggctgaggataagatgactcaccggatactgagggcagcccaggagggggacctgccagaacttaggagactgctggaaccgcatgaggcaggaggagctggggggaatatcaacgcccgggatgccttctggtggaccccactgatgtgtgctgctcgagcgggccagggggcagctgtgagctatctcctgggccgtggggctgcctgggtgggggtctgtgagctgagtggcagggatgcggctcagctcgctgaagaagctggcttccctgaggtagcccgcatggtcagggagagccatggagagacaaggagcccggaaaaccggtctcctactccctccctccagtactgcgagaactgtgacacccacttccaagattccaaccaccgcacatccactgctcacctgctgtcactgtcgcagggtcctcagcctcccaaccttccacttggggtgcccatctccagcccgggcttcaaactgctgctgaggcggggctgggagccaggaatggggctgggaccccggggtgagggccgtgccaatcccatccccactgtcctcaagagggaccaggaaggactaggctacagatcagcaccccagccccgagtgacacatttcccagcttgggatacccgagctgtggctgggagggagagaccccctcgggtggccacactgagctggagggaggagagaaggagggaggagaaagacagggcttgggagcgggatctaaggacttacatgaacctcgagttctgactttggtaaagtctgaccctagtctgctgctgaagtctgaacttgggcctctgacctgggccctttgacttccccttcctgggatctgctcagatgcagatcctgaagtttttggtcaataggctctgtcttcgtgagagacgggctgagagtcagaaataaatcaaccatttgtggtttattcactttt

SEQ ID NO: 296986 - DNA, 1814 bp, Artificial Sequence
  derived and/or modified sequence
ggtatggcgttcggggcccgggagtctgggcaatacagttttgtgctcactgggtgaagaggctgacttagggcggggaaaggagggagccaggctggatctctttccgcagctctcctcacgttcccctctagtcccggcgcggcgctgctgcccgggggactggcctatcctcggccaatccgctgggtccttattgcctgttgggcccctagtgcgaatcagtcccgccagagacccttgacgggcatactgtttcctccgggctcctgcctcatgaggggagagaatggcgccattttgcggtacggaagctacacagcaacacgtataggagactctccccgagatcttctagggagtgacccatctatttttgtttgggaagaggaaactccgaaatgggatcgcggaagacttaaagggccaggctgatttttttttcctactgcaggtctctgaggctgtggttgctacagggtcaccacgagcttggcttacttgtctcatccttcccttgcctggtatcattttctcagttctcccaaaagccatgtcccggcccttgctcatcaccttcaccccagccactgaccccagcgacctctggaaggatgggcagcagcagccacagcccgagaagccagagtccaccctggatggggctgcagcccgagctttctatgaggccctgattggggatgagagcagcgctcctgactcccagagatctcagactgaacctgccagagaaagaaagagaaagaaaagaagaataatgaaggcaccagcagcagaagcagtggcagaaggagcatcaggaagacatggacaagggagatcccttgaggctgaggataagatgactcaccggatactgagggcagcccaggagggggacctgccagaacttaggagactgctggaaccgcatgaggcaggaggagctggggggaatatcaacgcccgggatgccttctggtggaccccactgatgtgtgctgctcgagcgggccagggggcagctgtgagctatctcctgggccgtggggctgcctgggtgggggtctgtgagctgagtggcagggatgcggctcagctcgctgaagaagctggcttccctgaggtagcccgcatggtcagggagagccatggagagacaaggagcccggaaaaccggtctcctactccctccctccagtactgcgagaactgtgacacccacttccaagattccaaccaccgcacatccactgctcacctgctgtcactgtcgcagggtcctcagcctcccaaccttccacttggggtgcccatctccagcccgggcttcaaactgctgctgaggcggggctgggagccaggaatggggctgggaccccggggtgagggccgtgccaatcccatccccactgtcctcaagagggaccaggaaggactaggctacagatcagcaccccagccccgagtgacacatttcccagcttgggatacccgagctgtggctgggagggagagaccccctcgggtggccacactgagctggagggaggagagaaggagggaggagaaagacagggcttgggagcgggatctaaggacttacatgaacctcgagttctgactttggtaaagtctgaccctagtctgctgctgaagtctgaacttgggcctctgacctgggccctttgacttccccttcctgggatctgctcagatgcagatcctgaagtttttggtcaataggctctgtcttcgtgagagacgggctgagagtcagaaataaatcaaccatttgtggtttattcactttt
